(19) United States
(12) Patent Application Publication
(10) Pub. No.: US 2025/0235526 A1
(43) Pub. Date: Jul. 24, 2025

(54) COMPOSITIONS AND METHODS FOR OPTIMIZED HIV PEPTIDE VACCINES

(71) Applicant: Think Therapeutics, Inc., Newton, MA (US)

(72) Inventors: David Gifford, Newton, MA (US); Brandon Carter, Cambridge, MA (US)

(21) Appl. No.: 19/031,772

(22) Filed: Jan. 18, 2025

Related U.S. Application Data
(60) Provisional application No. 63/624,624, filed on Jan. 24, 2024.

(51) Int. Cl. A61K 39/21; A61K 39/00; C12N 7/00

(52) U.S. Cl. CPC A61K 39/21; C12N 7/00; A61K 2039/53; C12N 2740/16034

(57) ABSTRACT

Described herein is a composition comprising nucleic acid sequences encoding at least two amino acid sequences selected from the group consisting of SEQ ID NOs: 1 to 54. Also described herein is a composition comprising nucleic acid sequences encoding at least two amino acid sequences selected from the group consisting of SEQ ID NOs: 57 to 87.

### CROSS-REFERENCE TO RELATED APPLICATIONS

[0001] This application claims the benefit of U.S. Provisional Application No. 63/624,624, filed Jan. 24, 2024, the contents of which are hereby incorporated by reference in their entirety.

### COPYRIGHT

[0002] This patent disclosure contains material that is subject to copyright protection. The copyright owner has no objection to the facsimile reproduction of the patent document or the patent disclosure as it appears in the U.S. Patent and Trademark Office patent file or records, but otherwise reserves any and all copyright rights.

### INCORPORATION BY REFERENCE

[0003] For countries that permit incorporation by reference, all of the references cited in this disclosure are hereby incorporated by reference in their entireties. In addition, any manufacturers' instructions or catalogues for any products cited or mentioned herein are incorporated by reference. Documents incorporated by reference into this text, or any teachings therein, can be used in the practice of the present invention. Documents incorporated by reference into this text are not admitted to be prior art.

### SEQUENCE LISTING

[0004] The instant application contains a Sequence Listing which has been submitted electronically in XML format and is hereby incorporated by reference in its entirety. The XML copy, created on Dec. 3, 2024, is named ThinkTx_003_US1_SL and is 11,034,755 bytes in size.

### FIELD OF THE INVENTION

[0005] The present invention relates generally to compositions, systems, and methods of peptide vaccines. More particularly, the present invention relates to compositions, systems, and methods of designing peptide vaccines to treat or prevent disease optimized based on predicted population immunogenicity.

### BACKGROUND

[0006] The goal of a peptide vaccine is to train the immune system to recognize and expand its capacity to engage cells that display target peptides to improve the immune response to cancerous cells or pathogens. A peptide vaccine can also be administered to someone who is already diseased to increase their immune response to a causal cancer, other diseases, or pathogen. Alternatively, a peptide vaccine can be administered to induce the immune system to have therapeutic tolerance to one or more peptides.

[0007] There exists a need for compositions, systems, and methods of peptide vaccines based on prediction of the target peptides that will be displayed to protect a host from cancer, other disease, or pathogen infection. We introduce novel prophylactic and therapeutic vaccines for Human Immunodeficiency Virus (HIV) infection and disease that include peptides from the HIV proteins gag and pol. Infection with HIV causes AIDS (acquired immunodeficiency syndrome), and thus the novel vaccines we introduce for HIV provide prophylaxis and treatment of AIDS.

### SUMMARY OF THE INVENTION

[0008] In one aspect, the invention provides for nucleic acid sequences encoding one or more amino acid sequences selected from the group consisting of SEQ ID NOs: 1 to 56.

[0009] In some embodiments, the nucleic acid sequences encode two or more amino acid sequences selected from the group consisting of SEQ ID NOs: 1 to 56.

[0010] In another aspect, the invention provides for a composition comprising nucleic acid sequences encoding one or more amino acid sequences selected from the group consisting of SEQ ID NOs: 1 to 56.

[0011] In some embodiments, the composition is administered to a subject. In some embodiments, the composition comprises nucleic acid sequences encoding two or more amino acid sequences selected from the group consisting of SEQ ID NOs: 1 to 56. In some embodiments, the nucleic acid sequences are administered in a construct for expression in vivo.

[0012] In some embodiments, the in vivo administration of the nucleic acid sequences are configured to produce one or more peptides that is displayed by an HLA class I molecule. In some embodiments, the nucleic acid sequences are configured to allow expression of at least two peptides encoded by the nucleic acid sequences that are each displayed by a peptide specific set of HLA class I alleles, wherein all of the peptide specific sets of HLA class I alleles are not identical. In some embodiments, each of the one or more peptides is a modified or unmodified fragment of an HIV protein. In some embodiments, the composition is administered in an effective amount to a subject to prevent HIV. In some embodiments, the composition is administered in an effective amount to a subject to treat HIV.

[0013] In some embodiments, the composition comprises nucleic acid sequences encoding at least three amino acid sequences selected from the group consisting of SEQ ID NOs: 1 to 56.

[0014] In another aspect, the invention provides for a peptide composition comprising one or more peptides selected from the group consisting of SEQ ID NOs: 1 to 56.

[0015] In some embodiments, the peptide composition comprises two or more peptides selected from the group consisting of SEQ ID NOs: 1 to 56. In some embodiments, the composition is administered to a subject.

[0016] In some embodiments, the peptide composition comprises three or more peptides selected from the group consisting of SEQ ID NOs: 1 to 56.

[0017] In another aspect, the invention provides for a composition comprising nucleic acid sequences encoding one or more amino acid sequences selected from the group consisting of SEQ ID NOs: 1 to 54.

[0018] In some embodiments, the composition is administered to a subject. In some embodiments, the composition comprises nucleic acid sequences encoding two or more amino acid sequences selected from the group consisting of SEQ ID NOs: 1 to 54. In some embodiments, the nucleic acid sequences are administered in a construct for expression in vivo. In some embodiments, the in vivo administration of the nucleic acid sequences are configured to produce one or more peptides that is displayed by an HLA class I molecule. In some embodiments, the nucleic acid sequences are configured to allow expression of at least two peptides encoded by the nucleic acid sequences that are each displayed by a peptide specific set of HLA class I alleles, wherein all of the peptide specific sets of HLA class I alleles are not identical. In some embodiments, each of the one or more peptides is a modified or unmodified fragment of an HIV protein. In some embodiments, the composition is administered in an effective amount to a subject to prevent HIV. In some embodiments, the composition is administered in an effective amount to a subject to treat HIV.

[0019] In some embodiments, the composition comprises nucleic acid sequences encoding at least three amino acid sequences selected from the group consisting of SEQ ID NOs: 1 to 54.

[0020] In another aspect, the invention provides for a method of treating or preventing HIV by administering to a subject a composition comprising nucleic acid sequences encoding one or more amino acid sequences selected from the group consisting of SEQ ID NOs: 1 to 54.

[0021] In some embodiments, the composition comprises nucleic acid sequences encoding two or more amino acid sequences selected from the group consisting of SEQ ID NOs: 1 to 54.

[0022] In another aspect, the invention provides for a peptide composition comprising one or more peptides selected from the group consisting of SEQ ID NOs: 1 to 54.

[0023] In some embodiments, the peptide composition comprises two or more peptides selected from the group consisting of SEQ ID NOs: 1 to 54. In some embodiments a peptide in the peptide composition is displayed by an HLA class I molecule. In some embodiments, the at least two peptides are each capable of being displayed by a peptide specific set of HLA class I alleles, wherein all of the peptide specific sets of HLA class I alleles are not identical. In some embodiments, a peptide in the peptide composition is a modified or unmodified fragment of an HIV protein. In some embodiments, the peptide composition is administered in an effective amount to a subject to prevent HIV. In some embodiments, the peptide composition is administered in an effective amount to a subject to treat HIV.

[0024] In some embodiments, the peptide composition comprises three or more peptides selected from the group consisting of SEQ ID NOs: 1 to 54.

[0025] In another aspect, the invention provides for a method of treating or preventing HIV in a subject comprising administering to the subject a peptide composition comprising one or more peptides selected from the group consisting of SEQ ID NOs: 1 to 54.

[0026] In some embodiments, the peptide composition comprises two or more peptides selected from the group consisting of SEQ ID NOs: 1 to 54.

[0027] In another aspect, the invention provides for nucleic acid sequences encoding one or more amino acid sequences selected from the group consisting of SEQ ID NOs: 57 to 87.

[0028] In some embodiments, the nucleic acid sequences encode two or more amino acid sequences selected from the group consisting of SEQ ID NOs: 57 to 87.

[0029] In another aspect, the invention provides for a composition comprising nucleic acid sequences encoding one or more amino acid sequences selected from the group consisting of SEQ ID NOs: 57 to 87.

[0030] In some embodiments, the composition is administered to a subject. In some embodiments, the composition comprises nucleic acid sequences encoding two or more amino acid sequences selected from the group consisting of SEQ ID NOs: 57 to 87. In some embodiments, the nucleic acid sequences are administered in a construct for expression in vivo. In some embodiments, the in vivo administration of the nucleic acid sequences are configured to produce one or more peptides that is displayed by an HLA class II molecule. In some embodiments, the nucleic acid sequences are configured to allow expression of at least two peptides encoded by the nucleic acid sequences that are each displayed by a peptide specific set of HLA class II alleles, wherein all of the peptide specific sets of HLA class II alleles are not identical. In some embodiments, each of the one or more peptides is a modified or unmodified fragment of an HIV protein. In some embodiments, the composition is administered in an effective amount to a subject to prevent HIV. In some embodiments, the composition is administered in an effective amount to a subject to treat HIV.

[0031] In some embodiments, the composition comprises nucleic acid sequences encoding at least three amino acid sequences selected from the group consisting of SEQ ID NOs: 57 to 87.

[0032] In another aspect, the invention provides for a peptide composition comprising one or more peptides selected from the group consisting of SEQ ID NOs: 57 to 87.

[0033] In some embodiments, the peptide composition comprises two or more peptides selected from the group consisting of SEQ ID NOs: 57 to 87. In some embodiments, the composition is administered to a subject.

[0034] In some embodiments, the peptide composition comprises three or more peptides selected from the group consisting of SEQ ID NOs: 57 to 87.

[0035] In another aspect, the invention provides for nucleic acid sequences encoding one or more amino acid sequences selected from the group consisting of SEQ ID NOs: 57 to 87.

[0036] In some embodiments, the nucleic acid sequences encode two or more amino acid sequences selected from the group consisting of SEQ ID NOs: 57 to 87.

[0037] In another aspect, the invention provides for a composition comprising nucleic acid sequences encoding one or more amino acid sequences selected from the group consisting of SEQ ID NOs: 57 to 87.

[0038] In some embodiments, the composition comprises nucleic acid sequences encoding two or more amino acid sequences selected from the group consisting of SEQ ID NOs: 57 to 87. In some embodiments, the nucleic acid sequences are administered in a construct for expression in vivo. In some embodiments, the in vivo administration of the nucleic acid sequences are configured to produce one or more peptides that is displayed by an HLA class II molecule. In some embodiments, the nucleic acid sequences are configured to allow expression of at least two peptides encoded by the nucleic acid sequences that are each displayed by a peptide specific set of HLA class II alleles, wherein all of the peptide specific sets of HLA class II alleles are not identical. In some embodiments, each of the one or more peptides is a modified or unmodified fragment of an HIV protein. In some embodiments, the composition is administered in an effective amount to a subject to prevent HIV. In some embodiments, the composition is administered in an effective amount to a subject to treat HIV. In some embodiments, the composition comprises nucleic acid sequences encoding at least three amino acid sequences selected from the group consisting of SEQ ID NOs: 57 to 87.

[0039] In some embodiments, the composition comprises nucleic acid sequences encoding at least three amino acid sequences selected from the group consisting of SEQ ID NOs: 57 to 87.

[0040] In another aspect, the invention provides for a method of treating or preventing HIV by administering to a subject a composition comprising nucleic acid sequences encoding one or more amino acid sequences selected from the group consisting of SEQ ID NOs: 57 to 87.

[0041] In some embodiments, the composition comprises nucleic acid sequences encoding two or more amino acid sequences selected from the group consisting of SEQ ID NOs: 57 to 87.

[0042] In another aspect, the invention provides for a peptide composition comprising one or more peptides selected from the group consisting of SEQ ID NOs: 57 to 87.

[0043] In some embodiments, the peptide composition comprises two or more peptides selected from the group consisting of SEQ ID NOs: 57 to 87. In some embodiments a peptide in the peptide composition is displayed by an HLA class II molecule. In some embodiments, the at least two peptides are each capable of being displayed by a peptide specific set of HLA class II alleles, wherein all of the peptide specific sets of HLA class II alleles are not identical. In some embodiments, a peptide in the peptide composition is a modified or unmodified fragment of an HIV protein. In some embodiments, the peptide composition is administered in an effective amount to a subject to prevent HIV. In some embodiments, the peptide composition is administered in an effective amount to a subject to treat HIV.

[0044] In some embodiments, the peptide composition comprises three or more peptides selected from the group consisting of SEQ ID NOs: 57 to 87.

[0045] In another aspect, the invention provides for a method of treating or preventing HIV in a subject comprising administering to the subject a peptide composition comprising one or more peptides selected from the group consisting of SEQ ID NOs: 57 to 87.

[0046] In some embodiments, the peptide composition comprises two or more peptides selected from the group consisting of SEQ ID NOs: 57 to 87.

[0047] In some embodiments, the compositions, including peptide compositions, of the invention are immunogenic compositions. To this end, the invention provides for a method of inducing an immunogenic response in a subject comprising administering to the subject a composition of the invention.

[0048] In some embodiments, compositions, including peptide compositions, of the invention are vaccines.

[0049] In one aspect, a composition (e.g., a vaccine) comprises nucleic acid sequences encoding for one or more amino acid sequences selected from the group consisting of SEQ ID NOs: 1 to 56 and SEQ ID NOs: 88 to 2835, wherein the one or more amino acid sequences encodes for one of more peptides, wherein the one or more peptides is configured to bind in vivo to one or more HLA alleles present in a subject, and wherein the one or more HLA alleles present in the subject is selected from the group consisting of A0101, A0102, A0103, A0109, A0123, A0201, A0202, A0203, A0204, A0205, A0206, A0207, A0211, A0214, A02264, A0230, A0301, A0302, A0305, A1101, A1102, A2301, A2402, A2403, A2407, A2410, A2464, A2501, A2601, A2603, A2608, A2612, A2630, A2901, A2902, A2911, A3001, A3002, A3004, A3009, A3010, A3101, A3104, A3201, A3301, A3303, A3305, A3401, A3402, A3601, A4301, A6601, A6602, A6603, A6801, A6802, A6827, A6901, A74, A7401, A7402, A7403, A7404, A7405, A7406, A7407, A7408, A7409, A7410, A7411, A7413, A8001, B0702, B0705, B0801, B1301, B1302, B1303, B1401, B1402, B1403, B1501, B1502, B1503, B1508, B1510, B1511, B1512, B1516, B1517, B1518, B1521, B15220, B1524, B1525, B1527, B1531, B1532, B1537, B1801, B1802, B1803, B2702, B2703, B2704, B2705, B2706, B2707, B3501, B3502, B3503, B3505, B3508, B3512, B3532, B3541, B3543, B3701, B3801, B3802, B3901, B3905, B3906, B3909, B3910, B3924, B4001, B4002, B4006, B4008, B40114, B4012, B4016, B4101, B4102, B4201, B4202, B4402, B4403, B4404, B4405, B4407, B4410, B4415, B4427, B4501, B4507, B4601, B4701, B4703, B4801, B4803, B4901, B5001, B5101, B5102, B5105, B5107, B5108, B5109, B5201, B5301, B5401, B5501, B5502, B5601, B5604, B5610, B5701, B5702, B5703, B5704, B5801, B5802, B6701, B7301, B7801, B8101, B8103, B8201, B8202, C0102, C0103, C0144, C0202, C0210, C0214, C0217, C0229, C0302, C0303, C0304, C0305, C0317, C0401, C0403, C0404, C0407, C0501, C0509, C0602, C0701, C0702, C0704, C0705, C0706, C0718, C0801, C0802, C0803, C0804, C0812, C1202, C1203, C1402, C1403, C1502, C1504, C1505, C1509, C1601, C1602, C1604, C16112, C1646, C17, C1701, C1702, C1703, C1704, C1705, C1706, C1707, C18, C1801, C1802, and C1803.

[0050] In one aspect, a method is described comprising administering to a subject a composition (e.g., a vaccine) in an effective amount to induce an immune response in the subject, the composition comprising nucleic acid sequences encoding for one or more amino acid sequences selected from the group consisting of SEQ ID NOs: 1 to 56 and SEQ ID NOs: 88 to 2835.

[0051] In some embodiments, the method comprises administering the composition to the subject based on a determination that the subject expresses one or more HLA alleles. In some embodiments, the one or more HLA alleles is selected from the group consisting of A0101, A0102, A0103, A0109, A0123, A0201, A0202, A0203, A0204, A0205, A0206, A0207, A0211, A0214, A02264, A0230, A0301, A0302, A0305, A1101, A1102, A2301, A2402, A2403, A2407, A2410, A2464, A2501, A2601, A2603, A2608, A2612, A2630, A2901, A2902, A2911, A3001, A3002, A3004, A3009, A3010, A3101, A3104, A3201, A3301, A3303, A3305, A3401, A3402, A3601, A4301, A6601, A6602, A6603, A6801, A6802, A6827, A6901, A74, A7401, A7402, A7403, A7404, A7405, A7406, A7407, A7408, A7409, A7410, A7411, A7413, A8001, B0702, B0705, B0801, B1301, B1302, B1303, B1401, B1402, B1403, B1501, B1502, B1503, B1508, B1510, B1511, B1512, B1516, B1517, B1518, B1521, B15220, B1524, B1525, B1527, B1531, B1532, B1537, B1801, B1802, B1803, B2702, B2703, B2704, B2705, B2706, B2707, B3501, B3502, B3503, B3505, B3508, B3512, B3532, B3541, B3543, B3701, B3801, B3802, B3901, B3905, B3906, B3909, B3910, B3924, B4001, B4002, B4006, B4008, B40114, B4012, B4016, B4101, B4102, B4201, B4202, B4402, B4403, B4404, B4405, B4407, B4410, B4415, B4427, B4501, B4507, B4601, B4701, B4703, B4801, B4803, B4901, B5001, B5101, B5102, B5105, B5107, B5108, B5109, B5201, B5301, B5401, B5501, B5502, B5601, B5604, B5610, B5701, B5702, B5703, B5704, B5801, B5802, B6701, B7301, B7801, B8101, B8103, B8201, B8202, C0102, C0103, C0144, C0202, C0210, C0214, C0217, C0229, C0302, C0303, C0304, C0305, C0317, C0401, C0403, C0404, C0407, C0501, C0509, C0602, C0701, C0702, C0704, C0705, C0706, C0718, C0801, C0802, C0803, C0804, C0812, C1202, C1203, C1402, C1403, C1502, C1504, C1505, C1509, C1601, C1602, C1604, C16112, C1646, C17, C1701, C1702, C1703, C1704, C1705, C1706, C1707, C18, C1801, C1802, and C1803.

[0052] In one aspect, a method is described for formulating a composition (e.g., a vaccine), the method comprising determining that a subject in need thereof of the composition expresses one or more HLA alleles, and formulating the composition by selecting nucleic acid sequences encoding for one or more amino acid sequences selected from the group consisting of SEQ ID NOs: 1 to 56 and SEQ ID NOs: 88 to 2835.

[0053] In some embodiments, the one or more HLA alleles is selected from the group consisting of A0101, A0102, A0103, A0109, A0123, A0201, A0202, A0203, A0204, A0205, A0206, A0207, A0211, A0214, A02264, A0230, A0301, A0302, A0305, A1101, A1102, A2301, A2402, A2403, A2407, A2410, A2464, A2501, A2601, A2603, A2608, A2612, A2630, A2901, A2902, A2911, A3001, A3002, A3004, A3009, A3010, A3101, A3104, A3201, A3301, A3303, A3305, A3401, A3402, A3601, A4301, A6601, A6602, A6603, A6801, A6802, A6827, A6901, A74, A7401, A7402, A7403, A7404, A7405, A7406, A7407, A7408, A7409, A7410, A7411, A7413, A8001, B0702, B0705, B0801, B1301, B1302, B1303, B1401, B1402, B1403, B1501, B1502, B1503, B1508, B1510, B1511, B1512, B1516, B1517, B1518, B1521, B15220, B1524, B1525, B1527, B1531, B1532, B1537, B1801, B1802, B1803, B2702, B2703, B2704, B2705, B2706, B2707, B3501, B3502, B3503, B3505, B3508, B3512, B3532, B3541, B3543, B3701, B3801, B3802, B3901, B3905, B3906, B3909, B3910, B3924, B4001, B4002, B4006, B4008, B40114, B4012, B4016, B4101, B4102, B4201, B4202, B4402, B4403, B4404, B4405, B4407, B4410, B4415, B4427, B4501, B4507, B4601, B4701, B4703, B4801, B4803, B4901, B5001, B5101, B5102, B5105, B5107, B5108, B5109, B5201, B5301, B5401, B5501, B5502, B5601, B5604, B5610, B5701, B5702, B5703, B5704, B5801, B5802, B6701, B7301, B7801, B8101, B8103, B8201, B8202, C0102, C0103, C0144, C0202, C0210, C0214, C0217, C0229, C0302, C0303, C0304, C0305, C0317, C0401, C0403, C0404, C0407, C0501, C0509, C0602, C0701, C0702, C0704, C0705, C0706, C0718, C0801, C0802, C0803, C0804, C0812, C1202, C1203, C1402, C1403, C1502, C1504, C1505, C1509, C1601, C1602, C1604, C16112, C1646, C17, C1701, C1702, C1703, C1704, C1705, C1706, C1707, C18, C1801, C1802, and C1803.

[0054] In another aspect, an MHC class II peptide vaccine comprises nucleic acid sequences encoding for one or more amino acid sequences selected from the group consisting of SEQ ID NOs: 57 to 87 and SEQ ID NOs: 2836 to 7601, wherein the one or more amino acid sequences encodes for one of more peptides, wherein the one or more peptides is configured to bind in vivo to one or more HLA alleles present in a subject, and wherein the one or more HLA alleles present in the subject is selected from the group consisting of DPA10103-DPB10101, DPA10103-DPB10201, DPA10103-DPB10202, DPA10103-DPB10301, DPA10103-DPB10401, DPA10103-DPB10402, DPA10103-DPB10501, DPA10103-DPB10601, DPA10103-DPB10901, DPA10103-DPB11001, DPA10103-DPB110501, DPA10103-DPB11101, DPA10103-DPB112401, DPA10103-DPB112601, DPA10103-DPB11301, DPA10103-DPB113101, DPA10103-DPB113301, DPA10103-DPB11401, DPA10103-DPB11501, DPA10103-DPB11601, DPA10103-DPB11701, DPA10103-DPB11801, DPA10103-DPB11901, DPA10103-DPB12001, DPA10103-DPB12101, DPA10103-DPB12301, DPA10103-DPB12901, DPA10103-DPB13001, DPA10103-DPB13101, DPA10103-DPB13401, DPA10103-DPB13901, DPA10103-DPB14001, DPA10103-DPB14101, DPA10103-DPB14801, DPA10103-DPB14901, DPA10103-DPB15001, DPA10103-DPB15101, DPA10103-DPB15501, DPA10103-DPB15901, DPA10103-DPB18001, DPA10104-DPB10101, DPA10104-DPB10301, DPA10104-DPB11001, DPA10104-DPB11301, DPA10104-DPB11501, DPA10105-DPB10101, DPA10105-DPB10301, DPA10105-DPB10401, DPA10105-DPB11801, DPA10105-DPB15001, DPA10106-DPB10101, DPA10106-DPB11101, DPA10201-DPB10101, DPA10201-DPB10201, DPA10201-DPB10202, DPA10201-DPB10301, DPA10201-DPB10401, DPA10201-DPB10501, DPA10201-DPB10601, DPA10201-DPB10901, DPA10201-DPB11001, DPA10201-DPB110601, DPA10201-DPB11101, DPA10201-DPB11301, DPA10201-DPB113101, DPA10201-DPB113301, DPA10201-DPB11401, DPA10201-DPB11501, DPA10201-DPB11601, DPA10201-DPB11701, DPA10201-DPB11801, DPA10201-DPB11901, DPA10201-DPB12601, DPA10201-DPB13001, DPA10201-DPB13401, DPA10201-DPB14501, DPA10201-DPB15501, DPA10201-DPB19101, DPA10202-DPB10101, DPA10202-DPB10201, DPA10202-DPB10202, DPA10202-DPB10301, DPA10202-DPB10401, DPA10202-DPB10402, DPA10202-DPB10501, DPA10202-DPB10901, DPA10202-DPB110001, DPA10202-DPB110501, DPA10202-DPB110601, DPA10202-DPB11101, DPA10202-DPB11301, DPA10202-DPB113101, DPA10202-DPB11401, DPA10202-DPB11701, DPA10202-DPB11801, DPA10202-DPB11901, DPA10202-DPB12101, DPA10202-DPB12901, DPA10202-DPB13001, DPA10202-DPB13101, DPA10202-DPB13801, DPA10202-DPB14501, DPA10202-DPB15501, DPA10202-DPB16501, DPA10202-DPB18501, DPA10301-DPB10101, DPA10301-DPB10201, DPA10301-DPB10202, DPA10301-DPB10301, DPA10301-DPB10401, DPA10301-DPB10402, DPA10301-DPB10901, DPA10301-DPB110501, DPA10301-DPB110601, DPA10301-DPB11101, DPA10301-DPB11301, DPA10301-DPB11701, DPA10301-DPB11801, DPA10301-DPB12301, DPA10301-DPB13901, DPA10301-DPB14001, DPA10301-DPB14901, DPA10301-DPB15501, DPA10301-DPB16501, DPA10301-DPB17501, DPA10301-DPB18001, DPA10401-DPB10101, DPA10401-DPB10201, DPA10401-DPB10202, DPA10401-DPB10301, DPA10401-DPB10402, DPA10401-DPB10501, DPA10401-DPB110501, DPA10401-DPB11301, DPA10401-DPB113301, DPA10401-DPB11401, DPA10401-DPB14901, DQA10101-DQB10501, DQA10101-DQB 10503, DQA10101-DQB10601, DQA10101-DQB10602, DQA10102-DQB10501, DQA10102-DQB10502, DQA10102-DQB10503, DQA10102-DQB10601, DQA10102-DQB10602, DQA10102-DQB10603, DQA10102-DQB10604, DQA10102-DQB10609, DQA10102-DQB10610, DQA10102-DQB10611, DQA10102-DQB10614, DQA10103-DQB10501, DQA10103-DQB10502, DQA10103-DQB10503, DQA10103-DQB10601, DQA10103-DQB10602, DQA10103-DQB10603, DQA10103-DQB10604, DQA10103-DQB10608, DQA10103-DQB10609, DQA10103-DQB10614, DQA10104-DQB10501, DQA10104-DQB10503, DQA10104-DQB10602, DQA10105-DQB10501, DQA10105-DQB10602, DQA10107-DQB10503, DQA10201-DQB10201, DQA10201-DQB10202, DQA10201-DQB10301, DQA10201-DQB10302, DQA10201-DQB10303, DQA10301-DQB10301, DQA10301-DQB10302, DQA10301-DQB10303, DQA10301-DQB10304, DQA10301-DQB10305, DQA10302-DQB10202, DQA10302-DQB10301, DQA10302-DQB10302, DQA10302-DQB10303, DQA10302-DQB10304, DQA10303-DQB10202, DQA10303-DQB10301, DQA10303-DQB10302, DQA10303-DQB10303, DQA10303-DQB10304, DQA10401-DQB10201, DQA10401-DQB10301, DQA10401-DQB10319, DQA10401-DQB10402, DQA10402-DQB10402, DQA10501-DQB10201, DQA10501-DQB10203, DQA10501-DQB10301, DQA10501-DQB10319, DQA10501-DQB10501, DQA10503-DQB10301, DQA10505-DQB10201, DQA10505-DQB10202, DQA10505-DQB10301, DQA10505-DQB10302, DQA10505-DQB10309, DQA10505-DQB10319, DQA10505-DQB10402, DQA10505-DQB10501, DQA10506-DQB10303, DQA10508-DQB10301, DQA10509-DQB10301, DQA10601-DQB10301, DRB1_0101, DRB1_0102, DRB1_0103, DRB1_0301, DRB1_0401, DRB1_0402, DRB1_0403, DRB1_0404, DRB1_0405, DRB1_0406, DRB1_0407, DRB1_0408, DRB1_0410, DRB1_0411, DRB1_0701, DRB1_0801, DRB1_0802, DRB1_0803, DRB1_0804, DRB1_0806, DRB1_0809, DRB1_0813, DRB1_0901, DRB1_1001, DRB1_1101, DRB1_1102, DRB1_1103, DRB1_1104, DRB1_1114, DRB1_1201, DRB1_1202, DRB1_1301, DRB1_1302, DRB1_1303, DRB1_1304, DRB1_1305, DRB1_1312, DRB1_1401, DRB1_1402, DRB1_1403, DRB1_1404, DRB1_1405, DRB1_1406, DRB1_1407, DRB1_1418, DRB1_1454, DRB1_1501, DRB1_1502, DRB1_1503, DRB1_1601, and DRB1_1602.

[0055] In one aspect, a method is described comprising administering to a subject a composition (e.g., a vaccine) in an effective amount to induce an immune response in the subject, the composition comprising nucleic acid sequences encoding for one or more amino acid sequences selected from the group consisting of SEQ ID NOs: 57 to 87 and SEQ ID NOs: 2836 to 7601.

[0056] In some embodiments, the method comprises administering the composition to the subject based on a determination that the subject expresses one or more HLA alleles. In some embodiments, the one or more HLA alleles is selected from the group consisting of DPA10103-DPB10101, DPA10103-DPB10201, DPA10103-DPB10202, DPA10103-DPB10301, DPA10103-DPB10401, DPA10103-DPB10402, DPA10103-DPB10501, DPA10103-DPB10601, DPA10103-DPB10901, DPA10103-DPB11001, DPA10103-DPB110501, DPA10103-DPB11101, DPA10103-DPB112401, DPA10103-DPB112601, DPA10103-DPB11301, DPA10103-DPB113101, DPA10103-DPB113301, DPA10103-DPB11401, DPA10103-DPB11501, DPA10103-DPB11601, DPA10103-DPB11701, DPA10103-DPB11801, DPA10103-DPB11901, DPA10103-DPB12001, DPA10103-DPB12101, DPA10103-DPB12301, DPA10103-DPB12901, DPA10103-DPB13001, DPA10103-DPB13101, DPA10103-DPB13401, DPA10103-DPB13901, DPA10103-DPB14001, DPA10103-DPB14101, DPA10103-DPB14801, DPA10103-DPB14901, DPA10103-DPB15001, DPA10103-DPB15101, DPA10103-DPB15501, DPA10103-DPB15901, DPA10103-DPB18001, DPA10104-DPB10101, DPA10104-DPB10301, DPA10104-DPB11001, DPA10104-DPB11301, DPA10104-DPB11501, DPA10105-DPB10101, DPA10105-DPB10301, DPA10105-DPB10401, DPA10105-DPB11801, DPA10105-DPB15001, DPA10106-DPB10101, DPA10106-DPB11101, DPA10201-DPB10101, DPA10201-DPB10201, DPA10201-DPB10202, DPA10201-DPB10301, DPA10201-DPB10401, DPA10201-DPB10501, DPA10201-DPB10601, DPA10201-DPB10901, DPA10201-DPB11001, DPA10201-DPB110601, DPA10201-DPB11101, DPA10201-DPB11301, DPA10201-DPB113101, DPA10201-DPB113301, DPA10201-DPB11401, DPA10201-DPB11501, DPA10201-DPB11601, DPA10201-DPB11701, DPA10201-DPB11801, DPA10201-DPB11901, DPA10201-DPB12601, DPA10201-DPB13001, DPA10201-DPB13401, DPA10201-DPB14501, DPA10201-DPB15501, DPA10201-DPB19101, DPA10202-DPB10101, DPA10202-DPB10201, DPA10202-DPB10202, DPA10202-DPB10301, DPA10202-DPB10401, DPA10202-DPB10402, DPA10202-DPB10501, DPA10202-DPB10901, DPA10202-DPB110001, DPA10202-DPB110501, DPA10202-DPB110601, DPA10202-DPB11101, DPA10202-DPB11301, DPA10202-DPB113101, DPA10202-DPB11401, DPA10202-DPB11701, DPA10202-DPB11801, DPA10202-DPB11901, DPA10202-DPB12101, DPA10202-DPB12901, DPA10202-DPB13001, DPA10202-DPB13101, DPA10202-DPB13801, DPA10202-DPB14501, DPA10202-DPB15501, DPA10202-DPB16501, DPA10202-DPB18501, DPA10301-DPB10101, DPA10301-DPB10201, DPA10301-DPB10202, DPA10301-DPB10301, DPA10301-DPB10401, DPA10301-DPB10402, DPA10301-DPB10901, DPA10301-DPB110501, DPA10301-DPB110601, DPA10301-DPB11101, DPA10301-DPB11301, DPA10301-DPB11701, DPA10301-DPB11801, DPA10301-DPB12301, DPA10301-DPB13901, DPA10301-DPB14001, DPA10301-DPB14901, DPA10301-DPB15501, DPA10301-DPB16501, DPA10301-DPB17501, DPA10301-DPB18001, DPA10401-DPB10101, DPA10401-DPB10201, DPA10401-DPB10202, DPA10401-DPB10301, DPA10401-DPB10402, DPA10401-DPB10501, DPA10401-DPB110501, DPA10401-DPB11301, DPA10401-DPB113301, DPA10401-DPB11401, DPA10401-DPB14901, DQA10101-DQB10501, DQA10101-DQB10503, DQA10101-DQB10601, DQA10101-DQB10602, DQA10102-DQB10501, DQA10102-DQB10502, DQA10102-DQB10503, DQA10102-DQB10601, DQA10102-DQB10602, DQA10102-DQB10603, DQA10102-DQB10604, DQA10102-DQB10609, DQA10102-DQB10610, DQA10102-DQB10611, DQA10102-DQB10614, DQA10103-DQB10501, DQA10103-DQB10502, DQA10103-DQB10503, DQA10103-DQB10601, DQA10103-DQB10602, DQA10103-DQB10603, DQA10103-DQB10604, DQA10103-DQB10608, DQA10103-DQB10609, DQA10103-DQB10614, DQA10104-DQB10501, DQA10104-DQB10503, DQA10104-DQB10602, DQA10105-DQB10501, DQA10105-DQB10602, DQA10107-DQB10503, DQA10201-DQB10201, DQA10201-DQB10202, DQA10201-DQB10301, DQA10201-DQB10302, DQA10201-DQB10303, DQA10301-DQB10301, DQA10301-DQB10302, DQA10301-DQB10303, DQA10301-DQB10304, DQA10301-DQB10305, DQA10302-DQB10202, DQA10302-DQB10301, DQA10302-DQB10302, DQA10302-DQB10303, DQA10302-DQB10304, DQA10303-DQB10202, DQA10303-DQB10301, DQA10303-DQB10302, DQA10303-DQB10303, DQA10303-DQB10304, DQA10401-DQB10201, DQA10401-DQB10301, DQA10401-DQB10319, DQA10401-DQB10402, DQA10402-DQB10402, DQA10501-DQB10201, DQA10501-DQB10203, DQA10501-DQB10301, DQA10501-DQB10319, DQA10501-DQB10501, DQA10503-DQB10301, DQA10505-DQB10201, DQA10505-DQB10202, DQA10505-DQB10301, DQA10505-DQB10302, DQA10505-DQB10309, DQA10505-DQB10319, DQA10505-DQB10402, DQA10505-DQB10501, DQA10506-DQB10303, DQA10508-DQB10301, DQA10509-DQB10301, DQA10601-DQB10301, DRB1_0101, DRB1_0102, DRB1_0103, DRB1_0301, DRB1_0401, DRB1_0402, DRB1_0403, DRB1_0404, DRB1_0405, DRB1_0406, DRB1_0407, DRB1_0408, DRB1_0410, DRB1_0411, DRB1_0701, DRB1_0801, DRB1_0802, DRB1_0803, DRB1_0804, DRB1_0806, DRB1_0809, DRB1_0813, DRB1_0901, DRB1_1001, DRB1_1101, DRB1_1102, DRB1_1103, DRB1_1104, DRB1_1114, DRB1_1201, DRB1_1202, DRB1_1301, DRB1_1302, DRB1_1303, DRB1_1304, DRB1_1305, DRB1_1312, DRB1_1401, DRB1_1402, DRB1_1403, DRB1_1404, DRB1_1405, DRB1_1406, DRB1_1407, DRB1_1418, DRB1_1454, DRB1_1501, DRB1_1502, DRB1_1503, DRB1_1601, and DRB1_1602.

[0057] In one aspect, a method is described for formulating a composition (e.g., a vaccine), the method comprising determining that a subject in need thereof of the composition expresses one or more HLA alleles, and formulating the composition by selecting nucleic acid sequences encoding for one or more amino acid sequences selected from the group consisting of SEQ ID NOs: 57 to 87 and SEQ ID NOs: 2836 to 7601.

[0058] In some embodiments, the one or more HLA alleles is selected from the group consisting of DPA10103-DPB10101, DPA10103-DPB10201, DPA10103-DPB10202, DPA10103-DPB10301, DPA10103-DPB10401, DPA10103-DPB10402, DPA10103-DPB10501, DPA10103-DPB10601, DPA10103-DPB10901, DPA10103-DPB11001, DPA10103-DPB110501, DPA10103-DPB11101, DPA10103-DPB112401, DPA10103-DPB112601, DPA10103-DPB11301, DPA10103-DPB113101, DPA10103-DPB113301, DPA10103-DPB11401, DPA10103-DPB11501, DPA10103-DPB11601, DPA10103-DPB11701, DPA10103-DPB11801, DPA10103-DPB11901, DPA10103-DPB12001, DPA10103-DPB12101, DPA10103-DPB12301, DPA10103-DPB12901, DPA10103-DPB13001, DPA10103-DPB13101, DPA10103-DPB13401, DPA10103-DPB13901, DPA10103-DPB14001, DPA10103-DPB14101, DPA10103-DPB14801, DPA10103-DPB14901, DPA10103-DPB15001, DPA10103-DPB15101, DPA10103-DPB15501, DPA10103-DPB15901, DPA10103-DPB18001, DPA10104-DPB10101, DPA10104-DPB10301, DPA10104-DPB11001, DPA10104-DPB11301, DPA10104-DPB11501, DPA10105-DPB10101, DPA10105-DPB10301, DPA10105-DPB10401, DPA10105-DPB11801, DPA10105-DPB15001, DPA10106-DPB10101, DPA10106-DPB11101, DPA10201-DPB10101, DPA10201-DPB10201, DPA10201-DPB10202, DPA10201-DPB10301, DPA10201-DPB10401, DPA10201-DPB10501, DPA10201-DPB10601, DPA10201-DPB10901, DPA10201-DPB11001, DPA10201-DPB110601, DPA10201-DPB11101, DPA10201-DPB11301, DPA10201-DPB113101, DPA10201-DPB113301, DPA10201-DPB11401, DPA10201-DPB11501, DPA10201-DPB11601, DPA10201-DPB11701, DPA10201-DPB11801, DPA10201-DPB11901, DPA10201-DPB12601, DPA10201-DPB13001, DPA10201-DPB13401, DPA10201-DPB14501, DPA10201-DPB15501, DPA10201-DPB19101, DPA10202-DPB10101, DPA10202-DPB10201, DPA10202-DPB10202, DPA10202-DPB10301, DPA10202-DPB10401, DPA10202-DPB10402, DPA10202-DPB10501, DPA10202-DPB10901, DPA10202-DPB110001, DPA10202-DPB110501, DPA10202-DPB110601, DPA10202-DPB11101, DPA10202-DPB11301, DPA10202-DPB113101, DPA10202-DPB11401, DPA10202-DPB11701, DPA10202-DPB11801, DPA10202-DPB11901, DPA10202-DPB12101, DPA10202-DPB12901, DPA10202-DPB13001, DPA10202-DPB13101, DPA10202-DPB13801, DPA10202-DPB14501, DPA10202-DPB15501, DPA10202-DPB16501, DPA10202-DPB18501, DPA10301-DPB10101, DPA10301-DPB10201, DPA10301-DPB10202, DPA10301-DPB10301, DPA10301-DPB10401, DPA10301-DPB10402, DPA10301-DPB10901, DPA10301-DPB110501, DPA10301-DPB110601, DPA10301-DPB11101, DPA10301-DPB11301, DPA10301-DPB11701, DPA10301-DPB11801, DPA10301-DPB12301, DPA10301-DPB13901, DPA10301-DPB14001, DPA10301-DPB14901, DPA10301-DPB15501, DPA10301-DPB16501, DPA10301-DPB17501, DPA10301-DPB18001, DPA10401-DPB10101, DPA10401-DPB10201, DPA10401-DPB10202, DPA10401-DPB10301, DPA10401-DPB10402, DPA10401-DPB10501, DPA10401-DPB110501, DPA10401-DPB11301, DPA10401-DPB113301, DPA10401-DPB11401, DPA10401-DPB14901, DQA10101-DQB10501, DQA10101-DQB10503, DQA10101-DQB10601, DQA10101-DQB10602, DQA10102-DQB10501, DQA10102-DQB10502, DQA10102-DQB10503, DQA10102-DQB10601, DQA10102-DQB10602, DQA10102-DQB10603, DQA10102-DQB10604, DQA10102-DQB10609, DQA10102-DQB10610, DQA10102-DQB10611, DQA10102-DQB10614, DQA10103-DQB10501, DQA10103-DQB10502, DQA10103-DQB10503, DQA10103-DQB10601, DQA10103-DQB10602, DQA10103-DQB10603, DQA10103-DQB10604, DQA10103-DQB10608, DQA10103-DQB10609, DQA10103-DQB10614, DQA10104-DQB10501, DQA10104-DQB10503, DQA10104-DQB10602, DQA10105-DQB10501, DQA10105-DQB10602, DQA10107-DQB10503, DQA10201-DQB10201, DQA10201-DQB10202, DQA10201-DQB10301, DQA10201-DQB10302, DQA10201-DQB10303, DQA10301-DQB10301, DQA10301-DQB10302, DQA10301-DQB10303, DQA10301-DQB10304, DQA10301-DQB10305, DQA10302-DQB10202, DQA10302-DQB10301, DQA10302-DQB10302, DQA10302-DQB10303, DQA10302-DQB10304, DQA10303-DQB10202, DQA10303-DQB10301, DQA10303-DQB10302, DQA10303-DQB10303, DQA10303-DQB10304, DQA10401-DQB10201, DQA10401-DQB10301, DQA10401-DQB10319, DQA10401-DQB10402, DQA10402-DQB10402, DQA10501-DQB10201, DQA10501-DQB10203, DQA10501-DQB10301, DQA10501-DQB10319, DQA10501-DQB10501, DQA10503-DQB10301, DQA10505-DQB10201, DQA10505-DQB10202, DQA10505-DQB10301, DQA10505-DQB10302, DQA10505-DQB10309, DQA10505-DQB10319, DQA10505-DQB10402, DQA10505-DQB10501, DQA10506-DQB10303, DQA10508-DQB10301, DQA10509-DQB10301, DQA10601-DQB10301, DRB1_0101, DRB1_0102, DRB1_0103, DRB1_0301, DRB1_0401, DRB1_0402, DRB1_0403, DRB1_0404, DRB1_0405, DRB1_0406, DRB1_0407, DRB1_0408, DRB1_0410, DRB1_0411, DRB1_0701, DRB1_0801, DRB1_0802, DRB1_0803, DRB1_0804, DRB1_0806, DRB1_0809, DRB1_0813, DRB1_0901, DRB1_1001, DRB1_1101, DRB1_1102, DRB1_1103, DRB1_1104, DRB1_1114, DRB1_1201, DRB1_1202, DRB1_1301, DRB1_1302, DRB1_1303, DRB1_1304, DRB1_1305, DRB1_1312, DRB1_1401, DRB1_1402, DRB1_1403, DRB1_1404, DRB1_1405, DRB1_1406, DRB1_1407, DRB1_1418, DRB1_1454, DRB1_1501, DRB1_1502, DRB1_1503, DRB1_1601, and DRB1_1602.

[0059] In another aspect, an MHC class I and/or MHC class II peptide vaccine comprises nucleic acid sequences encoding for one or more amino acid sequences selected from the group consisting of SEQ ID NOs: 1 to 7601, wherein the one or more amino acid sequences encodes for one of more peptides, wherein the one or more peptides is configured to bind in vivo to one or more HLA alleles present in a subject, and wherein the one or more HLA alleles present in the subject is selected from the group consisting of A0101, A0102, A0103, A0109, A0123, A0201, A0202, A0203, A0204, A0205, A0206, A0207, A0211, A0214, A02264, A0230, A0301, A0302, A0305, A1101, A1102, A2301, A2402, A2403, A2407, A2410, A2464, A2501, A2601, A2603, A2608, A2612, A2630, A2901, A2902, A2911, A3001, A3002, A3004, A3009, A3010, A3101, A3104, A3201, A3301, A3303, A3305, A3401, A3402, A3601, A4301, A6601, A6602, A6603, A6801, A6802, A6827, A6901, A74, A7401, A7402, A7403, A7404, A7405, A7406, A7407, A7408, A7409, A7410, A7411, A7413, A8001, B0702, B0705, B0801, B1301, B1302, B1303, B1401, B1402, B1403, B1501, B1502, B1503, B1508, B1510, B1511, B1512, B1516, B1517, B1518, B1521, B15220, B1524, B1525, B1527, B1531, B1532, B1537, B1801, B1802, B1803, B2702, B2703, B2704, B2705, B2706, B2707, B3501, B3502, B3503, B3505, B3508, B3512, B3532, B3541, B3543, B3701, B3801, B3802, B3901, B3905, B3906, B3909, B3910, B3924, B4001, B4002, B4006, B4008, B40114, B4012, B4016, B4101, B4102, B4201, B4202, B4402, B4403, B4404, B4405, B4407, B4410, B4415, B4427, B4501, B4507, B4601, B4701, B4703, B4801, B4803, B4901, B5001, B5101, B5102, B5105, B5107, B5108, B5109, B5201, B5301, B5401, B5501, B5502, B5601, B5604, B5610, B5701, B5702, B5703, B5704, B5801, B5802, B6701, B7301, B7801, B8101, B8103, B8201, B8202, C0102, C0103, C0144, C0202, C0210, C0214, C0217, C0229, C0302, C0303, C0304, C0305, C0317, C0401, C0403, C0404, C0407, C0501, C0509, C0602, C0701, C0702, C0704, C0705, C0706, C0718, C0801, C0802, C0803, C0804, C0812, C1202, C1203, C1402, C1403, C1502, C1504, C1505, C1509, C1601, C1602, C1604, C16112, C1646, C17, C1701, C1702, C1703, C1704, C1705, C1706, C1707, C18, C1801, C1802, C1803, DPA10103-DPB10101, DPA10103-DPB10201, DPA10103-DPB10202, DPA10103-DPB10301, DPA10103-DPB10401, DPA10103-DPB10402, DPA10103-DPB10501, DPA10103-DPB10601, DPA10103-DPB10901, DPA10103-DPB11001, DPA10103-DPB110501, DPA10103-DPB11101, DPA10103-DPB112401, DPA10103-DPB112601, DPA10103-DPB11301, DPA10103-DPB113101, DPA10103-DPB113301, DPA10103-DPB11401, DPA10103-DPB11501, DPA10103-DPB11601, DPA10103-DPB11701, DPA10103-DPB11801, DPA10103-DPB11901, DPA10103-DPB12001, DPA10103-DPB12101, DPA10103-DPB12301, DPA10103-DPB12901, DPA10103-DPB13001, DPA10103-DPB13101, DPA10103-DPB13401, DPA10103-DPB13901, DPA10103-DPB14001, DPA10103-DPB14101, DPA10103-DPB14801, DPA10103-DPB14901, DPA10103-DPB15001, DPA10103-DPB15101, DPA10103-DPB15501, DPA10103-DPB15901, DPA10103-DPB18001, DPA10104-DPB10101, DPA10104-DPB10301, DPA10104-DPB11001, DPA10104-DPB11301, DPA10104-DPB11501, DPA10105-DPB10101, DPA10105-DPB10301, DPA10105-DPB10401, DPA10105-DPB11801, DPA10105-DPB15001, DPA10106-DPB10101, DPA10106-DPB11101, DPA10201-DPB10101, DPA10201-DPB10201, DPA10201-DPB10202, DPA10201-DPB10301, DPA10201-DPB10401, DPA10201-DPB10501, DPA10201-DPB10601, DPA10201-DPB10901, DPA10201-DPB11001, DPA10201-DPB110601, DPA10201-DPB11101, DPA10201-DPB11301, DPA10201-DPB113101, DPA10201-DPB113301, DPA10201-DPB11401, DPA10201-DPB11501, DPA10201-DPB11601, DPA10201-DPB11701, DPA10201-DPB11801, DPA10201-DPB11901, DPA10201-DPB12601, DPA10201-DPB13001, DPA10201-DPB13401, DPA10201-DPB14501, DPA10201-DPB15501, DPA10201-DPB19101, DPA10202-DPB10101, DPA10202-DPB10201, DPA10202-DPB10202, DPA10202-DPB10301, DPA10202-DPB10401, DPA10202-DPB10402, DPA10202-DPB10501, DPA10202-DPB10901, DPA10202-DPB110001, DPA10202-DPB110501, DPA10202-DPB110601, DPA10202-DPB11101, DPA10202-DPB11301, DPA10202-DPB113101, DPA10202-DPB11401, DPA10202-DPB11701, DPA10202-DPB11801, DPA10202-DPB11901, DPA10202-DPB12101, DPA10202-DPB12901, DPA10202-DPB13001, DPA10202-DPB13101, DPA10202-DPB13801, DPA10202-DPB14501, DPA10202-DPB15501, DPA10202-DPB16501, DPA10202-DPB18501, DPA10301-DPB10101, DPA10301-DPB10201, DPA10301-DPB10202, DPA10301-DPB10301, DPA10301-DPB10401, DPA10301-DPB10402, DPA10301-DPB10901, DPA10301-DPB110501, DPA10301-DPB110601, DPA10301-DPB11101, DPA10301-DPB11301, DPA10301-DPB11701, DPA10301-DPB11801, DPA10301-DPB12301, DPA10301-DPB13901, DPA10301-DPB14001, DPA10301-DPB14901, DPA10301-DPB15501, DPA10301-DPB16501, DPA10301-DPB17501, DPA10301-DPB18001, DPA10401-DPB10101, DPA10401-DPB10201, DPA10401-DPB10202, DPA10401-DPB10301, DPA10401-DPB10402, DPA10401-DPB10501, DPA10401-DPB110501, DPA10401-DPB11301, DPA10401-DPB113301, DPA10401-DPB11401, DPA10401-DPB14901, DQA10101-DQB10501, DQA10101-DQB10503, DQA10101-DQB10601, DQA10101-DQB10602, DQA10102-DQB10501, DQA10102-DQB10502, DQA10102-DQB10503, DQA10102-DQB10601, DQA10102-DQB10602, DQA10102-DQB10603, DQA10102-DQB10604, DQA10102-DQB10609, DQA10102-DQB10610, DQA10102-DQB10611, DQA10102-DQB10614, DQA10103-DQB10501, DQA10103-DQB10502, DQA10103-DQB10503, DQA10103-DQB10601, DQA10103-DQB10602, DQA10103-DQB10603, DQA10103-DQB10604, DQA10103-DQB10608, DQA10103-DQB10609, DQA10103-DQB10614, DQA10104-DQB10501, DQA10104-DQB10503, DQA10104-DQB10602, DQA10105-DQB10501, DQA10105-DQB10602, DQA10107-DQB10503, DQA10201-DQB10201, DQA10201-DQB10202, DQA10201-DQB10301, DQA10201-DQB10302, DQA10201-DQB10303, DQA10301-DQB10301, DQA10301-DQB10302, DQA10301-DQB10303, DQA10301-DQB10304, DQA10301-DQB10305, DQA10302-DQB10202, DQA10302-DQB10301, DQA10302-DQB10302, DQA10302-DQB10303, DQA10302-DQB10304, DQA10303-DQB10202, DQA10303-DQB10301, DQA10303-DQB10302, DQA10303-DQB10303, DQA10303-DQB10304, DQA10401-DQB10201, DQA10401-DQB10301, DQA10401-DQB10319, DQA10401-DQB10402, DQA10402-DQB10402, DQA10501-DQB10201, DQA10501-DQB10203, DQA10501-DQB10301, DQA10501-DQB10319, DQA10501-DQB10501, DQA10503-DQB10301, DQA10505-DQB10201, DQA10505-DQB10202, DQA10505-DQB10301, DQA10505-DQB10302, DQA10505-DQB10309, DQA10505-DQB10319, DQA10505-DQB10402, DQA10505-DQB10501, DQA10506-DQB10303, DQA10508-DQB10301, DQA10509-DQB10301, DQA10601-DQB10301, DRB1_0101, DRB1_0102, DRB1_0103, DRB1_0301, DRB1_0401, DRB1_0402, DRB1_0403, DRB1_0404, DRB1_0405, DRB1_0406, DRB1_0407, DRB1_0408, DRB1_0410, DRB1_0411, DRB1_0701, DRB1_0801, DRB1_0802, DRB1_0803, DRB1_0804, DRB1_0806, DRB1_0809, DRB1_0813, DRB1_0901, DRB1_1001, DRB1_1101, DRB1_1102, DRB1_1103, DRB1_1104, DRB1_1114, DRB1_1201, DRB1_1202, DRB1_1301, DRB1_1302, DRB1_1303, DRB1_1304, DRB1_1305, DRB1_1312, DRB1_1401, DRB1_1402, DRB1_1403, DRB1_1404, DRB1_1405, DRB1_1406, DRB1_1407, DRB1_1418, DRB1_1454, DRB1_1501, DRB1_1502, DRB1_1503, DRB1_1601, and DRB1_1602.

[0060] In one aspect, a method is described comprising administering to a subject a composition (e.g., a vaccine) in an effective amount to induce an immune response in the subject, the composition comprising nucleic acid sequences encoding for one or more amino acid sequences selected from the group consisting of SEQ ID NOs: 1 to 7601.

[0061] In some embodiments, the method comprises administering the composition to the subject based on a determination that the subject expresses one or more HLA alleles. In some embodiments, the one or more HLA alleles is selected from the group consisting of A0101, A0102, A0103, A0109, A0123, A0201, A0202, A0203, A0204, A0205, A0206, A0207, A0211, A0214, A02264, A0230, A0301, A0302, A0305, A1101, A1102, A2301, A2402, A2403, A2407, A2410, A2464, A2501, A2601, A2603, A2608, A2612, A2630, A2901, A2902, A2911, A3001, A3002, A3004, A3009, A3010, A3101, A3104, A3201, A3301, A3303, A3305, A3401, A3402, A3601, A4301, A6601, A6602, A6603, A6801, A6802, A6827, A6901, A74, A7401, A7402, A7403, A7404, A7405, A7406, A7407, A7408, A7409, A7410, A7411, A7413, A8001, B0702, B0705, B0801, B1301, B1302, B1303, B1401, B1402, B1403, B1501, B1502, B1503, B1508, B1510, B1511, B1512, B1516, B1517, B1518, B1521, B15220, B1524, B1525, B1527, B1531, B1532, B1537, B1801, B1802, B1803, B2702, B2703, B2704, B2705, B2706, B2707, B3501, B3502, B3503, B3505, B3508, B3512, B3532, B3541, B3543, B3701, B3801, B3802, B3901, B3905, B3906, B3909, B3910, B3924, B4001, B4002, B4006, B4008, B40114, B4012, B4016, B4101, B4102, B4201, B4202, B4402, B4403, B4404, B4405, B4407, B4410, B4415, B4427, B4501, B4507, B4601, B4701, B4703, B4801, B4803, B4901, B5001, B5101, B5102, B5105, B5107, B5108, B5109, B5201, B5301, B5401, B5501, B5502, B5601, B5604, B5610, B5701, B5702, B5703, B5704, B5801, B5802, B6701, B7301, B7801, B8101, B8103, B8201, B8202, C0102, C0103, C0144, C0202, C0210, C0214, C0217, C0229, C0302, C0303, C0304, C0305, C0317, C0401, C0403, C0404, C0407, C0501, C0509, C0602, C0701, C0702, C0704, C0705, C0706, C0718, C0801, C0802, C0803, C0804, C0812, C1202, C1203, C1402, C1403, C1502, C1504, C1505, C1509, C1601, C1602, C1604, C16112, C1646, C17, C1701, C1702, C1703, C1704, C1705, C1706, C1707, C18, C1801, C1802, C1803, DPA10103-DPB10101, DPA10103-DPB10201, DPA10103-DPB10202, DPA10103-DPB10301, DPA10103-DPB10401, DPA10103-DPB10402, DPA10103-DPB10501, DPA10103-DPB10601, DPA10103-DPB10901, DPA10103-DPB11001, DPA10103-DPB110501, DPA10103-DPB11101, DPA10103-DPB112401, DPA10103-DPB112601, DPA10103-DPB11301, DPA10103-DPB113101, DPA10103-DPB113301, DPA10103-DPB11401, DPA10103-DPB11501, DPA10103-DPB11601, DPA10103-DPB11701, DPA10103-DPB11801, DPA10103-DPB11901, DPA10103-DPB12001, DPA10103-DPB12101, DPA10103-DPB12301, DPA10103-DPB12901, DPA10103-DPB13001, DPA10103-DPB13101, DPA10103-DPB13401, DPA10103-DPB13901, DPA10103-DPB14001, DPA10103-DPB14101, DPA10103-DPB14801, DPA10103-DPB14901, DPA10103-DPB15001, DPA10103-DPB15101, DPA10103-DPB15501, DPA10103-DPB15901, DPA10103-DPB18001, DPA10104-DPB10101, DPA10104-DPB10301, DPA10104-DPB11001, DPA10104-DPB11301, DPA10104-DPB11501, DPA10105-DPB10101, DPA10105-DPB10301, DPA10105-DPB10401, DPA10105-DPB11801, DPA10105-DPB15001, DPA10106-DPB10101, DPA10106-DPB11101, DPA10201-DPB10101, DPA10201-DPB10201, DPA10201-DPB10202, DPA10201-DPB10301, DPA10201-DPB10401, DPA10201-DPB10501, DPA10201-DPB10601, DPA10201-DPB10901, DPA10201-DPB11001, DPA10201-DPB110601, DPA10201-DPB11101, DPA10201-DPB11301, DPA10201-DPB113101, DPA10201-DPB113301, DPA10201-DPB11401, DPA10201-DPB11501, DPA10201-DPB11601, DPA10201-DPB11701, DPA10201-DPB11801, DPA10201-DPB11901, DPA10201-DPB12601, DPA10201-DPB13001, DPA10201-DPB13401, DPA10201-DPB14501, DPA10201-DPB15501, DPA10201-DPB19101, DPA10202-DPB10101, DPA10202-DPB10201, DPA10202-DPB10202, DPA10202-DPB10301, DPA10202-DPB10401, DPA10202-DPB10402, DPA10202-DPB10501, DPA10202-DPB10901, DPA10202-DPB110001, DPA10202-DPB110501, DPA10202-DPB110601, DPA10202-DPB11101, DPA10202-DPB11301, DPA10202-DPB113101, DPA10202-DPB11401, DPA10202-DPB11701, DPA10202-DPB11801, DPA10202-DPB11901, DPA10202-DPB12101, DPA10202-DPB12901, DPA10202-DPB13001, DPA10202-DPB13101, DPA10202-DPB13801, DPA10202-DPB14501, DPA10202-DPB15501, DPA10202-DPB16501, DPA10202-DPB18501, DPA10301-DPB10101, DPA10301-DPB10201, DPA10301-DPB10202, DPA10301-DPB10301, DPA10301-DPB10401, DPA10301-DPB10402, DPA10301-DPB10901, DPA10301-DPB110501, DPA10301-DPB110601, DPA10301-DPB11101, DPA10301-DPB11301, DPA10301-DPB11701, DPA10301-DPB11801, DPA10301-DPB12301, DPA10301-DPB13901, DPA10301-DPB14001, DPA10301-DPB14901, DPA10301-DPB15501, DPA10301-DPB16501, DPA10301-DPB17501, DPA10301-DPB18001, DPA10401-DPB10101, DPA10401-DPB10201, DPA10401-DPB10202, DPA10401-DPB10301, DPA10401-DPB10402, DPA10401-DPB10501, DPA10401-DPB110501, DPA10401-DPB11301, DPA10401-DPB113301, DPA10401-DPB11401, DPA10401-DPB14901, DQA10101-DQB10501, DQA10101-DQB10503, DQA10101-DQB10601, DQA10101-DQB10602, DQA10102-DQB10501, DQA10102-DQB10502, DQA10102-DQB10503, DQA10102-DQB10601, DQA10102-DQB10602, DQA10102-DQB10603, DQA10102-DQB10604, DQA10102-DQB10609, DQA10102-DQB10610, DQA10102-DQB10611, DQA10102-DQB10614, DQA10103-DQB10501, DQA10103-DQB10502, DQA10103-DQB10503, DQA10103-DQB10601, DQA10103-DQB10602, DQA10103-DQB10603, DQA10103-DQB10604, DQA10103-DQB10608, DQA10103-DQB10609, DQA10103-DQB10614, DQA10104-DQB10501, DQA10104-DQB10503, DQA10104-DQB10602, DQA10105-DQB10501, DQA10105-DQB10602, DQA10107-DQB10503, DQA10201-DQB10201, DQA10201-DQB10202, DQA10201-DQB10301, DQA10201-DQB10302, DQA10201-DQB10303, DQA10301-DQB10301, DQA10301-DQB10302, DQA10301-DQB10303, DQA10301-DQB10304, DQA10301-DQB10305, DQA10302-DQB10202, DQA10302-DQB10301, DQA10302-DQB10302, DQA10302-DQB10303, DQA10302-DQB10304, DQA10303-DQB10202, DQA10303-DQB10301, DQA10303-DQB10302, DQA10303-DQB10303, DQA10303-DQB10304, DQA10401-DQB10201, DQA10401-DQB10301, DQA10401-DQB10319, DQA10401-DQB10402, DQA10402-DQB10402, DQA10501-DQB10201, DQA10501-DQB10203, DQA10501-DQB10301, DQA10501-DQB10319, DQA10501-DQB10501, DQA10503-DQB10301, DQA10505-DQB10201, DQA10505-DQB10202, DQA10505-DQB10301, DQA10505-DQB10302, DQA10505-DQB10309, DQA10505-DQB10319, DQA10505-DQB10402, DQA10505-DQB10501, DQA10506-DQB10303, DQA10508-DQB10301, DQA10509-DQB10301, DQA10601-DQB10301, DRB1_0101, DRB1_0102, DRB1_0103, DRB1_0301, DRB1_0401, DRB1_0402, DRB1_0403, DRB1_0404, DRB1_0405, DRB1_0406, DRB1_0407, DRB1_0408, DRB1_0410, DRB1_0411, DRB1_0701, DRB1_0801, DRB1_0802, DRB1_0803, DRB1_0804, DRB1_0806, DRB1_0809, DRB1_0813, DRB1_0901, DRB1_1001, DRB1_1101, DRB1_1102, DRB1_1103, DRB1_1104, DRB1_1114, DRB1_1201, DRB1_1202, DRB1_1301, DRB1_1302, DRB1_1303, DRB1_1304, DRB1_1305, DRB1_1312, DRB1_1401, DRB1_1402, DRB1_1403, DRB1_1404, DRB1_1405, DRB1_1406, DRB1_1407, DRB1_1418, DRB1_1454, DRB1_1501, DRB1_1502, DRB1_1503, DRB1_1601, and DRB1_1602.

[0062] In one aspect, a method is described for formulating a composition (e.g., a vaccine), the method comprising determining that a subject in need thereof of the composition expresses one or more HLA alleles, and formulating the composition by selecting nucleic acid sequences encoding for one or more amino acid sequences selected from the group consisting of SEQ ID NOs: 1 to 7601.

[0063] In some embodiments, the one or more HLA alleles is selected from the group consisting of A0101, A0102, A0103, A0109, A0123, A0201, A0202, A0203, A0204, A0205, A0206, A0207, A0211, A0214, A02264, A0230, A0301, A0302, A0305, A1101, A1102, A2301, A2402, A2403, A2407, A2410, A2464, A2501, A2601, A2603, A2608, A2612, A2630, A2901, A2902, A2911, A3001, A3002, A3004, A3009, A3010, A3101, A3104, A3201, A3301, A3303, A3305, A3401, A3402, A3601, A4301, A6601, A6602, A6603, A6801, A6802, A6827, A6901, A74, A7401, A7402, A7403, A7404, A7405, A7406, A7407, A7408, A7409, A7410, A7411, A7413, A8001, B0702, B0705, B0801, B1301, B1302, B1303, B1401, B1402, B1403, B1501, B1502, B1503, B1508, B1510, B1511, B1512, B1516, B1517, B1518, B1521, B15220, B1524, B1525, B1527, B1531, B1532, B1537, B1801, B1802, B1803, B2702, B2703, B2704, B2705, B2706, B2707, B3501, B3502, B3503, B3505, B3508, B3512, B3532, B3541, B3543, B3701, B3801, B3802, B3901, B3905, B3906, B3909, B3910, B3924, B4001, B4002, B4006, B4008, B40114, B4012, B4016, B4101, B4102, B4201, B4202, B4402, B4403, B4404, B4405, B4407, B4410, B4415, B4427, B4501, B4507, B4601, B4701, B4703, B4801, B4803, B4901, B5001, B5101, B5102, B5105, B5107, B5108, B5109, B5201, B5301, B5401, B5501, B5502, B5601, B5604, B5610, B5701, B5702, B5703, B5704, B5801, B5802, B6701, B7301, B7801, B8101, B8103, B8201, B8202, C0102, C0103, C0144, C0202, C0210, C0214, C0217, C0229, C0302, C0303, C0304, C0305, C0317, C0401, C0403, C0404, C0407, C0501, C0509, C0602, C0701, C0702, C0704, C0705, C0706, C0718, C0801, C0802, C0803, C0804, C0812, C1202, C1203, C1402, C1403, C1502, C1504, C1505, C1509, C1601, C1602, C1604, C16112, C1646, C17, C1701, C1702, C1703, C1704, C1705, C1706, C1707, C18, C1801, C1802, C1803, DPA10103-DPB10101, DPA10103-DPB10201, DPA10103-DPB10202, DPA10103-DPB10301, DPA10103-DPB10401, DPA10103-DPB10402, DPA10103-DPB10501, DPA10103-DPB10601, DPA10103-DPB10901, DPA10103-DPB11001, DPA10103-DPB110501, DPA10103-DPB11101, DPA10103-DPB112401, DPA10103-DPB112601, DPA10103-DPB11301, DPA10103-DPB113101, DPA10103-DPB113301, DPA10103-DPB11401, DPA10103-DPB11501, DPA10103-DPB11601, DPA10103-DPB11701, DPA10103-DPB11801, DPA10103-DPB11901, DPA10103-DPB12001, DPA10103-DPB12101, DPA10103-DPB12301, DPA10103-DPB12901, DPA10103-DPB13001, DPA10103-DPB13101, DPA10103-DPB13401, DPA10103-DPB13901, DPA10103-DPB14001, DPA10103-DPB14101, DPA10103-DPB14801, DPA10103-DPB14901, DPA10103-DPB15001, DPA10103-DPB15101, DPA10103-DPB15501, DPA10103-DPB15901, DPA10103-DPB18001, DPA10104-DPB10101, DPA10104-DPB10301, DPA10104-DPB11001, DPA10104-DPB11301, DPA10104-DPB11501, DPA10105-DPB10101, DPA10105-DPB10301, DPA10105-DPB10401, DPA10105-DPB11801, DPA10105-DPB15001, DPA10106-DPB10101, DPA10106-DPB11101, DPA10201-DPB10101, DPA10201-DPB10201, DPA10201-DPB10601, DPA10201-DPB10901, DPA10201-DPB11001, DPA10201-DPB110601, DPA10201-DPB11101, DPA10201-DPB11301, DPA10201-DPB113101, DPA10201-DPB113301, DPA10201-DPB11401, DPA10201-DPB11501, DPA10201-DPB11601, DPA10201-DPB11701, DPA10201-DPB11801, DPA10201-DPB11901, DPA10201-DPB12601, DPA10201-DPB13001, DPA10201-DPB13401, DPA10201-DPB14501, DPA10201-DPB15501, DPA10201-DPB19101, DPA10202-DPB10101, DPA10202-DPB10201, DPA10202-DPB10202, DPA10202-DPB10301, DPA10202-DPB10401, DPA10202-DPB10402, DPA10202-DPB10501, DPA10202-DPB10901, DPA10202-DPB110001, DPA10202-DPB110501, DPA10202-DPB110601, DPA10202-DPB11101, DPA10202-DPB11301, DPA10202-DPB113101, DPA10202-DPB11401, DPA10202-DPB11701, DPA10202-DPB11801, DPA10202-DPB11901, DPA10202-DPB12101, DPA10202-DPB12901, DPA10202-DPB13001, DPA10202-DPB13101, DPA10202-DPB13801, DPA10202-DPB14501, DPA10202-DPB15501, DPA10202-DPB16501, DPA10202-DPB18501, DPA10301-DPB10101, DPA10301-DPB10201, DPA10301-DPB10202, DPA10301-DPB10301, DPA10301-DPB10401, DPA10301-DPB10402, DPA10301-DPB10901, DPA10301-DPB110501, DPA10301-DPB110601, DPA10301-DPB11101, DPA10301-DPB11301, DPA10301-DPB11701, DPA10301-DPB11801, DPA10301-DPB12301, DPA10301-DPB13901, DPA10301-DPB14001, DPA10301-DPB14901, DPA10301-DPB15501, DPA10301-DPB16501, DPA10301-DPB17501, DPA10301-DPB18001, DPA10401-DPB10101, DPA10401-DPB10201, DPA10401-DPB10202, DPA10401-DPB10301, DPA10401-DPB10402, DPA10401-DPB10501, DPA10401-DPB110501, DPA10401-DPB11301, DPA10401-DPB113301, DPA10401-DPB11401, DPA10401-DPB14901, DQA10101-DQB10501, DQA10101-DQB10503, DQA10101-DQB10601, DQA10101-DQB10602, DQA10102-DQB10501, DQA10102-DQB10502, DQA10102-DQB10503, DQA10102-DQB10601, DQA10102-DQB10602, DQA10102-DQB10603, DQA10102-DQB10604, DQA10102-DQB10609, DQA10102-DQB10610, DQA10102-DQB10611, DQA10102-DQB10614, DQA10103-DQB10501, DQA10103-DQB10502, DQA10103-DQB10503, DQA10103-DQB10601, DQA10103-DQB10602, DQA10103-DQB10603, DQA10103-DQB10604, DQA10103-DQB10608, DQA10103-DQB10609, DQA10103-DQB10614, DQA10104-DQB10501, DQA10104-DQB10503, DQA10104-DQB10602, DQA10105-DQB10501, DQA10105-DQB10602, DQA10107-DQB10503, DQA10201-DQB10201, DQA10201-DQB10202, DQA10201-DQB10301, DQA10201-DQB10302, DQA10201-DQB10303, DQA10301-DQB10301, DQA10301-DQB10302, DQA10301-DQB10303, DQA10301-DQB10304, DQA10301-DQB10305, DQA10302-DQB10202, DQA10302-DQB10301, DQA10302-DQB10302, DQA10302-DQB10303, DQA10302-DQB10304, DQA10303-DQB10202, DQA10303-DQB10301, DQA10303-DQB10302, DQA10303-DQB10303, DQA10303-DQB10304, DQA10401-DQB10201, DQA10401-DQB10301, DQA10401-DQB10319, DQA10401-DQB10402, DQA10402-DQB10402, DQA10501-DQB10201, DQA10501-DQB10203, DQA10501-DQB10301, DQA10501-DQB10319, DQA10501-DQB10501, DQA10503-DQB10301, DQA10505-DQB10201, DQA10505-DQB10202, DQA10505-DQB10301, DQA10505-DQB10302, DQA10505-DQB10309, DQA10505-DQB10319, DQA10505-DQB10402, DQA10505-DQB10501, DQA10506-DQB10303, DQA10508-DQB10301, DQA10509-DQB10301, DQA10601-DQB10301, DRB1_0101, DRB1_0102, DRB1_0103, DRB1_0301, DRB1_0401, DRB1_0402, DRB1_0403, DRB1_0404, DRB1_0405, DRB1_0406, DRB1_0407, DRB1_0408, DRB1_0410, DRB1_0411, DRB1_0701, DRB1_0801, DRB1_0802, DRB1_0803, DRB1_0804, DRB1_0806, DRB1_0809, DRB1_0813, DRB1_0901, DRB1_1001, DRB1_1101, DRB1_1102, DRB1_1103, DRB1_1104, DRB1_1114, DRB1_1201, DRB1_1202, DRB1_1301, DRB1_1302, DRB1_1303, DRB1_1304, DRB1_1305, DRB1_1312, DRB1_1401, DRB1_1402, DRB1_1403, DRB1_1404, DRB1_1405, DRB1_1406, DRB1_1407, DRB1_1418, DRB1_1454, DRB1_1501, DRB1_1502, DRB1_1503, DRB1_1601, and DRB1_1602.

### BRIEF DESCRIPTION OF THE DRAWINGS

[0064] The following figures depict illustrative embodiments of the invention.

[0065] FIG. 1 is a flow chart of a vaccine optimization method.

[0066] FIG. 2 is a flow chart of a vaccine optimization method with seed set compression.

[0067] FIG. 3A shows predicted population coverage for Set 1 HIV MHC class I vaccines for 1, 3, and 5 predicted peptide-HLA hits per-individual using conservative immunogenicity.

[0068] FIG. 3B shows predicted population coverage for Set 2 HIV MHC class I vaccines for 1, 3, and 5 predicted peptide-HLA hits per-individual using permissive immunogenicity.

[0069] FIG. 4 shows predicted population coverage for HIV MHC class II vaccines for 1, 3, and 5 predicted peptide-HLA hits per-individual.

[0070] FIG. 5 shows predicated peptide-HLA hits by vaccine size for a KRAS G12V vaccine for the HLA diplotype HLA-A02: 03, HLA-A11: 01, HLA-B55: 02, HLA-B58: 01, HLA-C03: 02, HLA-C03: 03.

[0071] FIG. 6 is a table showing the respective probabilities of target presentations for various mutated protein targets across different cancers.

[0072] FIG. 7 is a flow chart showing a multiple target (combined) vaccine optimization method.

[0073] FIG. 8 shows an example Python implementation of the MergeMulti function for combined vaccine design procedures.

### DETAILED DESCRIPTION OF THE INVENTION

[0074] The practice of the present invention can employ, unless otherwise indicated, conventional techniques of genetics, molecular biology, protein chemistry, computational biology, and formulation science, which are within the skill of the art.

[0075] In order that the present invention can be more readily understood, certain terms are first defined. Additional definitions are set forth throughout the disclosure. Unless defined otherwise, all technical and scientific terms used herein have the same meaning as commonly understood by one of ordinary skill in the art to which this invention is related.

[0076] Any headings provided herein are not limitations of the various aspects or embodiments of the invention, which can be had by reference to the specification as a whole. Accordingly, the terms defined immediately below are more fully defined by reference to the specification in its entirety.

[0077] All references cited in this disclosure are hereby incorporated by reference in their entireties. In addition, any manufacturers' instructions or catalogues for any products cited or mentioned herein are incorporated by reference. Documents incorporated by reference into this text, or any teachings therein, can be used in the practice of the present invention. Documents incorporated by reference into this text are not admitted to be prior art.

### Definitions

[0078] The phraseology or terminology in this disclosure is for the purpose of description and not of limitation, such that the terminology or phraseology of the present specification is to be interpreted by the skilled artisan in light of the teachings and guidance.

[0079] As used in this specification and the appended claims, the singular forms “a,” “an,” and “the” include plural referents, unless the context clearly dictates otherwise. The terms “a” (or “an”) as well as the terms “one or more” and “at least one” can be used interchangeably.

[0080] Furthermore, “and/or” is to be taken as specific disclosure of each of the two specified features or components with or without the other. Thus, the term “and/or” as used in a phrase such as “A and/or B” is intended to include A and B, A or B, A (alone), and B (alone). Likewise, the term “and/or” as used in a phrase such as “A, B, and/or C” is intended to include A, B, and C; A, B, or C; A or B; A or C; B or C; A and B; A and C; B and C; A (alone); B (alone); and C (alone).

[0081] Wherever embodiments are described with the language “comprising,” otherwise analogous embodiments described in terms of “consisting of” and/or “consisting essentially of” are included.

[0082] Units, prefixes, and symbols are denoted in their Système International d′Unités (SI) accepted form. Numeric ranges are inclusive of the numbers defining the range, and any individual value provided herein can serve as an endpoint for a range that includes other individual values provided herein. For example, a set of values such as 1, 2, 3, 8, 9, and 10 is also a disclosure of a range of numbers from 1-10, from 1-8, from 3-9, and so forth. Likewise, a disclosed range is a disclosure of each individual value (i.e., intermediate) encompassed by the range, including integers and fractions. For example, a stated range of 5-10 is also a disclosure of 5, 6, 7, 8, 9, and 10 individually, and of 5.2, 7.5, 8.7, and so forth.

[0083] Unless otherwise indicated, the terms “at least” or “about” preceding a series of elements is to be understood to refer to every element in the series. The term “about” preceding a numerical value includes ±10% of the recited value. For example, a concentration of about 1 mg/mL includes 0.9 mg/mL to 1.1 mg/mL. Likewise, a concentration range of about 1% to 10% (w/v) includes 0.9% (w/v) to 11% (w/v).

[0084] The term “nucleic acid” as used herein, in its broadest sense, refers to any compound and/or substance that is or can be incorporated into an oligonucleotide chain. In some embodiments, a nucleic acid is a compound and/or substance that is or can be incorporated into an oligonucleotide chain via a phosphodiester linkage. As will be clear from context, in some embodiments, “nucleic acid” refers to an individual nucleic acid residue (e.g., a nucleotide and/or nucleoside); in some embodiments, “nucleic acid” refers to an oligonucleotide chain comprising individual nucleic acid residues. In some embodiments, a “nucleic acid” is or comprises RNA; in some embodiments, a “nucleic acid” is or comprises DNA. In some embodiments, a nucleic acid is, comprises, or consists of one or more natural nucleic acid residues. In some embodiments, a nucleic acid is, comprises, or consists of one or more nucleic acid analogs. In some embodiments, a nucleic acid analog differs from a nucleic acid in that it does not utilize a phosphodiester backbone.

[0085] The term “peptide” refers to polymers of amino acids of any length. The polymer can be linear or branched, can comprise modified amino acids, and can be interrupted by non-amino acids. Except where indicated otherwise, e.g., for the abbreviations for the uncommon or unnatural amino acids set forth herein, the three-letter and one-letter abbreviations, as used in the art, are used herein to represent amino acid residues. Groups or strings of amino acid abbreviations are used to represent peptides. Except where specifically indicated, peptides are indicated with the N-terminus of the left and the sequence is written from the N-terminus to the C-terminus.

[0086] The term “composition,” such as a peptide composition, refers to a preparation that is in such form as to permit the biological activity of the active ingredient to be effective.

[0087] A “pharmaceutical composition” refers to a composition which contains no additional components that are unacceptably toxic to a subject to which the composition would be administered and that additionally comprises a pharmaceutically acceptable carrier, such as physiological saline.

[0088] An “immunogenic composition,” such as an immunogenic peptide composition, refers to a composition that can induce an immune response in a subject.

[0089] A “vaccine” or “vaccine composition,” such as a peptide vaccine,” is a composition that can generate acquired immunity against a pathogen or disease in a subject.

[0090] An “effective amount” of an active agent is an amount sufficient to carry out a specifically stated purpose.

[0091] A “subject” or “individual” or “animal” or “patient” or “mammal,” is any subject, particularly a mammalian subject, for whom diagnosis, prognosis, or therapy is desired. Mammalian subjects include humans, domestic animals, farm animals, sports animals, and laboratory animals including, e.g., humans, non-human primates, canines, felines, porcines, bovines, equines, rodents, including rats and mice, rabbits, etc. A subject can also include an in vitro culture of one or more cells that are exposed to the compositions described herein.

[0092] The term “identity” refers to the overall relatedness between polymeric molecules, e.g., between nucleic acid molecules (e.g., DNA molecules and/or RNA molecules) and/or between polypeptide molecules. Calculation of the percent identity of two nucleic acid or polypeptide sequences, for example, can be performed by aligning the two sequences for optimal comparison purposes (e.g., gaps can be introduced in one or both of a first and a second sequences for optimal alignment and non-identical sequences can be disregarded for comparison purposes). The comparison of sequences and determination of percent identity between two sequences can be accomplished using a mathematical algorithm. For example, the percent identity between two nucleotide sequences can be determined using the algorithm of Meyers and Miller (CABIOS, 1989, 4:11-17), which has been incorporated into the ALIGN program (version 2.0). In some exemplary embodiments, nucleic acid sequence comparisons made with the ALIGN program use a PAM120 weight residue table, a gap length penalty of 12 and a gap penalty of 4. The percent identity between two nucleotide sequences can, alternatively, be determined using the GAP program in the GCG software package using an NWSgapdna.CMP matrix.

[0093] Terms such as “treating” or “treatment” or “to treat” or “alleviating” or “to alleviate” refer to therapeutic measures that cure, slow down, lessen symptoms of, and/or halt progression of a diagnosed pathologic condition or disorder. In certain embodiments, a subject is successfully “treated” for a disease or disorder if the patient shows total, partial, or transient alleviation or elimination of at least one symptom or measurable physical parameter associated with the disease or disorder.

[0094] As used herein, the terms “prevent,” “preventing,” “prevention,” “alleviate,” or “alleviating” refer to the prevention, inhibition, or lessening of the recurrence, onset, or development of a disorder or a symptom thereof in a subject resulting from the administration of a therapy (e.g., a vaccine), or the administration of a combination of therapies (e.g., a combination of vaccine(s) and/or therapeutic agents).

[0095] The term “HIV” refers to any Human Immunodeficiency Virus disease including HIV-1 (type 1), HIV-2 (type 2), and their various groups (e.g., Group M) and strains (e.g., A, B, C, D, F, G, H, J, and K). The term “strain variant” refers to a different variants of a given strain.

### Composition/Vaccine Design Considerations

[0096] In some embodiments, the disclosure provides for compositions and (e.g. vaccines) that incorporate peptide sequences that will be displayed by Major Histocompatibility Complex (MHC) molecules on cells and train the immune system to recognize cancer or pathogen diseased cells. The terms MHC and HLA are used interchangeably herein to denote Major Histocompatibility Complex molecules without restriction to species. In some embodiments, the disclosure provides for compositions (e.g. vaccines) that incorporate peptide sequences that will be displayed by Major Histocompatibility Complex (MHC) molecules on cells to induce therapeutic tolerance in antigen-specific immunotherapy for autoimmune diseases (Alhadj et al., 2017; Gibson et al., 2015). In some embodiments, a composition (e.g. vaccine) comprises one or more peptides. In some embodiments, a composition (e.g. vaccine) is an mRNA or DNA construct administered for expression in vivo that encodes for one or more peptides.

[0097] It is to be understood that methods and procedures described herein for designing and preparing vaccines are applicable and cover methods and procedures for designing and preparing compositions, pharmaceutical compositions, and immunogenic compositions.

[0098] The term peptide-HLA binding is defined to be the binding of a peptide to an HLA allele, and can either be computationally predicted, experimentally observed, or computationally predicted using experimental observations. The metric or score of peptide-HLA binding can be expressed as affinity (for example, based on the equilibrium dissociation constant (K_{D}), measured in molar units (M)), percentile rank, binary at a predetermined threshold, probability, rate of disassociation, or other metrics as are known in the art. The term peptide display or peptide-HLA display describes the binding of a peptide to an HLA allele on the surface of a cell. Peptide binding to an HLA allele is required for peptide display by that HLA allele. The metric or score of peptide-HLA display can be expressed as affinity (for example, based on the equilibrium dissociation constant (K_{D}), measured in molar units (M)), percentile rank, binary at a predetermined threshold, probability, or other metrics as are known in the art. In some embodiments, metrics of peptide-HLA binding are used for metrics of peptide-HLA display since peptide-HLA display depends upon peptide-HLA binding.

[0099] The term peptide-HLA immunogenicity metric is defined as the activation of T cells based upon their recognition of a peptide when bound by an HLA allele. The term peptide-HLA immunogenicity score is another term for a peptide-HLA immunogenicity metric, and the terms are interchangeable. A peptide-HLA immunogenicity metric can vary from individual to individual, and the metric for peptide-HLA immunogenicity can be expressed as a probability, a binary indicator, or other metric that relates to the likelihood that a peptide-HLA combination will be immunogenic. In some embodiments, peptide-HLA immunogenicity is defined as the induction of immune tolerance based upon the recognition of a peptide when bound by an HLA allele. A peptide-HLA immunogenicity metric can be computationally predicted, experimentally observed, or computationally predicted using experimental observations. In some embodiments, a peptide-HLA immunogenicity metric is based only upon peptide-HLA binding, since peptide-HLA binding is necessary for peptide-HLA immunogenicity. In some embodiments, peptide-HLA immunogenicity data or computational predictions of peptide-HLA immunogenicity can be included and combined with scores for peptide binding or peptide display in the methods disclosed herein. One way of combining the scores is using immunogenicity data for peptides assayed for immunogenicity in diseased or vaccinated individuals and assigning peptides to the HLA allele that displayed them in the individual by choosing the HLA allele that computational methods predict has the highest likelihood of display. For peptides that are not experimentally assayed, computational predictions of binding can be used. In some embodiments, different computational methods of predicting peptide-HLA immunogenicity or peptide-HLA binding can be combined (Liu et al., 2020b). For a given set of peptides and a set of HLA alleles, the term peptide-HLA hits is the number of unique combinations of peptides and HLA alleles that exhibit peptide-HLA immunogenicity or binding at a predetermined threshold. For example, a peptide-HLA hit of 2 can mean that one peptide is predicted to be bound (or trigger T cell activation) by two different HLA alleles, two peptides are predicted to be bound (or trigger T cell activation) by two different HLA alleles, or two peptides are predicted to be bound (or trigger T cell activation) by the same HLA allele. For a given set of peptides and HLA frequencies, HLA haplotype frequencies, or HLA diplotype frequencies, the expected number of peptide-HLA hits is the average number of peptide-HLA hits in each set of HLAs that represent an individual, weighted by their frequency of occurrence.

[0100] Peptide display by an MHC molecule is necessary, but not sufficient, for a peptide to be immunogenic and cause the recognition of the resulting peptide-MHC complex by an individual's T cells to trigger T cell activation, expansion, and immune memory. In some embodiments, ELISPOT (Slota et al., 2011) or the Multiplex Identification of Antigen-Specific T Cell Receptors Using a Combination of Immune Assays and Immune Receptor Sequencing (MIRA) assay (Klinger et al., 2015) are used to score peptide display or affinity (e.g., a peptide immunogenicity that requires peptide binding) by an MHC molecule (e.g., HLA allele) (e.g., measured as a peptide-HLA binding score). In some embodiments, experimental data from assays such as the ELISPOT (Slota et al., 2011) or the Multiplex Identification of Antigen-Specific T Cell Receptors Using a Combination of Immune Assays and Immune Receptor Sequencing (MIRA) assay (Klinger et al., 2015) can be used to produce a peptide-HLA immunogenicity metric with respect to a peptide and an HLA allele in a given experimental context or individual. In some embodiments, experimental data from assays such as the ELISPOT (Slota et al., 2011) or the Multiplex Identification of Antigen-Specific T Cell Receptors Using a Combination of Immune Assays and Immune Receptor Sequencing (MIRA) assay (Klinger et al., 2015) can be combined with machine learning based predictions for scoring peptide display by an MHC molecule or peptide binding (e.g., binding affinity) by an MHC molecule (e.g., HLA allele) (e.g., measured as a peptide-HLA binding score) or for determining a peptide-HLA immunogenicity metric. In some embodiments, the MHCflurry or NetMHCpan (Reynisson et al., 2020) computational methods (as known in the art) are used to predict MHC class I display of a peptide by an HLA allele (see Table 1). In some embodiments, the NetMHCIIpan computational method (Reynisson et al., 2020) is used to predict MHC class II display of a peptide by an HLA allele (see Table 2).

[0101] In some embodiments, computational methods such as MHCflurry (O'Donnell et al., 2018; O'Donnell et al., 2020; incorporated by reference in their entireties herein), NetMHCpan (Reynisson et al., 2020, incorporated by reference in its entirety herein), and NetMHCIIpan (Reynisson et al., 2020) are used to predict either MHC class I (MHCflurry, NetMHCpan) or class II (NetMHCIIpan) display of peptides by an HLA allele. In other embodiments, other methods of determining peptide-HLA binding are used as disclosed in International Publication No. WO 2005/042698, incorporated by reference in its entirety herein. NetMHCpan-4.1 and NctMHCIIpan-4.0 utilize the NNAlign_MA algorithm (Alvarez et al., 2019, incorporated by reference in its entirety herein) for predicting peptide-HLA binding. NNAlign_MA is in turn based upon the NNAlign (Nielsen et al., 2009, Nielsen et al., 2017, incorporated by reference in their entireties herein) neural network. NetMHCpan-4.1 (Reynisson et al., 2020) uses NNAlign_MA networks with at least 180 inputs that describe the peptide sequence (9×20=180 inputs). Networks with both 56 and 66 hidden neurons and two outputs are utilized (Alvarez et al., 2019). Networks with both 56 and 66 hidden neurons and two outputs are utilized (Alvarez et al., 2019). One output produces a binding affinity data type and the other output produces a mass spectrometry based eluted ligand data type (Alvarez et al., 2019). In some embodiments, the binding affinity data type is used as a peptide-HLA binding metric. In some embodiments, the binding affinity data type is used as a peptide-HLA display metric. In some embodiments, the eluted ligand data type output is used as a peptide-HLA binding metric. In some embodiments, the eluted ligand data type output is used as a peptide-HLA display metric. In some embodiments, the binding affinity data type is used as a peptide-HLA immunogenicity metric. In some embodiments, the eluted ligand data type is used as a peptide-HLA immunogenicity metric. Each network architecture (56 or 66 hidden neurons) is trained with 5 different random parameter initializations and 5-fold cross-validation resulting in a total of 50 individual trained networks (2 architectures×5 initializations×5 cross-validation). These 50 trained networks are used as an ensemble with 25 networks having at least 10,800 parameters (180 inputs×56 neurons) and 25 networks consist of at least 11,880 parameters (180 inputs×66 neurons). Thus, the ensemble of 50 networks in NetMHCpan-4.1 consists of at least 567,000 parameters that must be evaluated with at least 567,000 arithmetic operations for computing peptide-MHC binding. NetMHCIIpan-4.1 (Reynisson et al., 2020) uses NNAlign_MA networks with at least 180 inputs that describe the peptide sequence (9×20=180 inputs). Networks with 2, 10, 20, 40, and 60 hidden neurons and two outputs are utilized (Alvarez et al., 2019). Each network architecture (2, 10, 20, 40, or 60 hidden neurons) is trained with 10 different random parameter initializations and 5-fold cross-validation resulting in a total of 250 individual trained networks (5 architectures×10 initializations×5 cross-validation). These 250 trained networks are used as an ensemble with 50 networks having at least 360 parameters (180 inputs×2 neurons), 50 networks having at least 1800 parameters (180 inputs×10 neurons), 50 networks having at least 3600 parameters (180 inputs×20 neurons), 50 networks having at least 7200 parameters (180 inputs×40 neurons), and 50 networks having at least 10,800 parameters (180 inputs×60 neurons). Thus, the ensemble of 250 networks in NetMHCIIpan-4.0 consists of at least 1,188,000 parameters that must be evaluated with at least 1,188,000 arithmetic operations for computing peptide-MHC binding.

[0102] In some embodiments, computational methods used to predict either MHC class I (e.g., MHCflurry, NetMHCpan) or class II (e.g., NetMHCIIpan) peptide-HLA binding scores or peptide-HLA immunogenicity metrics are based upon data from experimental mass spectrometry observations of peptides bound by MHC molecules. In some embodiments, computational methods used to predict either MHC class I (e.g., MHCflurry, NetMHCpan) or class II (e.g., NetMHCIIpan) peptide-HLA binding scores or peptide-HLA immunogenicity metrics are based upon data from experimental observations of peptide-MHC binding affinity. In some embodiments, experimental observations of peptide-MHC binding affinity or immunogenicity, including mass spectrometry measurements of peptide-HLA binding and measurements of T cell activation, can be found in databases such as the Immune Epitope Database (IEDB) (Vita et al., 2018). The output of MHCflurry 2.0 (O'Donnell et al., 2020, incorporated by reference in its entirety herein) is based upon 493,473 mass spectrometry measurements of peptide-HLA binding, and 219,596 affinity measurements of peptide-HLA binding. The output of NetMHCpan-4.1 (Reynisson et al., 2020) is based upon 665,492 mass spectrometry measurements of peptide-HLA binding, and 52,402 affinity measurements of peptide-HLA binding. The output of NetMHCIIpan-4.0 (Reynisson et al., 2020) is based upon 381,066 mass spectrometry measurements of peptide-HLA binding, and 44,861 affinity measurements of peptide-HLA binding.

[0103] A peptide is displayed by an MHC molecule when it binds within the groove of the MHC molecule and is transported to the cell surface where it can be recognized by a T cell receptor. A target peptide refers to a foreign peptide or a self-peptide. In some embodiments, a peptide that is part of the normal proteome in a healthy individual is a self-peptide, and a peptide that is not part of the normal proteome is a foreign peptide. In some embodiments, target peptides can be part of the normal proteome that exhibit aberrant expression (e.g., cancer-testis antigens such as NY-ESO-1). Foreign peptides can be generated by mutations in normal self-proteins in tumor cells that create epitopes called neoantigens, or by pathogenic infections. In some embodiments, a neoantigen is any subsequence of a human protein, where the subsequence contains one or more altered amino acids or protein modifications that do not appear in a healthy individual. Therefore, in this disclosure, foreign peptide refers to an amino acid sequence encoding a fragment of a target protein/peptide (or a full-length protein/peptide), the target protein/peptide consisting of: a neoantigen protein, a pathogen proteome, or any other undesired protein that is non-self and is expected to be bound and displayed by an HLA allele.

[0104] In some embodiments, a composition (e.g., an immunogenic composition) includes nucleic acids sequences encoding for one or more peptides, wherein the one or more peptides is MHC restricted (also referred to as HLA restricted). In some embodiments, a composition (e.g., an immunogenic composition) includes one or more peptides wherein the one or more peptides is MHC restricted (also referred to as HLA restricted). In some embodiments, an MHC restriction of a peptide sequence refers to the presence of an MHC (or HLA) allele in a subject that allows for peptide-HLA display, peptide-HLA binding, or peptide-HLA immunogenicity for the peptide. An HLA allele is abbreviated by its locus, its two digit allele group, and its two or three digit specific HLA protein. For example, the HLA allele HLA-A*02:01 is abbreviated as A0201. For MHC Class II alleles that begin with DP, DQ, or DR, the first digit is part of the locus, followed by a two or three digit allele group and a two or three digit specific HLA protein. For example, the HLA allele DPA1*01:03 is abbreviated DPA10103 and DRB1*15:01 is abbreviated DRB1_1501. In some embodiments, a composition is designed based on MHC restrictions such that one or more peptides (or nucleic acids encoding for one or more peptides) is included in the composition based on a determination that one or more MHC (or HLA) alleles is present in a subject in need thereof of the composition. In some embodiments, the MHC (or HLA) alleles present in the subject are determined to allow for display or immunogenicity (peptide-HLA display or peptide-HLA immunogenicity) of the one or more peptides (or nucleic acids encoding for one or more peptides) in the composition. In some embodiments, the HLA alleles present or expressed in a subject are used to select one or more peptides (or nucleic acids encoding the peptides) for inclusion in a composition to be administered to the subject. In some embodiments, the selection is based on the likelihood that a given HLA allele expressed in the subject is capable of binding to a given peptide (or nucleic acid encoding the peptide) in the composition. In some embodiments, a composition is designed based on MHC restrictions such that one or more peptides (or nucleic acids encoding for one or more peptides) is included in the composition based on a determination of the MHC (or HLA) alleles present in a desired population of people. Population based HLA allele frequencies can be determined from the Allele Frequency Net Database, the HLA haplotype frequencies provided in Liu et al., Cell Systems 11, Issue 2, p. 131-146 (Liu et al., 2020a), or other sources known in the art. In some embodiments, algorithms such as OptiVax are used for peptide selection using population HLA frequencies (Liu et al., 2020a, Liu et al., 2022). A given peptide sequence can have more than one MHC restriction. For example, SEQ ID NO: 46 has an MHC restriction that includes an HLA allele selected from the group consisting of C0214, C0602, and C0704. In some embodiments, a peptide (or nucleic acid sequences encoding for the peptide) is included in a composition only if two or more MHC (or HLA) alleles are present in the subject that are also in the MHC restriction of the peptide. For example, the peptide (or nucleic acid sequences encoding for the peptide) containing SEQ ID NO: 46 is included in the composition only if a subject has both C0214 and C0602 alleles. In some embodiments, MHC restrictions can be based on both MHC class I and MHC class II alleles.

[0105] In some embodiments, the one or more amino acid sequences is selected for inclusion in a composition (e.g., a vaccine) based on an MHC restriction that includes an HLA allele described in the notes field of the respective SEQ ID NO entry in the sequence listing. For example, in the sequence listing, SEQ ID NO: 46 has a note filed that states: “HLAs: C0214 C0602 C0704.” Thus, in some embodiments, SEQ ID NO: 46 is included in the composition if it is determined that an individual in need thereof of the composition expresses one or more of the HLA alleles selected from the group consisting of C0214, C0602, and C0704. In some embodiments, SEQ ID NO: 46 is included in the composition if it is determined that a population of people is in need thereof of the composition expressing one or more of the HLA alleles selected from the group consisting of C0214, C0602, and C0704. Other sequences listed in the sequence listing are considered for inclusion in a composition based on their corresponding HLA alleles as listed in their respective notes field. In some embodiments, the one or more amino acid sequences is selected for inclusion in the MHC class II peptide vaccine based on an MHC restriction that includes an HLA allele described in the notes field of the respective SEQ ID NO entry in the sequence listing. For example, SEQ ID NO: 59 has an MHC restriction that includes an HLA allele selected from the group consisting of DRB1_1501 and DRB1_1503. The MHC restrictions for an amino acid sequence for MHC class II molecules can include alpha and beta chain HLA alleles separated by a dash (for example DPA10103-DPB11501). In some embodiments, the one or more amino acid sequences is selected for inclusion in the MHC class I and/or MHC class II peptide vaccine based on an MHC restriction that includes an HLA allele described in the notes field of the respective SEQ ID NO entry in the sequence listing.

[0106] Non-limiting MHC restrictions for entries in the sequence listing are provided in a sequence's entry free text. In some embodiments, a peptide sequence is preferably selected for inclusion in a composition based on an individual's HLA type that is included in the sequences' non-limiting annotated MHC restrictions. For example, SEQ ID NO: 46 has a non-limiting MHC restriction that includes HLA alleles selected from the group consisting of C0214, C0602, and C0704, and thus in some embodiments SEQ ID NO: 46 would be included in peptide candidates for a vaccine for an individual where one or more of these HLA alleles is present.

[0107] The HIV proteins gag and pol are part of the HIV proteome, and their sequences vary by HIV type, group, strain, and strain variant. One example of the HIV Gag-Pol polyprotein is UniProt Entry P03366 NCBI Taxon ID 11678 (UniProt Proteome ID UP000007690). In some embodiments, we consider multiple protein sequences from different HIV variants, and the methods described are not restricted to specific strains or pathogen proteins. In some embodiments, the virus is HIV-1. In some embodiments, the virus is HIV-2. Peptides that are perfectly or broadly conserved across HIV strains or strain variants can be used in compositions for prophylaxis or therapeutic benefit against the strains or strain variants.

[0108] A challenge for the design of peptide vaccines is the diversity of human MHC alleles (HLA alleles) that each have specific preferences for the peptide sequences they will display. The Human Leukocyte Antigen (HLA) loci, located within the MHC, encode the HLA class I and class II molecules. There are three classical class I loci (HLA-A, HLA-B, and HLA-C) and three loci that encode class II molecules (HLA-DR, HLA-DQ, and HLA-DP). An individual's HLA type describes the alleles they carry at each of these loci. Peptides of length of between about 8 and about 11 residues can bind to HLA class I (or MHC class I) molecules whereas those peptides of length of between about 13 and about 25 residues bind to HLA class II (or MHC class II) molecules (Rist et al., 2013; Chicz et al., 1992). Human populations that originate from different geographies have differing frequencies of HLA alleles, and these populations exhibit linkage disequilibrium between HLA loci that result in population specific haplotype frequencies. In some embodiments, methods are disclosed for creating effective vaccines that include consideration of the HLA allelic frequency in the target population, as well as linkage disequilibrium between HLA genes to achieve a set of peptides that is likely to be robustly displayed.

[0109] The present disclosure provides for compositions, systems, and methods of vaccine designs that produce immunity to single or multiple targets. In some embodiments, a target is a neoantigen protein sequence, a pathogen proteome, or any other undesired protein sequence that is non-self and is expected to be bound and displayed by an HLA molecule (also referred to herein as an HLA allele). When a target is present in an individual, it may result in multiple peptide sequences that are displayed by a variety of HLA alleles. In some embodiments, it may be desirable to create a vaccine that includes selected self-peptides, and thus these selected self-peptides are considered to be the target peptides for this purpose.

[0110] Because immunogenicity may vary from individual to individual, one method to increase the probability of vaccine efficacy is to use a diverse set of target peptides (e.g., at least two peptides) to increase the chances that some subset of them will be immunogenic in a given individual. Prior research using mouse models has shown that most MHC displayed peptides are immunogenic, but immunogenicity varies from individual to individual as described in Croft et al. (2019). In some embodiments, experimental peptide-HLA immunogenicity data are used to determine which target peptides and their modifications will be effective immunogens in a vaccine.

[0111] Considerations for the design of peptide vaccines are outlined in Liu et al. (2020a) Cell Systems 11, Issue 2, p. 131-146 (Liu et al., 2020a) and Liu et al., Cell Systems 12, Issue 1, p. 102-107 (Liu et al., 2020b) and U.S. Pat. Nos. 11,058,751 and 11,161,892, which are incorporated by reference in their entireties herein.

[0112] Certain target peptides may not bind with high affinity to a wide range of HLA molecules. To increase the binding of target peptides to HLA molecules, their amino acid composition can be altered to change one or more anchor residues or other residues. In some embodiments, to increase the immunogenicity of a target peptide when displayed by HLA molecules, a target peptide's amino acid composition can be altered to change one or more residues. Anchor residues are amino acids that interact with an HLA molecule and have the largest influence on the affinity of a peptide for an HLA molecule. Peptides with one or more altered amino acid residues are called heteroclitic peptides. In some embodiments, heteroclitic peptides include target peptides with residue modifications at anchor positions. In some embodiments, heteroclitic peptides include target peptides with residue modifications at non-anchor positions. In some embodiments, heteroclitic peptides include target peptides with residue modifications that include unnatural amino acids and amino acid derivatives. Modifications to create heteroclitic peptides can improve the binding of peptides to both MHC class I and MHC class II molecules, and the modifications required can be both peptide and MHC class specific. Since peptide anchor residues face the MHC molecule groove, they are less visible than other peptide residues to T cell receptors. Thus, heteroclitic peptides with anchor residue modifications have been observed to induce a T cell response where the stimulated T cells also respond to unmodified peptides. It has been observed that the use of heteroclitic peptides in a vaccine can improve a vaccine's effectiveness (Zirlik et al., 2006). In some embodiments, the immunogenicity of heteroclitic peptides are experimentally determined and their ability to activate T cells that also recognize the corresponding base (also called seed) peptide of the heteroclitic peptide is determined, as is known in the art (Houghton et al., 2007). In some embodiments, these assays of the immunogenicity and cross-reactivity of heteroclitic peptides are performed when the heteroclitic peptides are displayed by specific HLA alleles.

### Peptide Vaccines to Induce Immunity to One or More Targets

[0113] In some embodiments, a method is provided for formulating peptide vaccines using a single vaccine design for one or more targets. In some embodiments, a single target is a foreign protein with a specific mutation (e.g., KRAS G12D). In some embodiments, a single target is a self-protein (e.g., a protein that is overexpressed in tumor cells such as cancer/testis antigens). In some embodiments, a single target is a pathogen protein (e.g., a protein contained in a viral proteome). In some embodiments, multiple targets can be used (e.g., different HIV proteins from the same or from different strains or variants).

[0114] In some embodiments, the method includes extracting peptides to construct a candidate set from all target proteome sequences (e.g., entire KRAS G12D protein) as described in Liu et al. (2020a).

[0115] FIGS. 1 and 2 depict flow charts for example vaccine design methods that can be used for MHC class I or MHC class II vaccine design. A Candidate Peptide Set (scc FIGS. 1 and 2) is comprised of target peptides extracted by windowing an input protein sequence. In some embodiments, extracted target peptides are of amino acid length of between about 8 and about 10 (e.g., for MHC class I binding (Rist et al., 2013)). In some embodiments, the extracted target peptides presented by MHC class I molecules are longer than 10 amino acid residues, such as 11 residues (Trolle et al., 2016). In some embodiments, extracted target peptides are of length between about 13 and about 25 (e.g., for class II binding (Chicz et al., 1992)). In some embodiments, sliding windows of various size ranges described herein are used over the entire proteome. In some embodiments, other target peptide lengths for MHC class I and class II sliding windows can be utilized. In some embodiments, computational predictions of proteasomal cleavage are used to filter or select peptides in the candidate set. One computational method for predicting proteasomal cleavage is described by Nielsen et al. (2005). In some embodiments, peptide mutation rates, glycosylation, cleavage sites, or other criteria can be used to filter peptides as described in Liu et al. (2020a). In some embodiments, peptides can be filtered based upon evolutionary sequence variation above a predetermined threshold. Evolutionary sequence variation can be computed with respect to other species, other pathogens, other pathogen strains, or other related organisms. In some embodiments, a first peptide set is the candidate set.

[0116] As shown in FIGS. 1-2, in some embodiments, the next step of the method includes scoring the target peptides in the candidate set for peptide-HLA binding to all considered HLA alleles as described in Liu et al. (2020a) and Liu et al. (2020b). In some embodiments, a first peptide set is the candidate set after scoring the target peptides. Scoring can be accomplished for human HLA molecules, mouse H-2 molecules, swine SLA molecules, or MHC molecules of any species for which prediction algorithms are available or can be developed. Thus, vaccines targeted at non-human species can be designed with the method. Scoring metrics can include the affinity for a target peptide to an HLA allele in nanomolar, eluted ligand, presentation, and other scores that can be expressed as percentile rank or any other metric. The candidate set may be further filtered to exclude peptides whose predicted binding cores do not contain a particular pathogenic or neoantigen target residue of interest or whose predicted binding cores contain the target residue in an anchor position. The candidate set may also be filtered for target peptides of specific lengths, such as length 9 for MHC class I, for example. In some embodiments, scoring of target peptides is accomplished with experimental data or a combination of experimental data and computational prediction methods. When computational models are unavailable to make peptide-HLA binding predictions for particular (peptide, HLA) pairs, the binding value for such pairs can be defined by the mean, median, minimum, or maximum immunogenicity value taken over supported pairs, a fixed value (such as an indication of no binding), or inferred using other techniques, including a function of the prediction of the most similar (peptide, HLA) pair available in the scoring model.

[0117] In some embodiments, a base set (also referred to as seed set herein) is constructed by selecting peptides from the scored candidate set using individual peptide-HLA binding or immunogenicity criteria (e.g., first peptide set) (FIG. 1). In some embodiments, since a given peptide has multiple peptide-HLA scores, the selection can be based on the peptide-HLA binding score or peptide-HLA immunogenicity metric with the best affinity or highest immunogenicity (e.g., predicted to bind the strongest or activate T cells the most for a given HLA allele). The criteria used for scoring peptide-HLA binding during the scoring procedure can accommodate different goals during the base set selection and vaccine design phases. For example, a target peptide with peptide-HLA binding affinities of 500 nM may be displayed by an individual that is diseased, but at a lower frequency than a target peptide with a 50 nM peptide-HLA binding affinity. During the combinatorial design phase of a vaccine, a more constrained affinity criteria may be used (e.g., when selecting a third peptide set, the Vaccine for Target(s) in FIGS. 1 and 2), such a 50 nM, to increase the probability that a vaccine peptide will be found and displayed by HLA molecules. In some embodiments, a relatively less constrained threshold (e.g., less than about 1000 nM or less than about 500 nM) of peptide-HLA immunogenicity or peptide-HLA binding is used as a first threshold for filtering candidate peptide-HLA scores (the first Peptide Scoring and Score Filtering step in FIGS. 1 and 2) and a relatively more constrained second threshold (e.g., less than about 50 nM) is used for filtering expanded set peptide-HLA scores (the second Peptide Filtering and Scoring step in FIGS. 1 and 2) for their scores for specific HLA alleles. In some embodiments, specific peptide-HLA scores are not used for modified peptides for a given HLA for vaccine design when their unmodified counterpart peptide does not pass the first less constrained threshold. Filtering of peptide-HLA scores can occur for any relevant metric (binding affinity, probability of binding, probability of immunogenicity, etc.). This filtering of peptide-HLA scores is based on the observation that peptides that are not immunogenic enough for vaccine inclusion may be antigenic (meet the first filtering threshold) and thus recognized by T cell clonotypes expanded by a vaccine. A peptide is antigenic when it is recognized by a T cell receptor and results in a response such as CD8+ T cell cytotoxicity or CD4+ cell activation. Derivatives of an antigenic peptide may be strongly immunogenic, included in a vaccine, and thus activate and expand T cells that recognize the antigenic peptide. The expansion of T cells that recognize an unmodified antigenic peptide can provide an immune response that contributes to disease control. In some embodiments, peptides are scored for third peptide set (Vaccine for Target(s) in FIGS. 1 and 2) potential inclusion that have peptide-HLA binding affinities less than about 500 nM. In some embodiments, peptides are selected for the base set that have peptide-HLA binding affinities less than about 1000 nM for at least one HLA allele. Alternatively, predictions of peptide-HLA immunogenicity can be used to qualify target peptides for base set inclusion. In some embodiments, at the first Peptide Scoring and Score Filtering step in FIGS. 1 and 2 the first less constrained threshold for admitting a peptide-HLA score for a peptide for an HLA allele is determined by the best peptide-HLA score of the peptide's heteroclitic derivatives for the same HLA. In some embodiments, the probability threshold for binding or immunogenicity for a first threshold for a peptide-HLA score may be lower for an HLA allele when the probability of immunogenicity or binding for the peptide's best derivative is higher for the same HLA. In some embodiments, the product (or other function) of a peptide's peptide-HLA binding or immunogenicity probability score and the peptide-HLA binding or immunogenicity probability score for its best derivative peptide for the same HLA allele are required to meet a specified threshold (e.g., 0.5, 0.6, 0.7, 0.8, or 0.9). In some embodiments, experimental observations of the immunogenicity of peptides in the context of their display by HLA alleles or experimental observation of the binding of peptides to HLA alleles can be used to score peptides for binding to HLA alleles or peptide-HLA immunogenicity.

[0118] In some embodiments, experimental observations of the display of peptides by specific HLA alleles in tumor cells can be used to score peptides for peptide-HLA binding or peptide-HLA immunogenicity. In some embodiments, experimental observations of the display of peptides tumor cells by a specific HLA allele can be used to score peptides for peptide-HLA binding or peptide-HLA immunogenicity for that HLA allele. In some embodiments, experimental observations of the display of peptides tumor cells can be used to score peptides for peptide-HLA binding or peptide-HLA immunogenicity, with the HLA allele(s) for a specific observed peptide selected from the HLA alleles present in the tumor that meet a predicted peptide-HLA binding or immunogenicity threshold. In some embodiments, mass spectrometry is used to experimentally determine the display of peptides by tumor cells as described by Bear et al. (2021) or Wang et al. (2019) and these data are used to score for peptide-HLA binding or peptide-HLA immunogenicity. In some embodiments, mass spectrometry is used to experimentally determine the display of peptides by tumor cells, and these experimental data are used to qualify the inclusion of base set (seed set) peptides for one or more HLA alleles for a vaccine. In some embodiments, mass spectrometry is used to experimentally determine the display of a peptide by tumor cells, and these experimental data are used to exclude peptide-HLA binding scores or peptide-HLA immunogenicity scores for the peptide when the peptide is not observed to be displayed by an HLA allele by mass spectrometry. In some embodiments, mass spectrometry is used to experimentally determine the display of peptides by tumor cells in an individual, and these experimental data are used to qualify the inclusion of base set (seed set) peptides for that individual for one or more HLA alleles. In some embodiments, mass spectrometry is used to experimentally determine the display of a peptide by tumor cells in an individual, and these experimental data are used to exclude peptide-HLA binding scores or peptide-HLA immunogenicity scores for the peptide when the peptide is not observed to be displayed by an HLA allele by mass spectrometry. In some embodiments, computational predictions of the immunogenicity of a peptide in the context of display by HLA alleles can be used for scoring such as the methods of Ogishi et al. (2019) or Bulik-Sullivan et al. (2019).

[0119] In some embodiments, a peptide-HLA score or a peptide-HLA immunogenicity score for a first peptide in the base set (seed set) for a given HLA allele is eliminated and not considered during vaccine design if the wild-type peptide corresponding to the first peptide (e.g. the unmutated naturally occurring form for the peptide or a peptide in the respective species within a defined sequence edit distance) has a peptide-HLA score or a peptide-HLA immunogenicity score for the same HLA allele within a defined threshold. The threshold can be based upon the difference of the scores of the first peptide and the wild-type peptide, the ratio of the scores of the first peptide and the wild-type peptide, the score of the wild-type peptide, or other metrics. The defined threshold can be either greater than or less than a specified value. In some embodiments, the threshold is defined so that the wild-type peptide is not predicted to be presented. In some embodiments, when a peptide-HLA score or peptide-HLA immunogenicity score is eliminated for a first peptide during vaccine design, then peptide-HLA scores or peptide-HLA immunogenicity scores for all of its derivatives (e.g., heteroclitic peptide derivatives) for the same HLA allele are also eliminated and not considered during vaccine design.

[0120] In some embodiments, the method further includes running the OptiVax-Robust algorithm as described in Liu et al. (2020a) using the HLA haplotype frequencies of a population on the scored candidate set to construct a base set (also referred to as seed set herein) of target peptides (FIG. 2). In some embodiments, HLA diplotype frequencies can be provided to OptiVax. OptiVax-Robust includes algorithms to eliminate peptide redundancy that arises from the sliding window approach with varying window sizes, but other redundancy elimination measures can be used to enforce minimum edit distance constraints between target peptides in the candidate set. The size of the seed set is determined by a point of diminishing returns of population coverage as a function of the number of target peptides in the seed set. Other criteria can also be used, including a minimum number of vaccine target peptides, maximum number of vaccine target peptides, and desired predicted population coverage. In some embodiments, a predetermined population coverage is less than about 0.4, between about 0.4 and 0.5, between about 0.5 and 0.6, between about 0.6 and 0.7, between about 0.7 and 0.8, between about 0.8 and 0.9, or greater than about 0.9. Another possible criterion is a minimum number of expected peptide-HLA binding hits in each individual. In alternate embodiments, the method further includes running the OptiVax-Unlinked algorithm as described in Liu et al. (2020a) instead of OptiVax-Robust.

[0121] The OptiVax-Robust method uses binary predictions of peptide-HLA immunogenicity, and these binary predictions can be generated as described in Liu et al. (2020b). The OptiVax-Unlinked method uses the probability of target peptide binding to HLA alleles and can be generated as described in Liu et al. (2020a). In some embodiments, OptiVax-Unlinked and EvalVax-Unlinked are used with the probabilities of peptide-HLA immunogenicity. Either method can be used for the purposes described herein, and thus the term “OptiVax” refers to either the Robust or Unlinked method. In some embodiments, the observed probability of peptide-HLA immunogenicity in experimental assays can be used as the probability of peptide-HLA binding in EvalVax-Unlinked and OptiVax-Unlinked. In some embodiments, the HLA haplotype or HLA allele frequencies of a population provided to OptiVax for vaccine design describe the world's population. In alternative embodiments, the HLA haplotype or HLA allele frequencies of a population provided to OptiVax for vaccine design are specific to a geographic region. In alternative embodiments, the HLA haplotype or HLA allele frequencies of a population provided to OptiVax for vaccine design are specific to an ancestry. In alternative embodiments, the HLA haplotype or HLA allele frequencies of a population provided to OptiVax for vaccine design are specific to a race. In alternative embodiments, the HLA haplotype or HLA allele frequencies of a population provided to OptiVax for vaccine design are specific to individuals with risk factors such as genetic indicators of risk, age, exposure to chemicals, alcohol use, chronic inflammation, diet, hormones, immunosuppression, infectious agents, obesity, radiation, sunlight, or tobacco use. In alternative embodiments, the HLA haplotype or HLA allele frequencies of a population provided to OptiVax for vaccine design are specific to individuals that carry certain HLA alleles. In alternative embodiments, the HLA diplotypes provided to OptiVax for vaccine design describe a single individual, and are used to design an individualized vaccine.

[0122] In some embodiments, the base (or seed) set of target peptides (e.g., first peptide set) that results from OptiVax application to the candidate set of target peptides describes a set of unmodified target peptides that represent a possible compact vaccine design (Seed Set in FIG. 2). A base peptide is a target peptide that is included in the base or seed peptide set (e.g., first peptide set). In some embodiments, the seed set (e.g., first peptide set) is based upon filtering candidate peptide scores by predicted or observed affinity or immunogenicity with respect to HLA molecules (Seed Set in FIG. 1). However, to improve the display of the target peptides in a wide range of HLA haplotypes as possible, some embodiments include modifications of the seed (or basc) set. In some embodiments, experimental assays can be used to ensure that a modified seed (or base) peptide activates T cells that also recognize the base/seed peptide.

[0123] For a given target peptide, the optimal anchor residue selection may depend upon the HLA allele that is binding to and displaying the target peptide and the class of the HLA allele (MHC class I or class II). A seed peptide set (e.g., first peptide set) can become an expanded set by including anchor residue modified peptides of either MHC class I or II peptides (FIGS. 1-2). Thus, one aspect of vaccine design is considering how to select a limited set of heteroclitic peptides that derive from the same target peptide for vaccine inclusion given that different heteroclitic peptides will have different and potentially overlapping population coverages.

[0124] In some embodiments, all possible anchor modifications for each base set of target peptide are considered. There are typically two anchor residues in peptides bound by MHC class I molecules, typically at positions 2 and 9 for 9-mer peptides. In some embodiments, anchors for 8-mers, 10-mers, and 11-mers are found at positions 2 and n, where n is the last position (8, 10, and 11, respectively). For MHC class I molecules, the last position n is called the “C” position herein for carboxyl terminus. In some embodiments, at each anchor position, 20 possible amino acids are attempted in order to select the best heteroclitic peptides. Thus, for MHC class I binding, 400 (i.e., 20 amino acids by 2 positions=202) minus 1 heteroclitic peptides are generated for each base target peptide. There are typically four anchor residues in peptides bound by MHC class II molecules, typically at positions 1, 4, 6, and 9 of the 9-mer binding core. Thus, for MHC class II binding there are 160,000 (i.e., 20 amino acids by 4 positions=204) minus 1 heteroclitic peptides generated for each base target peptide. In some embodiments, more than two (MHC class I) or four (MHC class II) positions are considered as anchors. Other methods, including Bayesian optimization, can be used to select optimal anchor residues to create heteroclitic peptides from each seed (or base) set peptide. Other methods of selecting optimal anchor residues are presented in “Machine learning optimization of peptides for presentation by class II MHCs” by Dai et al. (2020), incorporated in its entirety herein. In some embodiments, the anchor positions are determined by the HLA allele that presents a peptide, and thus the set of heteroclitic peptides includes for each set of HLA specific anchor positions, all possible anchor modifications.

[0125] In some embodiments, for all of the target peptides in the base/seed set, new peptide sequences with all possible anchor residue modifications (e.g., MHC class I or class II) are created resulting in a new heteroclitic base set (Expanded set in FIGS. 1-2) that includes all of the modifications. In some embodiments, anchor residue modifications of a peptide are not included in the heteroclitic base set if one or more of the peptide's anchor residue positions contains a substitution mutation that distinguishes the peptide from a self-peptide. In some embodiments, anchor residue modifications of a base/seed peptide are only included in the heteroclitic base set for peptide positions that do not contain a substitution mutation that distinguishes the base/seed peptide from a self-peptide. In some embodiments, anchor residue modifications of a peptide are not included in the heteroclitic base set when one or more of the peptide's mutations does not occur between a pair of its adjacent anchor residues. In some embodiments, for all of the target peptides in the base/seed set, new peptide sequences with anchor residue modifications (e.g., MHC class I or class II) at selected anchor locations are created resulting in a new heteroclitic base set (Expanded set in FIGS. 1-2) that includes the selected modifications. In some embodiments, the anchor residue positions used for modifying peptides are selected from anchor residue positions determined by the HLA alleles considered during vaccine evaluation. In some embodiments, the heteroclitic base set (Expanded set in FIGS. 1-2) also includes the original seed (or base) set (Seed Peptide Set in FIGS. 1-2). In some embodiments, the heteroclitic base set includes amino acid substitutions at non-anchor residues. In some embodiments, modifications of base peptide residues is accomplished to alter binding to T cell receptors to improve therapeutic efficacy (Candia, et al. 2016). In some embodiments, the heteroclitic base set includes amino acid substitutions of non-natural amino acid analogs. The heteroclitic base set is scored for HLA affinity, peptide-HLA immunogenicity, or other metrics as described herein (another round of Peptide Scoring and Score Filtering as shown in FIGS. 1-2). In some embodiments, the scoring predictions may be further updated for pairs of heteroclitic peptide and HLA allele, eliminating pairs where a heteroclitic peptide has a seed (or base) peptide from which it was derived that is not predicted to be displayed by the HLA allele at a specified threshold of peptide-HLA binding score or a specified peptide-HLA immunogenicity metric. In some embodiments, at the second Peptide Scoring and Score Filtering step in FIGS. 1 and 2 a peptide-HLA score is not used for a heteroclitic peptide for a given HLA for vaccine design when the product (or other function) of the heteroclitic peptide's peptide-HLA immunogenicity or binding probability score and the peptide-HLA immunogenicity or binding probability score for its unmodified counterpart peptide do not meet a specified threshold (e.g., 0.5, 0.6, 0.7, 0.8, or 0.9). In some embodiments, the peptide-HLA scores may also be filtered to ensure that predicted binding cores of the heteroclitic peptide displayed by a particular HLA allele align exactly in position with the binding cores of the respective seed (or base) set target peptide for that HLA allele. In some embodiments, the scoring predictions are filtered for an HLA allele to ensure that the heteroclitic peptides considered for that HLA allele are only modified at anchor positions determined by that HLA allele. Scoring produces a metric of peptide-HLA immunogenicity for peptides and HLA alleles that can be either binary, a probability of immunogenicity, or other metric of immunogenicity such as peptide-HLA affinity or percent rank, and can be based on computational predictions, experimental observations, or a combination of both computational predictions and experimental observations. In some embodiments, probabilities of peptide-HLA immunogenicity are utilized by OptiVax-Unlinked. In some embodiments, heteroclitic peptides are included in experimental assays such as MIRA (Klinger et al., 2015) or ELISPOT to determine their peptide-HLA immunogenicity metric with respect to specific HLA alleles. In some embodiments, the methods of Liu et al. (2020b), can be used to incorporate MIRA data for heteroclitic peptides into a model of peptide-HLA immunogenicity. In some embodiments, peptide-HLA immunogenicity metrics of heteroclitic peptides are experimentally determined and their ability to activate T cells that also recognize the corresponding seed (or base) peptide of the heteroclitic peptide is performed as is known in the art to qualify the heteroclitic peptide for vaccine inclusion (e.g., Houghton et al., 2007). In some embodiments, these assays of the immunogenicity and cross-reactivity of heteroclitic peptides are performed when the heteroclitic peptides are displayed by specific HLA alleles.

[0126] In some embodiments, experimental observations of the display of heteroclitic peptides by specific HLA alleles in cells can be used to score peptides for peptide-HLA binding or peptide-HLA immunogenicity. In some embodiments, mass spectrometry is used to experimentally determine the display of heteroclitic peptides by cells as described by Bear et al. (2021) or Wang et al. (2019) and these data are used to score for peptide-HLA binding or peptide-HLA immunogenicity. In some embodiments, mass spectrometry is used to experimentally determine the display of heteroclitic peptides by cells, and these experimental data are used to qualify the inclusion of heteroclitic peptides for inclusion in a vaccine. In some embodiments, mass spectrometry is used to experimentally determine the display of a peptide by tumor cells, and these experimental data are used to exclude peptide-HLA binding scores or peptide-HLA immunogenicity scores for the peptide when the peptide is not observed to be displayed by an HLA allele by mass spectrometry. In some embodiments, mass spectrometry is used to experimentally determine the display of a heteroclitic peptide by cells with an HLA allele found in an individual, and these experimental data are used to qualify the inclusion of the heteroclitic peptide for inclusion in a vaccine for the individual. In some embodiments, mass spectrometry is used to experimentally determine the display of a peptide by tumor cells in an individual, and these experimental data are used to exclude peptide-HLA binding scores or peptide-HLA immunogenicity scores for the peptide when the peptide is not observed to be displayed by an HLA allele by mass spectrometry. In some embodiments, computational predictions of the immunogenicity of a heteroclitic peptide in the context of display by HLA alleles can be used for scoring such as the methods of Ogishi et al. (2019) or Bulik-Sullivan et al. (2019).

[0127] In some embodiments, a peptide in the heteroclitic base set is removed if (1) one of its anchor positions for an HLA allele corresponds to the location of a mutation in the base/seed peptide from which it was derived that distinguishes the base/seed peptide from a self-peptide, and (2) if the peptide-HLA binding or peptide-HLA immunogenicity of the self-peptide is stronger than a specified threshold for self-peptide binding or immunogenicity. This eliminates peptides in the heteroclitic base set that may cross-react with self-peptides as a result of sharing TCR facing residues with self-peptides. In some embodiments, the threshold for self-peptide binding is between approximately 500 nM to 1000 nM.

[0128] In some embodiments, redundant peptides in the heteroclitic base set are removed. In some embodiments, a redundant peptide is a first heteroclitic peptide that has peptide-HLA immunogenicity scores or peptide-HLA binding scores that are less immunogenic for all scored HLAs than a second heteroclitic peptide in the heteroclitic base set, where both the first and second heteroclitic peptides are derived from the same base (or seed) peptide. In some embodiments, peptide redundancy is determined by only comparing peptide-HLA immunogenicity scores or peptide-HLA binding scores for HLA alleles where the peptide-HLA immunogenicity scores or peptide-HLA binding scores for both peptides for an HLA allele are more immunogenic than a given threshold (e.g., 50 nM for binding). In some embodiments, a redundant peptide is a first heteroclitic peptide that has an average peptide-HLA immunogenicity score or peptide-HLA binding score that is less immunogenic than the average peptide-HLA immunogenicity score or peptide-HLA binding score of a second heteroclitic peptide in the heteroclitic base set, where both the first and second heteroclitic peptides are derived from the same base (or seed) peptide, and the average scores are computed for HLA alleles where the peptide-HLA immunogenicity scores or peptide-HLA binding scores for both peptides for an HLA allele are more immunogenic than a given threshold (e.g., 50 nM for binding). In some embodiments, a redundant peptide is a first heteroclitic peptide that has a weighted peptide-HLA immunogenicity score or peptide-HLA binding score that is less immunogenic than the weighted peptide-HLA immunogenicity score or peptide-HLA binding score of a second heteroclitic peptide in the heteroclitic base set, where both the first and second heteroclitic peptides are derived from the same base (or seed) peptide, and where the weighting is determined by the frequency of the HLA allele in a human population, and the weighted scores are computed for HLA alleles where the peptide-HLA immunogenicity scores or peptide-HLA binding scores for both peptides for an HLA allele are more immunogenic that a given threshold (e.g., 50 nM for binding).

[0129] In some embodiments, the next step involves scoring the heteroclitic base set (the second peptide set) and filtering the resulting scores to create a second peptide set by comparing the peptide-HLA immunogenicity scores or peptide-HLA binding scores of the peptides for one or more HLA alleles to a threshold. In some embodiments, an affinity criterion of about 50 nM is used to increase the probability that a vaccine peptide will be found and displayed by HLA molecules. In some embodiments, the affinity criteria is more constrained than 50 nM (i.e., <50 nM). In some embodiments, the affinity criteria is more constrained than about 500 nM (i.e., <500 nM). In some embodiments, individual peptide-HLA binding scores or immunogenicity metrics are determined and thus a peptide may be retained as long as it meets the criteria for at least one HLA allele, and only peptide-HLA scores that meet the criteria are considered for vaccine design.

[0130] In some embodiments, probabilistic thresholds are used in the peptide scoring and score filtering steps (FIGS. 1-2) to filter peptide-HLA combinations for vaccine design. In some embodiments, a credence function is used to predict the probability of peptide-HLA display or peptide-HLA immunogenicity for each peptide for a desired set of HLA alleles. In some embodiments, a credence function implementation fits the output of a binding prediction algorithm (such the EL or BA output of NetMHCpan4.1 or NetMHCIIpan4.0) to observe held-out binding or immunogenicity data. One implementation of credence functions is described in Dai, Z., & Gifford, D. “Constrained Submodular Optimization for Vaccine Design”. arXiv preprint arXiv: 2206.08336. https://arxiv.org/abs/2206.08336, Version 2, 27 Jan. 2023. Held-out data is experimental data that is not used to train the binding prediction algorithm. In some embodiments, held-out data contains examples of experimentally verified peptide-HLA binding or immunogenicity. In some embodiments, held-out data describes known peptide-HLA binding pairs, and peptides surrounding known binders in these held-out data are used to generate negative examples of binding which is added to the held-out data. The credence function that maps the output of a prediction algorithm to a probability of binding (or immunogenicity) is selected to minimize the difference between the output of the prediction algorithm on peptides examples in the held-out data and the experimentally observed binding (or immunogenicity) in the held-out data. For example, when the held-out data contains an experimentally verified peptide-HLA binding pair, the output of the credence function should assign this peptide-HLA pair a high probability of binding. In some embodiments, this is accomplished by dividing the output of the prediction algorithm into discrete intervals (“bins”) and for each bin choosing a function that maps the output of the prediction algorithm that are contained in that bin into the observed fraction of binding (or immunogenicity) in the held-out experimental data. In some embodiments, the functions for each interval are chosen so that increasing intervals have increasing probabilities of binding (or immunogenicity). In some embodiments, the process of fitting a credence function is repeated on different sets of held-out data, and the difference between the credence functions on each set of held-out data is used to validate the accuracy of the credence function.

[0131] In some embodiments, the first peptide scoring and filtering step uses a credence function to predict the probability of binding (or immunogenicity) for all combinations of candidate peptides and HLA alleles. In some embodiments, the first peptide scoring and filtering step eliminates peptide-HLA combinations that do not bind (or are not immunogenic) stronger than a probability threshold for the respective HLA allele. In some embodiments, the second peptide scoring and filtering step eliminates peptide-HLA combinations where (1) the peptide's corresponding base peptide-HLA combination was eliminated in the first peptide scoring and filtering step, or (2) the peptide-HLA combination does not have a probability greater than a second more stringent probability threshold. In some embodiments, the second peptide scoring and filtering step uses a function to combine the peptide-HLA display (or immunogenicity) probability of a base peptide with the peptide-HLA display (or immunogenicity) probability of its heteroclitic derivative, and the result of the function must be greater than a threshold to keep the peptide-HLA combination for the heteroclitic derivative. In some embodiments, the combination function is multiplication. In some embodiments, the result of the combination function is used as the peptide-HLA metric for that peptide for vaccine design.

[0132] In some embodiments, the next step involves inputting the second peptide set to OptiVax to select a compact set of vaccine peptides that maximizes predicted vaccine performance (Vaccine Performance Optimization; FIGS. 1-2). In some embodiments, predicted vaccine performance is a function of expected peptide-HLA binding affinity (e.g., a function of the distribution of peptide-HLA binding affinities across all peptide-HLA combinations for a given peptide set, or weighted by the occurrence of the HLA alleles in a population or individual). In some embodiments, predicted vaccine performance is the expected population coverage of a vaccine. In some embodiments, predicted vaccine performance is the expected number peptide-HLA hits produced by a vaccine in a population or individual. In some embodiments, predicted vaccine performance requires a minimum expected number of peptide-HLA hits (e.g., 1, 2, 3, 4, 5, 6, 7, 8, or more) produced by a vaccine. In some embodiments, predicted vaccine performance is a function of population coverage and expected number of peptide-HLA hits desired produced by a vaccine. In some embodiments, predicted vaccine performance is a metric that describes the overall immunogenic properties of a vaccine where all of the peptides in the vaccine are scored for peptide-HLA immunogenicity for two or more HLA alleles (e.g., three or more HLA alleles). In some embodiments, predicted vaccine performance excludes immunogenicity contributions by selected HLA alleles above a maximum number of peptide-HLA hits (e.g., 1, 2, 3, 4, 5, 6, 7, 8, or more). In some embodiments, predicted vaccine performance excludes immunogenicity contributions of individual HLA diplotypes above a maximum number of peptide-HLA hits (e.g., 1, 2, 3, 4, 5, 6, 7, 8, or more). In some embodiments, predicted vaccine performance is the fraction of covered HLA alleles, which is the expected fraction of HLA alleles in each individual that have a minimum number of peptides (e.g., 1, 2, 3, 4, 5, 6, 7, 8, or more) with predicted peptide-HLA immunogenicity produced by a vaccine. In some embodiments, predicted vaccine performance is the expected fraction of HLA alleles in a single individual that have a minimum number of peptides (e.g., 1, 2, 3, 4, 5, 6, 7, 8, or more) with predicted peptide-HLA immunogenicity produced by a vaccine.

[0133] In some embodiments, a vaccine is designed by the iterative selection of peptides from the heteroclitic base set (also referred to as Expanded set as shown in FIGS. 1-2) at progressively less stringent criteria for predicted peptide immunogenicity or display. In some embodiments, a peptide is retained if at least one of its peptide-HLA scores is not eliminated by the thresholds employed. In some embodiments, OptiVax is first used to design a vaccine with a desired vaccine performance with specific peptide qualification criteria (e.g., seed HLA-peptide scores from the candidate set must bind to at least one MHC molecule at 500 nM or stronger, and peptide-HLA scores from the expanded set must bind to at least one MHC molecule at 50 nM or stronger). The vaccine that results from this application of OptiVax is then used as the foundation for vaccine augmentation with less stringent criteria (e.g., seed peptide-HLA scores from the candidate set must bind to at least one MHC molecule at 1000 nM or stronger, and peptide HLA-scores from the expanded set must bind to at least one MHC molecule at 100 nM or stronger) to further improve the desired vaccine performance. Methods for vaccine augmentation are described in Liu et al. (2020b), incorporated by reference in its entirety herein. In some embodiments, multiple rounds of vaccine augmentation may be utilized. In some embodiments, the final augmented vaccine is the one selected.

[0134] In some embodiments, selection of peptide sets to meet a desired predicted vaccine performance can be accomplished by computational algorithms other than OptiVax. In some embodiments, integer linear programming or mixed-integer linear programming is employed for selecting peptide sets instead of OptiVax. One example of an integer programming method for peptide set selection is described by Toussaint et al. (2008), incorporated by reference in its entirety herein. An example solver for mixed-integer linear programming is Python-MIP that can be used in conjunction with Toussaint et al. (2008). A second example of methods for vaccine peptide selection is described in “Maximum n-times Coverage for Vaccine Design” by Liu et al. (2021), incorporated by reference in its entirety herein.

[0135] Predicted vaccine performance refers to a metric. Predicted vaccine performance can be expressed as a single numerical value, a plurality of numerical values, any number of non-numerical values, and a combination thereof. The value or values can be expressed in any mathematical or symbolic term and on any scale (e.g., nominal scale, ordinal scale, interval scale, or ratio scale).

[0136] A seed (or base) peptide and all of the modified peptides that are derived from that seed (or base) peptide comprise a single peptide family. In some embodiments, in the component of vaccine performance that is based on peptide-HLA immunogenicity for a given HLA allele, a maximum number of peptides (e.g., 1, 2, 3, 4, 5, 6, 7, 8, or more) that are in the same peptide family are given computational immunogenicity credit for that HLA allele. This limit on peptide family immunogenicity limits the credit caused by many modified versions of the same base peptide. In some embodiments, the methods described herein are included for running OptiVax with an EvalVax objective function that corresponds to a desired metric of predicted vaccine performance. In some embodiments, population coverage means the proportion of a subject population that presents one or more immunogenic peptides that activate T cells responsive to a seed (or base) target peptide. The metric of population coverage is computed using the HLA haplotype frequency in a given population such as a representative human population. In some embodiments, the metric of population coverage is computed using marginal HLA frequencies in a population. Maximizing population coverage means selecting a peptide set (either a base peptide set, a modified peptide set, or a combination of base and modified peptides; e.g., a first peptide set, second peptide set, or third peptide set) that collectively results in the greatest fraction of the population that has at least a minimum number (e.g., 1, 2, 3, 4, 5, 6, 7, 8, or more) of immunogenic peptide-HLA bindings based on proportions of HLA haplotypes in a given population (e.g., representative human population). In some embodiments, this process includes the OptiVax selection of heteroclitic peptides (as described in this disclosure) that activate T cells that respond to their corresponding seed (or base) peptide and the heteroclitic base peptides to improve population coverage. In some embodiments, the seed (or base) target peptides are always included in the final vaccine design. In some embodiments, peptides are only considered as candidates for a vaccine design (e.g., included in a first, second, and/or third peptide set) if they have been observed to be immunogenic in clinical data, animal models, or tissue culture models. In some embodiments, vaccine peptides are selected to be displayed by a peptide specific set of HLA class I or class II alleles, wherein for at least two peptides in a vaccine all of the peptide specific sets of HLA class I or class II alleles are not identical.

[0137] Although heteroclitic peptides are used as exemplary embodiments in this disclosure, any modified peptide could be used in place of a heteroclitic peptide. A modified peptide is a peptide that has one or more amino acid substitutions of a target base/seed peptide. The amino acid substitution could be located at an anchor position or any other non-anchor position.

[0138] In some embodiments, a candidate vaccine peptide (e.g., a base peptide or a modified peptide) is eliminated from vaccine inclusion if it activates T cells that recognize self-peptides (e.g., this can be achieved at the first and/or second round of Peptide Filtering and Sorting as shown in FIGS. 1-2). In some embodiments, a candidate vaccine peptide (e.g., a base peptide or a modified peptide) is computationally eliminated from vaccine inclusion if its outward facing amino acids when bound by an HLA allele are similar to outward facing self-peptide residues that are presented by the same HLA allele, where similarity can be defined by identity or defined similarity metrics such as BLOSUM matrices (BLOSUM matrices are known in the art). In some embodiments, calculation of the percent identity of two nucleic acid or polypeptide sequences, for example, can be performed by aligning the two sequences for optimal comparison purposes (e.g., gaps can be introduced in one or both of a first and a second sequences for optimal alignment and non-identical sequences can be disregarded for comparison purposes). The comparison of sequences and determination of percent identity between two sequences can be accomplished using a mathematical algorithm. In one embodiment, the percent identity between two protein sequences can be determined by aligning the proteins and then computing the percentage of residues that are identical as described in Wang et al. (BMC Bioinformatics 19, 529 (2018).

[0139] Testing a vaccine peptide for its ability to activate T cells that recognize self-peptides can be experimentally accomplished by the vaccination of animal models followed by ELISPOT or other immunogenicity assay or with human tissue protocols. In both cases, models with HLA alleles that present the vaccine peptide are used. In some embodiments, human primary blood mononuclear cells (PBMCs) are stimulated with a vaccine peptide, the T cells are allowed to grow, and then T cell activation with a self-peptide is assayed as described in Tapia-Calle et al. (2019) or other methods as known in the art. In some embodiments, the vaccine peptide is excluded from vaccine inclusion if the T cells are activated by the self-peptide. In some embodiments, computational predictions of the ability of a peptide to activate T cells that also recognize self-peptides can be utilized. These predictions can be based upon the modeling of the outward facing residues from the peptide-HLA complex and their interactions with other peptide residues. In some embodiments, a candidate vaccine peptide (e.g., a base peptide or a modified peptide) is eliminated from vaccine inclusion or experimentally tested for cross-reactivity if it is predicted to activate T cells that also recognize self-peptides based upon the structural similarity of the peptide-MHC complex of the candidate peptide (e.g., a base peptide or a modified peptide) and the peptide-MHC complex of a self-peptide. One method for the prediction of peptide-MHC structure is described by Park et al. (2013).

[0140] In some embodiments, the peptide-HLA binding score or peptide-HLA immunogenicity metric for a candidate heteroclitic vaccine peptide (e.g., a modified peptide) and HLA allele is eliminated from consideration during vaccine design if the candidate heteroclitic vaccine peptide does not activate T cells that recognize its corresponding base/seed target peptide (second round of Peptide Scoring and Score Filtering, FIGS. 1-2) for the given HLA allele. In some embodiments, a heteroclitic vaccine peptide (e.g., a modified peptide) is eliminated from a vaccine design if the candidate heteroclitic vaccine peptide does not activate T cells that recognize its corresponding base/seed target peptide (second round of Peptide Scoring and Score Filtering, FIGS. 1-2) for a given HLA allele. Testing a candidate heteroclitic peptide (e.g., a modified peptide) for its ability to activate T cells that recognize its corresponding seed (or base) target peptide with respect to the same HLA allele can be experimentally accomplished by the vaccination of animal models followed by ELISPOT or other immunogenicity assay or with human tissue protocols. In both cases, models with HLA alleles that present the heteroclitic peptide are used. In some embodiments, human PBMCs are stimulated with the heteroclitic peptide, the T cells are allowed to grow, and then T cell activation with the seed (or base) target peptide is assayed as described in Tapia-Calle et al. (2019) or using other methods known in the art. In some embodiments, computational predictions of the ability of a heteroclitic peptide to activate T cells that also recognize the corresponding seed (or base) target peptide can be utilized. These predictions can be based upon the modeling of the outward facing residues from the peptide-HLA complex and their interactions with other peptide residues. In some embodiments, the structural similarity of the peptide-HLA complex of a heteroclitic peptide and the peptide-HLA complex of the corresponding seed (or base) target is used to qualify heteroclitic peptides for vaccine inclusion or to require experimental immunogenicity testing before vaccine inclusion.

[0141] TCR Interface Divergence (TCRID) is the Least Root Mean Square Deviation of the difference between a first peptide's TCR facing residues' 3D positions and the corresponding residue positions of a second peptide with respect to a specific HLA allele. In some embodiments, other metrics are used for the TCRID instead of Least Root Mean Square Deviation. In some embodiments, other metrics are used for the TCRID that include position deviations in non-TCR facing residues and MHC residues from the specific HLA allele. In some embodiments, TCRID is used to predict if two peptides when displayed by a given HLA allele will activate the same T cell clonotypes. In some embodiments, FlexPepDock (London et al., 2011, incorporated by reference in its entirety herein) or DINC (Antunes et al., 2018, incorporated by reference in its entirety herein) in conjunction with the crystal structures of HLA molecules can be used to compute TCRID metrics for pairs of peptides given an HLA molecule. In some embodiments, TCRID is computed by (1) determining the 3D peptide-HLA structures for two different peptides bound by a specific HLA allele, (2) aligning the HLA alpha helices of the peptide-HLA structures, and (3) computing the Least Root Mean Square Deviation of the difference between the TCR facing residues of the two peptides with respect to the aligned alpha helix reference frame.

[0142] In some embodiments, the second Peptide Scoring and Score Filtering step in FIGS. 1 and 2 will eliminate the peptide-HLA binding or immunogenicity score for a heteroclitic peptide for a specific HLA allele when the HLA specific TCRID between the heteroclitic peptide and its corresponding base (or seed) peptide from which it was derived is over a first TCRID threshold. In some embodiments, the second Peptide Scoring and Score Filtering step in FIGS. 1 and 2 will eliminate all peptide-HLA binding or immunogenicity scores for a heteroclitic peptide when the HLA specific TCRID between the heteroclitic peptide and its corresponding unmutated self-peptide from which it was derived is under a second TCRID threshold. In some embodiments, the first Peptide Scoring and Score Filtering step in FIGS. 1 and 2 will eliminate all peptide-HLA binding or immunogenicity scores for a candidate peptide when the HLA specific TCRID between the peptide and its corresponding unmutated self-peptide is under a third TCRID threshold. In some embodiments, any of the TCRID thresholds are determined by experimentally observing or computationally predicting the cross-reactivity of TCR molecules to peptide-HLA complexes.

[0143] FIG. 3A and FIG. 3B shows predicted population coverage for MHC class I vaccines by vaccine size for HIV using a conservative method (FIG. 3A) and a permissive method (FIG. 3B). FIG. 4 shows predicted population coverage for MHC class II vaccines by vaccine size for HIV.

[0144] OptiVax can be used to design a vaccine to maximize the fraction/proportion of the population whose HLA molecules are predicted to bind to and display at least p peptides from the vaccine. In some embodiments, this prediction (e.g., scoring) includes experimental immunogenicity data to directly predict at least p peptides will be immunogenic. The number p is input to OptiVax, and OptiVax can be run multiple times with varying values for p to obtain a predicted optimal target peptide set for different peptide counts p. Larger values of p will increase the redundancy of a vaccine at the cost of more peptides to achieve a desired population coverage. In some embodiments, it may not be possible to achieve a given population coverage given a specific heteroclitic base set. In some embodiments, the number p is a function of the desired size of a vaccine.

[0145] The methods described herein can be used to design separate vaccine formulations for MHC class I and class II based immunity.

[0146] In some embodiments, this procedure is used to create a vaccine for an individual. In some embodiments, the target peptides present in the individual are determined by sequencing the individual's tumor RNA or DNA, and identifying mutations that produce foreign peptides. One embodiment of this method is described in U.S. Pat. No. 10,738,355, incorporated in its entirety herein. In some embodiments, peptide sequencing methods are used to identify target peptides in the individual. One embodiment of this is described in U.S. Publication No. 2011/0257890. In some embodiments, the target peptides used for the individual's vaccine are selected when a self-peptide, foreign peptide, pathogen peptide or RNA encoding a self-peptide, foreign peptide, or pathogen peptide is observed in a specimen from the individual is present at a predetermined level. The target peptides in the individual are used to construct a vaccine as disclosed herein. For vaccine design, OptiVax is provided a diplotype comprising the HLA type of the individual. In an alternative embodiment, the HLA type of an individual is separated into multiple diplotypes with frequencies that sum to one, where each diplotype comprises one or more HLA alleles from the individual and a notation that the other allele positions should not be evaluated. The use of multiple diplotypes will cause OptiVax's objective function to increase the chance that immunogenic peptides will be displayed by all of the constructed diplotypes. This achieves the objective of maximizing the number of distinct HLA alleles in the individual that exhibit peptide-HLA immunogenicity and thus improves the allelic coverage of the vaccine in the individual.

[0147] FIG. 5 shows the predicted vaccine performance (predicted number of peptide-HLA hits) of ten example G12V MHC class I vaccines for a single individual with the MHC class I HLA diplotype HLA-A02: 03, HLA-A11: 01, HLA-B55: 02, HLA-B58: 01, HLA-C03: 02, and HLA-C03: 03. OptiVax was used to design ten G12V MHC class I vaccines for this HLA diplotype with peptide counts ranging from 1 to 10. For the results in FIG. 5, OptiVax was run with six synthetic diplotypes, each equally weighted, each with one HLA allele from the individual's HLA diplotype, and the other allele positions marked to not be evaluated.

### MHC Class I Vaccine Design Procedure

[0148] In some embodiments, MHC class I vaccine design procedures consist of the following computational steps.

[0149] In some embodiments, the inputs for the computation are:

P_{1...n}: Peptide sequence (length n) containing the neoantigen(s) or pathogenic target(s)
of interest (e.g., KRAS G12D, KRAS G12V, KRAS G12R, KRAS G12C, KRAS G13D). Pᵢ
denotes the amino acid at position i.
t: Position of target mutation in P, t ∈ [1, ... n] (e.g., t = 12 for KRAS G12D).
s: Substitution mutations ∈ [true, false] is true if the mutation is a substitution, and
false if the mutation is a deletion or insertion or the peptide does not contain a
mutation (such as in pathogen targets). When the mutation is a deletion or insertion
then t indicates the position immediately before the deletion or insertion.
τ₁: Threshold for potential presentation of peptides by MHC for peptide-MHC scoring
(e.g., 500 nM binding affinity)
τ₂: Threshold for predicted display of peptides by MHC for peptide-MHC scoring (e.g.,
50 nM binding affinity) [symbol]
: Set of HLA alleles (for HLA-A, HLA-B, HLA-C loci)
F: [symbol] ³ → [symbol] : Population haplotype frequencies (for OptiVax optimization and coverage
evaluation).
N: Parameter for EvalVax and OptiVax objective function. Specifies minimum number
of predicted per-individual hits for population coverage objective to consider the
individual covered. Default = 1 (computes P(n ≥ 1) population coverage).

[0150] In some embodiments, Peptide-HLA Scoring Functions used are:

ScorePotential : P × [symbol] → [symbol] : Scoring function mapping a (peptide, HLA allele) pair to a
prediction of peptide-HLA display. If predicted affinity ≤ τ₁, then returns 1, else returns
0. Options include MHCflurry, NetMHCpan, PUFFIN, ensembles, or alternative metrics
or software may be used, including models calibrated against immunogenicity data.
SCOREDISPLAY : P × [symbol] → [symbol] : Scoring function mapping a (peptide, HLA allele) pair to a
prediction of peptide-HLA display. If predicted affinity ≤ τ₂, then returns 1, else returns
0. Options include MHCflurry, NetMHCpan, PUFFIN, ensembles, or alternative metrics
or software may be used, including models calibrated against immunogenicity data.

[0151] Next, from the seed protein sequence (P), a set [symbol] of windowed native peptides spanning the protein sequence(s) is constructed. P_{j . . . j+(k-1)} only produces set members when the subscripts are within the range of the defined seed protein P. In some embodiments, 8-mers, 9-mers, 10-mers, and 11-mers are produced, but this process can be performed with any desired window lengths and the resulting peptide sets combined. In some embodiments, only 9-mers are produced.

$$𝒫 = {⋃}_{k ∈ [ 8 , … , 11 ]} {𝒫}_{k}$$

$${𝒫}_{k} = \{ {P}_{j … j + ( k - 1 )} \vert j ∈ [ t - ( k - 1 ) , … , t ] , if s then j \neq \{ t - ( k - 1 ) , t - 1 \} \}$$

[0152] The second condition j≠{t−(k−1), t−1} excludes peptides where the mutation at t is in positions P2 or Pk of the windowed k-mer peptide (i.e., the anchor positions) and the mutation is a substitution.

MHC Class I Vaccine Design Procedure with Defined Peptide Set

[symbol]

[0153] Next, each peptide sequence in [symbol] is scored against all HLA alleles in [symbol] for potential presentation using SCOREPOTENTIAL (with threshold τ₁=500 nM) and store results in a | [symbol] |×| [symbol] | matrix S:

S[p,h]=SCOREPOTENTIAL(p,h)∀p∈ [symbol] ,h∈

[symbol]

Note that S is a binary matrix where 1 indicates the HLA is predicted to potentially present the peptide, and 0 indicates no potential presentation.
Define Base Set of Peptides B⊆ [symbol] :

$$B = \{ p ∈ 𝒫 \vert ∃ h s . t . S [ p , h ] = 1 \}$$

Thus, B contains the native peptides that are predicted to be potentially presented by at least 1 HLA.
Create a Set of all Heteroclitic Peptides B′ Stemming from Peptides in B:

$${B}^{′} = {⋃}_{b ∈ B} ANCHOR - MODIFIED ( b )$$

where ANCHOR-MODIFIED(b) returns a set of all 399 anchor-modified peptides stemming from b (with all possible modifications to the amino acids at P2 and P9).

[0154] Next, all heteroclitic candidate peptides (e.g., modified peptides) in B′ are scored against all HLA alleles in [symbol] for predicted display using SCOREDISPLAY (with threshold 12=50 nM), and store results in binary |B|×| [symbol] | matrix S₁′:

S₁′[b′,h]=SCOREDISPLAY(b′,h)∀b′∈B′,h∈

[symbol]

[0155] Next, an updated scoring matrix S₂′ is computed for heteroclitic peptides conditioned on the potential presentation of the corresponding base peptides by each HLA:

$${S}_{2}^{′} [ {b}^{′} , h ] = \{ \begin{matrix}{S}_{1}^{′} [ {b}^{′} , h ] , & if S [ b , h ] = 1 \\ 0 , & otherwise\end{matrix} ∀ {b}^{′} ∈ {B}^{′} , h ∈ ℋ$$

where each heteroclitic peptide b′∈B′ is a mutation of base peptide b∈B. This condition enforces that if h was not predicted to potentially present b, then all heteroclitic peptides b′ derived from b will not be displayed by h (even if h would otherwise be predicted to display b′).

[0156] In some embodiments, OptiVax-Robust is used to design a final peptide set (e.g., third peptide set) from the union of base peptides and heteroclitic peptides B∪B′ (with corresponding scoring matrices S and S₂′ for B and B′, respectively). OptiVax will output m sets [symbol] ₛ for s∈[1, . . . , m] where m is the largest vaccine size requested from OptiVax. Let [symbol] ₖ denote the compact set of vaccine peptides output by OptiVax containing k peptides. Note that [symbol] ₖ₊₁ is not necessarily a superset of [symbol] ₖ. In alternate embodiments, OptiVax can be used to augment the base set B with peptides from B′ using scoring matrix S₂′ to have OptiVax return set [symbol] k, and the final vaccine set [symbol] _{k+|B|} consists of peptides B∪ [symbol] ₖ.

[0157] In some embodiments, this procedure is repeated independently for each target of interest, and the resulting independent vaccine sets can be merged into a combined vaccine as described below.

### MHC Class II Vaccine Design Procedure

[0158] In some embodiments, MHC class II vaccine design procedures consist of the following computational steps.

[0159] In some embodiments, the inputs for the computation are:

P_{1...n}: Peptide sequence(s) (length n) containing the neoantigen(s) or pathogenic
target(s) of interest (e.g., KRAS G12D, KRAS G12V, KRAS G12R, KRAS G12C, KRAS
G13D). Pᵢ denotes the amino acid at position i.
t: Position of target mutation in P, t ∈ [1,...,n] (e.g., t = 12 for KRAS G12D).
s: Substitution mutation s ∈ [true, false] is true if the mutation is a substitution, and
false if the mutation is a deletion or insertion or the peptide does not contain a
mutation (such as for pathogen targets). When the mutation is a deletion or insertion
then t indicates the position immediately before the deletion or insertion.
τ₁: Threshold for potential presentation of peptides by MHC for peptide-MHC scoring
(e.g., 500 nM binding affinity)
τ₂: Threshold for predicted display of peptides by MHC for peptide-MHC scoring (e.g.,
50 nM binding affinity) [symbol]
: Set of HLA alleles (for HLA-DR, HLA-DQ, HLA-DP loci)
F: [symbol] ³ → [symbol] : Population haplotype frequencies (for OptiVax optimization and coverage
evaluation).
N: Parameter for EvalVax and OptiVax objective function. Specifies minimum number
of predicted per-individual hits for population coverage objective to consider the
individual covered. Default = 1 (computes P(n ≥ 1) population coverage).

[0160] In some embodiments. Peptide-HLA Scoring Functions used are:

SCOREPOTENTIAL : P × [symbol] → [symbol] : Scoring function mapping a (peptide, HLA allele) pair to
a prediction of display. If predicted affinity ≤ τ₁, then returns 1, else returns 0. Options
include NetMHCIIpan, PUFFIN, ensembles, or alternative metrics or software may be
used, including models calibrated against immunogenicity data.
SCOREDISPLAY : P × [symbol] → [symbol] : Scoring function mapping a (peptide, HLA allele) pair to a
prediction of peptide-HLA display. If predicted affinity ≤ τ₂, then returns 1, else
returns 0. Options include NetMHCIIpan, PUFFIN, ensembles, or alternative metrics or
software may be used, including models calibrated against immunogenicity data.
FindCore : P × [symbol] → [1,...,n]: Function mapping a (peptide, HLA allele) pair to a
prediction of the 9-mer binding core. The core may be specified as the offset position
(index) into the peptide where the core begins.

[0161] Next, from the seed protein sequence (P), a set [symbol] of peptides spanning the protein sequence are constructed. P_{j . . . j+(k-1)} only produces set members when the subscripts are within the range of the defined seed protein P. Here, we extract all windowed peptides of length 13-25 spanning the target mutation, but this process can be performed using any desired window lengths (e.g., only 15-mers).

$$𝒫 = {⋃}_{k ∈ [ 13 , … , 25 ]} {𝒫}_{k}$$

$${𝒫}_{k} = \{ {P}_{j … j + ( k - 1 )} \vert j ∈ [ t - ( k - 1 ) , … , t ] \}$$

[0162] where [symbol] ₖ contains all sliding windows of length k, which are combined to form [symbol] . Note that here (unlike MHC class I), no peptides are excluded based on binding core or anchor residue positions (for MHC class II, filtering is performed as described in this disclosure).

MHC Class II Vaccine Design Procedure with Defined Peptide Set

[symbol]

[0163] Next, each peptide sequence in [symbol] is scored against all HLA alleles in [symbol] for potential presentation using SCOREPOTENTIAL (with threshold τ₁=500 nM) and store results in a | [symbol] |×| [symbol] | matrix S₁:

S₁[p,h]=SCOREPOTENTIAL(p,h)∀p∈ [symbol] ,h∈

[symbol]

Note that S₁ is a binary matrix where 1 indicates the HLA is predicted to potentially present the peptide, and 0 indicates no potential presentation.

[0164] For each (peptide, HLA allele) pair (p, h), identify/predict the 9-mer binding core using FINDCORE. The predicted binding core is recorded in a matrix C:

C[p,h]=FINDCORE(p,h)∀p∈ [symbol] ,h∈

[symbol]

[0165] Next, if not(s) then S₂[p, h]=S₁[p, h] otherwise an updated scoring matrix S₂ is computed for native peptides in [symbol] :

$${S}_{2} [ p , h ] = \{ \begin{matrix}{S}_{1} [ p , h ] , & if C [ p , h ] specifies {P}_{t} at a non - anchor position inside core \\ 0 , & otherwise\end{matrix} ∀ p ∈ 𝒫 , h ∈ ℋ$$

where Pₜ is the target residue of interest (e.g., the mutation site of KRAS G12D). This condition enforces the target residue to fall within the binding core at a non-anchor position for all (peptide, HLA allele) pairs with non-zero scores in S₂ and allows the binding core to vary by allele per peptide (as the binding cores of a particular peptide may differ based on the HLA allele presenting the peptide). Thus, for each pair (p, h), if the predicted binding core C[p, h] specifies the target residue Pₜ at an anchor position (P1, P4, P6, or P9 of the 9-mer core), or if Pₜ is not contained within the binding core, then S₂[p, h]=0. In an alternate embodiment, Pₜ can be located outside of the core or inside the core in a non-anchor position. In some embodiments, Pₜ can only be located at specific positions inside and/or outside of the core. In some embodiments, the binding core predictions in C are accompanied by prediction confidences. In some embodiments, if the confidence for predicted core C[p, h] is below a desired threshold (e.g., 0.5, 0.6, 0.7, 0.8, or 0.9), then S₂[p, h]=0.

[0166] Next, OptiVax-Robust is run with peptides [symbol] and scoring matrix S₂ to identify a non-redundant base set of peptides B⊆ [symbol] . (In alternate embodiments, B can be chosen as the entire set P rather than identifying a non-redundant base set.)

[0167] Next, a set of all heteroclitic peptides B′ is created stemming from peptides in B:

$${B}^{′} = {⋃}_{b ∈ ⋃ B} \{ ANCHOR - MODIFIED ( b , c ) ∀ c \vert ∃ h s . t . {S}_{2} [ b , h ] = 1 \}$$

where ANCHOR-MODIFIED(b,c) returns a set of all 20⁴-1 anchor-modified peptides stemming from b with all possible modifications to the amino acids at P1, P4, P6, and P9 of the 9-mer binding core c. Thus, for each base peptide b, the heteroclitic set B′ contains all anchor-modified peptides b′ with modifications to all unique cores of b identified for any HLA alleles that potentially present b with a valid core position as indicated by scoring matrix S₂.

[0168] Next, all heteroclitic candidate peptides (e.g., modified peptides) in B′ are scored against all HLA alleles in [symbol] for predicted display using SCOREDISPLAY (with threshold τ₂=50 nM), and store results in binary |B′|×| [symbol] | matrix S₁′:

S₁′[b′,h]=Score Display(b′,h)∀b′∈B′,h∈

[symbol]

[0169] For each (heteroclitic peptide, HLA allele) pair (b′,h), identify/predict the 9-mer binding core using FINDCORE. The predicted binding core is recorded in a matrix C′:

C′[b′,h]=FINDCORE(b′,h)∀b′∈B′,h∈

[symbol]

[0170] An updated scoring matrix S₂′ is computed for heteroclitic peptides conditioned on the identified binding cores of a heteroclitic and base peptides occurring at the same offset by a particular HLA:

$${S}_{2}^{′} [ {b}^{′} , h ] = \{ \begin{matrix}{S}_{1}^{′} [ {b}^{′} , h ] , & if {C}^{′} [ {b}^{′} , h ] = C [ b , h ] \\ 0 , & otherwise\end{matrix} ∀ {b}^{′} ∈ {B}^{′} , h ∈ ℋ$$

where each heteroclitic peptide b′∈B′ is a mutation of base peptide b∈B. This condition enforces the binding core of the heteroclitic peptide b′ to be at the same relative position as the base peptide b, and, implicitly, enforces that the target residue Pₜ still falls in a non-anchor position within the 9-mer binding core (Step 3).

[0171] An updated scoring matrix S₃′ is computed for heteroclitic peptides conditioned on the potential presentation of the corresponding base peptides by each HLA:

$${S}_{3}^{′} [ {b}^{′} , h ] = \{ \begin{matrix}{S}_{2}^{′} [ {b}^{′} , h ] , & if S [ b , h ] = 1 \\ 0 , & otherwise\end{matrix} ∀ {b}^{′} ∈ {B}^{′} , h ∈ ℋ$$

where each heteroclitic peptide b′∈B′ is a mutation of base peptide b∈B. This condition enforces that if h was not predicted to display b, then all heteroclitic peptides b′ derived from b will not be displayed by h (even if h would otherwise be predicted to display b′).

[0172] OptiVax-Robust is used to design a final peptide set (e.g., third peptide set) from the union of base peptides and heteroclitic peptides B∪B′ (with corresponding scoring matrices S₂ and S₃′ for B and B′, respectively). OptiVax will output m sets [symbol] ₛ for s∈[1, . . . , m] where m is the largest vaccine size requested from OptiVax. Let [symbol] ₖ denote the compact set of vaccine peptides output by OptiVax containing k peptides. Note that [symbol] ₖ₊₁ is not necessarily a superset of [symbol] ₖ. (In alternate embodiments, OptiVax can be used to augment the base set B with peptides from B′ using scoring matrix S₂′ to have Opti Vax return set [symbol] ₖ, and the final vaccine set [symbol] _{k+|B|} consists of peptides B∪ [symbol] ₖ.)

[0173] In some embodiments, this procedure is repeated independently for each single target of interest, and the resulting independent vaccine sets can be merged into a combined vaccine as described below.

### MHC Class I or Class II Vaccine Design Method Prioritizing Peptide Conservation

[0174] In some embodiments, peptide sequences that are more conserved across strains, species, or other protein sources of interest are prioritized for vaccine inclusion. In some embodiments, a set of related protein sequences called protein variants are considered for vaccine design. A protein variant is one instance of a family of protein sequences, and protein variants can be sequences from various species, pathogen strains (e.g. viral strains), or other variations considered for vaccine design. In some embodiments, each considered protein variant has an associated probability called a protein variant probability, where the sum of all protein variant probabilities for the supplied set of protein variants is one. In some embodiments, multiple proteins of interest can be considered for the design of a single vaccine using an MHC Class I or Class II vaccine design method prioritizing peptide conservation. In these embodiments, protein variants for all proteins of interest are collectively considered for generating candidate peptides. In some embodiments, the protein variant probabilities across all of the considered multiple proteins sum to one. The HIV compositions described herein prioritized peptide conservation across HIV variants found in SwissProt and the Los Alamos National Laboratory HIV Sequence Database. The methods disclosed herein can be used to design an immunogenic composition, such as a vaccine, based on any protein variant, including variants that have yet to be discovered or future emerging variants (e.g., new virus species or strains).

[0175] A set of candidate peptides are created from each protein variant using a sliding window method that parses the protein variant into peptide sequences. In some embodiments, for MHC Class I 8-mers, 9-mers, 10-mers, and/or 11-mers are produced, but this process can be performed with any desired window lengths and the resulting peptide sets combined. In some embodiments, for MHC Class I, only 9-mers are produced. In some embodiments, for MHC Class II, all windowed peptides of length 13-25 are produced, but this process can be performed using any desired window lengths (e.g., only 15-mers). In some embodiments, peptides that are predicted to be glycosylated in a given protein variant are removed and not considered for that variant as described in Liu et al. (2020a), which is incorporated by reference herein in its entirety.

[0176] In some embodiments, for each generated peptide sequence (MHC Class I or Class II) conservation is defined as the fraction of input protein variants where the peptide sequence occurs. For example, if a given 9-mer peptide sequence occurs in the peptides generated from 90% of the protein variants provided as input, its conservation is 0.90. In some embodiments, conservation is defined for each generated peptide sequence (MHC Class I or Class II) as the sum of the protein variant frequencies where the peptide sequence occurs. For example, if a given 9-mer peptide sequence occurs in the peptides generated from protein variants with protein variant probabilities of 0.10 and 0.20, its conservation is 0.30. In some embodiments, this functionality is implemented by a ComputeConservation function that computes the sum of the frequencies of the protein variants that contain a peptide sequence. In some embodiments, when sufficient protein variants are not sufficient for computing expected future conservation a method of predicting conservation can be used to implement ComputeConservation, such as the one disclosed in Hie et al. (2021), which is incorporated by reference herein in its entirety.

[0177] In some embodiments, vaccine design considers conservation by prioritizing peptides for vaccine inclusion that are more conserved than others to meet a desired vaccine performance metric. In some embodiments, the vaccine design method attempts to first design a vaccine with candidate peptides that all meet a first conservation threshold, and if the desired vaccine performance is not met, it iteratively adds additional peptides with less stringent conservation to attempt to meet the desired vaccine performance metric. In some embodiments, vaccine design prioritizing conservation proceeds by setting a vaccine design D to be an empty set, and then performing the steps of: (1) selecting candidate peptides in which each peptide passes a conservation threshold to create a candidate peptide set and is not in D, (2) selecting vaccine designs having varying peptide numbers/combinations from this candidate set to optimize a vaccine performance metric using methods disclosed herein for MHC Class I or Class II vaccine design to augment the vaccine design contained in D (one implementation of vaccine augmentation is described in (Liu et al., 2021), incorporated by reference in its entirety herein), (3) selecting the smallest vaccine peptide set design from Step 2 that either meets the desired vaccine performance metric or where adding one more peptide to the selected set does not provide a desired minimum improvement in the vaccine performance metric, (4) if a vaccine peptide set was found in Step 3, adding the vaccine peptide set design from Step 3 to the vaccine design D, and (5) determining whether the vaccine design D meets a desired vaccine performance metric objective, and if so, return vaccine design D as the final vaccine design. If at Step 6, the vaccine design D fails to meet the desired vaccine performance metric objective, the computation continues with the following steps: (6) setting an updated conservation threshold to be lower than the current conservation threshold (less constrained) and (7) repeating the process starting at Step 1 retaining the current vaccine design D and current candidate set until either a desired vaccine performance metric objective is reached at Step 5, or the updated conservation threshold is lower than a minimum desired conservation threshold at Step 6. If on any iteration, the updated conservation threshold is lower than a minimum desired conservation threshold, the latest version of vaccine design D will be used as the final vaccine design. When the process completes, the final vaccine design D includes all of the peptides that can be used in a vaccine.

[0178] In some embodiments, MHC class I or class II vaccine design procedures consist of the following computational steps.

[0179] In some embodiments, the inputs for the computation are:

| | |
|---|---|
| • | P_{j,1...nj}: Peptide sequence of protein variant j of length nⱼ. P_{j,i} denotes the amino acid at |
| | position i of protein variant j, where j ∈ [1, ... α] and a is the number of protein variants |
| • | Oⱼ: Protein variant probability of protein variant Pⱼ |
| • | tⱼ: Position in protein variant Pⱼ of the target mutation t ∈ [1, ... n] |
| • | D: The vaccine design, initialized to the empty set ø |
| • | s: Substitution mutation s ∈ [true, false] is true if the mutation is a substitution, and |
| | false if the mutation is a deletion or insertion or the peptide does not contain a |
| | mutation. When the mutation is a deletion or insertion then t indicates the position |
| | immediately before the deletion or insertion. |
| • | c₁: Initial conservation level of peptides |
| • | c_{c}: Current conservation threshold |
| • | c₂: Change in conservation level on each iteration |
| • | cₘ: Minimum final conservation |
| • | v: Target vaccine performance metric |
| • | v_{d}: Minimum change in vaccine performance metric to increase vaccine size |
| • | N: Parameter for EvalVax and OptiVax objective function. Specifies minimum number |
| | of predicted per-individual hits for population coverage objective to consider the |
| | individual covered. Default = 1 (computes P(n ≥ 1) population coverage). |
| • | COMPUTECONSERAVTION : S × X × O → [symbol] : In some embodiments, computes the fraction |
| | of sets Xⱼ that contain sequence S. In some embodiments, sums all the Oⱼ where |
| | sequence S appears in Xⱼ |

[0180] The protein variant sequences Pⱼ are used to produce windowed peptides that span the protein sequence(s) starting at each location m with a peptide length of k residues. The result is the set Xⱼ that contains all of the peptide sequences in protein variant Pⱼ. P_{j.m+(k-1)} only produces a sequence when the subscripts are within the range of the defined protein Pⱼ. In some embodiments for MHC Class I, k is chosen to produce 8-mers, 9-mers, 10-mers, and 11-mers, but this process can be performed with any desired window lengths and the resulting peptide sets combined. In some embodiments for MHC Class I, only 9-mers are produced. In some embodiments for MHC Class II, we extract all windowed peptides of length 13-25, but this process can be performed using any desired window lengths (e.g., only 15-mers).

$${X}_{j} = {{⋃}_{t ∈ [ 1 … {n}_{j} ]}}_{k ∈ [ \begin{matrix}8 - 11 MHC Class I \\ 13 - 25 MHC Class II\end{matrix} ]} \{ \begin{matrix}{P}_{j , m…m + ( k - 1 )} \vert m ∈ [ t - ( k - 1 ) , … , t ] , \\ if s and MHC Class I then \\ m \neq \{ t - ( k - 1 ) , t - 1 \}\end{matrix} \}$$

[0181] In some embodiments for MHC Class I, the second condition m≠{t−(k−1), t−1} excludes peptides where the mutation at t is in positions P2 or Pk of the windowed k-mer peptide (i.e., the anchor positions) and the mutation is a substitution and if for MHC Class I design. MHC Class II anchor positions are filtered in the MHC Class II design method.

[0182] In some embodiments, the methods disclosed herein are used to create the set of all peptides B that occur in any input protein variant.

$$B = {⋃}_{j ∈ [ 1 , … a ]} {X}_{j}$$

$$z = \vert B \vert$$

[0183] In some embodiments, for each peptide B_{w} in B its conservation metric C_{w} is computed using COMPUTECONSERVATION

C_{w}=COMPUTECONSERVATION[B_{w},X,O]

[0184] In some embodiments, the current conservation threshold is then set to the initial conservation threshold

c_{c}=c₁

[0185] In some embodiments, at Step 1, candidate peptides are selected where each peptide passes a conservation threshold to create a candidate peptide set and is not in D. A set of peptide candidates [symbol] is defined such that each candidate peptide meets the current conservation threshold c_{c} and the peptide candidate is not already in D. D is set to empty (0 peptides) on the first iteration of the computational steps.

$$𝒫 = {⋃}_{w ∈ [ 1 , … , z ]} {B}_{w} where {C}_{w} \geq {c}_{c} and {B}_{w} ∉ D$$

[0186] In some embodiments, at Step 2, vaccine designs are selected having varying peptide numbers/combinations from the candidate set to optimize a vaccine performance metric using methods disclosed herein for MHC Class I or Class II vaccine design to augment the vaccine design contained in D. The peptide set [symbol] is provided to “MHC Class I Vaccine Design Procedure with Defined Peptide Set [symbol] ” for MHC Class I and “MHC Class II Vaccine Design Procedure with Defined Peptide Set [symbol] ” for MHC Class II. The peptide set [symbol] is provided as the set of candidates to augment the set D. Both the set [symbol] and D are provided to OptiVax which uses D as the fixed starting set and augments D with peptides from the set [symbol] using vaccine augmentation as described in (Liu et al., 2021), incorporated by reference in its entirety herein. OptiVax-Robust is used to augment the set D with peptides from [symbol] using the scoring matrices as defined in “MHC Class I Vaccine Design Procedure with Defined Peptide Set [symbol] ” for MHC Class I and “MHC Class II Vaccine Design Procedure with Defined Peptide Set [symbol] ” for MHC Class II, and returns sets [symbol] ₛ where each set [symbol] ₛ is a compact set of vaccine peptides output by OptiVax containing s peptides. In some embodiments, the steps to modify anchor positions are not utilized in the MHC Class I or MHC Class II vaccine design methods and only the base peptides B are utilized for vaccine design. In some embodiments, positions in addition to anchor positions are modified in the MHC Class I or MHC Class II vaccine design methods utilized to create B′.

[0187] In some embodiments, at Step 3, the smallest vaccine peptide set design is selected from Step 2 that either meets the desired vaccine performance metric or where adding one more peptide to the selected set does not provide a desired minimum improvement in the vaccine performance metric. A vaccine design [symbol] ₛ is chosen that meets minimum requirements. In some embodiments, the vaccine design [symbol] ₛ is chosen with the value s chosen to be the minimum value of s such that the difference in vaccine performance between D∪ [symbol] ₛ and D∪ [symbol] ₛ₊₁ is less than v_{d}. In some embodiments, the value s is chosen to be the minimum value such that the vaccine performance metric of D∪ [symbol] ₛ meets the final vaccine performance metric v. In some embodiments, [symbol] ₛ₊₁ is not necessarily a superset of [symbol] ₛ.

[0188] In some embodiments, at Step 4, if a vaccine peptide set was found in Step 3, it is added to the vaccine peptide set design D. If an acceptable vaccine design [symbol] ₛ was found in Step 4, the vaccine design set D is updated to consist of D∪ [symbol] ₛ.

[0189] In some embodiments, at Step 5, it is determined whether the vaccine design D meets a desired vaccine performance metric objective. If the vaccine design set D meets the final vaccine performance design metric v, return D as the final design.

[0190] In some embodiments, at Step 6, the conservation threshold is updated to be lower than the current conservation threshold (less constrained). If the vaccine design set D does not meet the final vaccine performance design metric v, reduce c_{c}

$${c}_{c} = {c}_{c} - {c}_{2}$$

[0191] In some embodiments, at Step 7, the process is repeated starting at Step 1 retaining the current vaccine design D and current candidate set until either a desired vaccine performance metric objective is reached at Step 5, or the updated conservation threshold at Step 6 is lower than a minimum desired conservation threshold. If c_{c}<cₘ then return set D is returned as the final vaccine design. If not, the method returns to Step 1 and repeats all subsequent steps.

[0192] In some embodiments, this procedure is repeated independently for each pathogen gene variant or target variant of interest, and the resulting independent vaccine sets can be merged into a combined vaccine. In some embodiments, this procedure is repeated independently for each single HIV protein target of interest, and the resulting independent vaccine sets can be merged into a combined vaccine.

### Methods for Combining Multiple Vaccines

[0193] The above described methods will produce an optimized target peptide set (e.g., third peptide set) for one or more individual targets. In some embodiments, a method is provided for designing separate vaccines for MHC class I and class II based immunity for multiple targets (e.g., two or more targets such as KRAS G12D and KRAS G12V).

[0194] In some embodiments, a method is disclosed for producing a combined peptide vaccine for multiple targets by using a table of presentations for a disease that is based upon empirical data from sources such as the Cancer Genome Atlas (TCGA). In some embodiments, a method is disclosed for producing a combined peptide vaccine for multiple strains of a pathogen (e.g., HIV) that is based upon empirical data of strain prevalence where prevalence is used to represent the probability of the presentation of a given strain. In some embodiments, for a given strain presentation the probabilities of each pathogen protein target are identical and sum to one. In some embodiments, for a given strain presentation the probabilities of each pathogen protein target are vary based upon the observed or predicted immunogenicity of each protein (e.g., based upon the expression of the pathogen protein or its processing).

[0195] FIG. 6 shows one embodiment for factoring disease presentation type probabilities (e.g., pancreatic cancer, colorectal cancer, and skin cancer) by probability, for each disease presentation, of target presented for various mutation targets (e.g., KRAS G12D, KRAS G12V, and KRAS G12R). A presentation is a unique set of targets that are presented by one form of a disease (e.g., distinct type of cancer or cancer indication as shown in FIG. 6). For each presentation, FIG. 6 shows an example of the probability of that presentation, and the probability that a given target is observed. For a given presentation, there can be one or more targets, each having a probability. In some embodiments, the method for multi-target vaccine design will allocate peptide resources for inducing disease immunity based on the presentation and respective target probabilities as shown in FIG. 6, for example. In some embodiments, presentations correspond to the prevalence of targets in different human populations or different risk groups. The probability of a target in a population is computed by summing for each possible presentation the probability of that presentation times the probability of the target in that presentation. FIG. 6 shows weights used for merging individual vaccines for each target (row) into combined vaccines for each disease indication (column). Values indicate the observed fraction of cases containing each target mutation. Data are from The Cancer Genome Atlas (TCGA). For each disease indication, TCGA data are filtered to cases where the Primary Site is the indication.

[0196] In some embodiments, presentations are used to represent different strains of pathogens, where the probability of a presentation is based upon the prevalence of a given pathogen strain. In some embodiments, for a given strain presentation the probabilities of each pathogen protein target are identical and sum to one. In some embodiments, for a given strain presentation the probabilities of each pathogen protein target vary based upon the observed or predicted immunogenicity of each pathogen protein (e.g., based upon the expression of the pathogen protein or its processing). In some embodiments, presentation probabilities are used to create a combined vaccine for more than one pathogen strain, where vaccines for each individual strain are combined using the prevalence probabilities of each strain. In some embodiments, the immunogenic importance of each pathogen protein is considered by assigning different presentation probabilities to different pathogen proteins that are used as vaccine targets, and the resulting target specific vaccines are combined using these probabilities.

[0197] In some embodiments, the same vaccine design will be generated for mutations to different proteins when the base peptides generated by the mutations to the different proteins are identical. For example, in some embodiments of base peptide selection the following mutations have identical vaccine designs because they share the same set of base peptides: HRAS Q61K, NRAS Q61K, and KRAS Q61K; HRAS Q61L, NRAS Q61L, and KRAS Q61L; HRAS Q61R, NRAS Q61R, and KRAS Q61R. Referring to FIG. 6, in some embodiments when two mutations have identical individual vaccine designs their presentation specific probabilities are added when weighting the individual vaccine design for inclusion in a combined vaccine as described below (e.g., for Thyroid Cancer NRAS Q61R and HRAS Q61R).

[0198] Referring to FIG. 7, in some embodiments, the method first includes designing an individual peptide vaccine for each target to create a combined vaccine design for multiple targets. This initially results in sets of target-specific vaccine designs. In some embodiments, the marginal predicted vaccine performance of each target-specific vaccine at size k is defined by predicted vaccine performance at size k minus the predicted vaccine performance of the vaccine at size k minus one (see FIGS. 3-11). The composition of a vaccine may change as the number of peptides used in the vaccine increases, and thus for computing contributions to a combined vaccine the marginal predicted vaccine performance of each target-specific vaccine is used instead of a specific set of peptides.

[0199] In some embodiments, the weighted marginal predicted vaccine performance of a target-specific vaccine design for each target specific vaccine size is computed as shown in FIG. 7. For a given target specific vaccine size, its weighted predicted vaccine performance is computed by multiplying its predicted vaccine performance times the probability of the target in the population (e.g., by using values as shown in FIG. 6). The marginal weighted predicted vaccine performance for a target specific vaccine is its weighted coverage at size k minus its coverage a size k minus one (e.g., see FIGS. 3-4). The marginal weighted predicted vaccine performance of a target specific vaccine of size one is its weighted predicted vaccine performance. The marginal weighted predicted vaccine performances for all vaccines are combined into a single list, and the combined list is sorted from largest to least by the weighted marginal predicted vaccine performances of the target specific vaccines as shown in FIG. 7. The combined vaccine of size n is then determined by the first n elements of this list. The peptides for the combined vaccine are determined by the individual peptide target vaccines whose sizes add to n and whose weighted predicted vaccine performances sums to the same sum as the first n elements of the sorted list. This maximizes the predicted vaccine performance of the combined vaccine of size n.

[0200] In some embodiments, the combined multiple target vaccine can be designed on its overall predicted coverage for the disease described depending on the presentation table used (e.g., see FIG. 6), by its predicted coverage for a specific indication, and/or by its predicted coverage for a specific target by adjusting the weighting used for predicted vaccine performance accordingly. Once a desired level of coverage is selected, the peptides of the combined vaccine are determined by the contributions of target-specific designs. For example, if the combined vaccine includes a target-specific vaccine of size k, then the vaccine peptides for this target at size k are used in the combined vaccine.

[0201] As an example of one embodiment, FIG. 6 shows mutations (e.g., KRAS G12D, G12V, and G12R) and their respective probabilities of occurring in an individual with different cancer indications (e.g., pancreatic cancer). The marginal population coverage of each target-specific vaccine at a given vaccine size is the improvement in coverage at that size and the size minus one. The coverage with no peptides is zero. The marginal coverage of each target-specific vaccine is multiplied by the probability of the target in the population as determined by the proportions as shown in FIG. 6 for a selected indication (e.g., pancreatic cancer). These weighted marginal coverages of all target-specific vaccines are sorted to determine the best target-specific compositions, and the resulting list describes the composition of a combined vaccine for the selected indication at each size k by taking the first k elements of the list. At each combined vaccine size, different components of the target-specific vaccines are utilized for the indication illustrated.

### Combined Vaccine Design Procedure

[0202] In some embodiments, the procedure described herein is used to combine individual compact vaccines optimized for different targets into a single optimized combined vaccine.

[0203] In some embodiments, the computational inputs for the procedure are:

[symbol]

: Set of neoantigen or pathogenic targets of interest (e.g., KRAS G12D, KRAS G12V,
KRAS G12R) [symbol]
: Vaccine sets optimized individually for each target. Let [symbol] _{t,k} denote the optimal
vaccine set of exactly k peptides for target t ∈ [symbol] (e.g., as computed by the procedures
describe above). Note that [symbol] _{t,k+1} may not necessarily be a superset of [symbol] _{t,k}.
W: [symbol] → [0,1] : Target weighting function mapping each target t ∈ [symbol] to a probability or
weight of t in a particular presentation of interest (e.g., pancreatic cancer; see FIG. 6 for
example).
POPULATIONCOVERAGE: [symbol] → [0,1]: Function mapping a peptide set into population
coverage (e.g., EvalVax). This function may also take as input additional parameters,
including HLA haplotype frequencies and a minimum per-individual number of peptide-
HLA hits N (here, we compute coverage as P(n ≥ 1) using EvalVax-Robust).

[0204] At Step 1, for each target t (individually) compute optimized vaccines of sizes 1 to m (1 to m peptides; m is the largest vaccine size used for the computation) as the sets [symbol] _{t,k} where k denotes the size of the vaccine. Then, compute the vaccine performance for each vaccine size. For each target t (individually) and vaccine size (peptide count) k, the unweighted population coverage c_{t,k} is computed:

c_{t,k}=PopulationCoverage( [symbol] _{t,k})∀t∈ [symbol] ,k

In some embodiments, for each target t, c_{t,k} is generally monotonically increasing and concave down for increasing values of k (each additional peptide increases coverage but with decreasing returns).

[0205] At Step 2, vaccine marginal performance is computed and weighted by each target's prevalence weight. For each target t (individually), the marginal coverage m_{t,k} is computed of the k-th peptide added to the vaccine set:

$${m}_{t , k} = \{ \begin{matrix}{c}_{t , k} & if k = 1 \\ {c}_{t , k} - {c}_{t , k - 1} , & otherwise\end{matrix} ∀ t ∈ 𝒯 , k$$

In some embodiments, for each target t, m_{t,k} should be a monotonically decreasing function in k (by Step 1 above).

[0206] The weighted marginal population coverage \tilde{m}_{t,k} is computed using weights of each target in W:

\tilde{m}_{t,k}=W(t)·m_{t,k}∀t∈ [symbol] ,k

The weighted marginal population coverage gives the effective marginal coverage of the k-th peptide in the vaccine weighted by the prevalence of the target in the presentation (by multiplication with the probability/weight of the target in the presentation).

[0207] At Step 3, the weighted vaccine performances are merged for all targets to produce combined vaccine designs at each peptide count. The individual vaccines are combined into a combined vaccine via the MergeMulti procedure called on the weighted marginal population coverage lists \tilde{m}ₜ=[\tilde{m}_{t,k}, k∈1, 2, . . . ]. FIG. 8 shows an example of Python implementation of the MergeMulti function. This procedure takes as input multiple sorted (descending) lists and merges them into a single sorted (descending) list. Let M indicate the output of MergeMulti where each element Mk contains both the marginal weighted coverage and source (target) of the k-th peptide in the combined vaccine. The combined vaccine contains peptides from different targets. In particular, the combined vaccine with k peptides contains C_{t,k}=Σ_{j≤k} [symbol] {Mₖ from t} peptides from target t. C_{t,k}∈[0, . . . , k] and τₜ C_{t,k}=k (Ct,k gives the distribution of the k peptides in the combined vaccine across the targets).

[0208] At Step 4, a vaccine with a desired performance is selected. The final vaccine size k can vary based upon the specific population coverage goals of the vaccine. The marginal weighted coverage values of the combined vaccine Mk can be cumulatively summed over k to give the overall effective (target-weighted) population coverage of the combined vaccine containing k peptides as Σ_{j≤k} Mₖ (taking into account both the probabilities/weights of the targets in the presentation and the expected population coverage of peptides based on HLA display).

[0209] At Step 5, the vaccine peptides corresponding to the target coverage is retrieved for the final vaccine size k. The optimal combined vaccine set [symbol] ₖ for the final vaccine size k is defined as:

$${\hat{v}}_{k} = {⋃}_{t ∈ 𝒯} {v}_{t , {C}_{t , k}}$$

[0210] Thus, the combined vaccine with k peptides is the combination of the optimal individual (C_{t,k})-peptide vaccines. The final vaccine size k can vary based upon the specific population coverage goals of the vaccine.

### MHC Class I Peptide Sequences

[0211] In some embodiments, a peptide composition comprises about 1 to 40 MHC class I peptides with each peptide consisting of 8 or more amino acids. In some embodiments, an MHC class I peptide composition is intended to prevent HIV. In some embodiments, an MHC class I peptide composition is intended to treat HIV.

[0212] In some embodiments, the amino acid sequence for an MHC class I peptide composition for HIV comprises one or more of the SEQ ID NOs: 1 to 56. In some embodiments, any one of the peptides in the HIV composition comprise an amino acid sequence 80, 81, 82, 83, 84, 85, 86, 87, 88, 89, 90, 91, 92, 93, 94, 95, 96, 97, 98 or 99% identical to SEQ ID NOs: 1 to 56.

[0213] In some embodiments, the amino acid sequence for an MHC class I peptide composition for HIV comprises two or more of the SEQ ID NOs: 1 to 56. In some embodiments, any one of the peptides in the HIV composition comprise an amino acid sequence 80, 81, 82, 83, 84, 85, 86, 87, 88, 89, 90, 91, 92, 93, 94, 95, 96, 97, 98 or 99% identical to SEQ ID NOs: 1 to 56.

[0214] Table 1 shows MHC class I peptide sequences described herein including the respective SEQ ID NO, amino acid sequence corresponding to the SEQ ID NO, the seed amino acid sequence (i.e., the amino acid sequence of the wild type protein fragment), the amino acid substitution (if any) for heteroclitic peptides at positions 2 and C (carboxyl terminus), and notes detailing embodiments in which the peptide may be included in a peptide composition as described herein. In some embodiments, any combination of peptides listed in Table 1 (SEQ ID NOs: 1 to 56) may be used to create a peptide composition having between about 1 and about 40 peptides. In some embodiments, any one of the peptides (peptides 1 to 56; SEQ ID NOs: 1 to 56) in the composition comprises an amino acid sequence 80, 81, 82, 83, 84, 85, 86, 87, 88, 89, 90, 91, 92, 93, 94, 95, 96, 97, 98 or 99% identical to any of SEQ ID NOs: 1 to 56.

[0215] In some embodiments, Table 1 describes preferred peptides for compositions of a desired size. In some embodiments, a composition of size n is selected from a desired column of Table 1, and a peptide is included if it is annotated as having a number between 1 and n.

[0216] Additional amino acid sequences of MHC class I composition peptides are provided in Sequence Listings (SEQ ID NOs: 88 to 2835). In some embodiments, any combination of MHC class I peptides disclosed herein (SEQ ID NOs: 1 to 56 and SEQ ID NOs: 88 to 2835) may be used to create a peptide composition having between about 1 and about 40 peptides. In some embodiments, any one of the peptides (SEQ ID NOs: 1 to 56 and SEQ ID NOs: 88 to 2835) in the composition comprises or contains an amino acid sequence 80, 81, 82, 83, 84, 85, 86, 87, 88, 89, 90, 91, 92, 93, 94, 95, 96, 97, 98 or 99% identical to any of SEQ ID NOs: 1 to 56 or SEQ ID NOs: 88 to 2835.

[0217] In some embodiments, the composition comprising the MHC class I peptides disclosed herein is an immunogenic composition. In some embodiments, the composition is a vaccine.

[0218] In some embodiments, the amino acid sequence for an MHC class I peptide composition for HIV comprises SEQ ID NO: 1, wherein a peptide with this sequence is configured to bind in vivo to one or more HLA alleles present in a subject, and wherein the one or more HLA alleles present in the subject is selected from the group consisting of B5703, B5802, C0202, C0210, C0217, C0229, C0302, C0303, C0304, C0317, C0501, C0509, C0801, C0803, C0804, C0812, C1202, C1203, C1502, C1504, C1505, C1509, C1601, C1602, C1604, C16112, C1646, C17, C1701, C1702, C1703, C1704, C1705, C1706, and C1707.

[0219] In some embodiments, the amino acid sequence for an MHC class I peptide composition for HIV comprises SEQ ID NO: 2, wherein a peptide with this sequence is configured to bind in vivo to one or more HLA alleles present in a subject, and wherein the one or more HLA alleles present in the subject is selected from the group consisting of C0102, C0144, C0303, C0304, C0305, C0401, C0403, C0404, C0407, C0501, C0509, C0704, C0801, C0802, C0803, C0804, C0812, C1502, C1504, C1505, C1509, C1601, C1602, C16112, C1646, C17, C1701, C1702, C1703, C1704, C1705, C1706, C1707, C1801, and C1802.

[0220] In some embodiments, the amino acid sequence for an MHC class I peptide composition for HIV comprises SEQ ID NO: 3, wherein a peptide with this sequence is configured to bind in vivo to one or more HLA alleles present in a subject, and wherein the one or more HLA alleles present in the subject is selected from the group consisting of A0201, A0202, A0203, A0204, A0205, A0206, A0207, A0211, A0214, A02264, A0230, B1301, B1302, B1303, B5201, C0102, C0144, C0202, C0210, C0214, C0217, C0229, C0303, C0304, C0305, C0317, C0403, C0501, C0509, C0602, C0704, C0801, C0803, C0804, C0812, C1202, C1203, C1502, C1504, C1505, C1509, C1601, C1602, C1604, C16112, C1646, C17, C1701, C1702, C1703, C1704, C1705, C1706, and C1707.

[0221] In some embodiments, the amino acid sequence for an MHC class I peptide composition for HIV comprises SEQ ID NO: 4, wherein a peptide with this sequence is configured to bind in vivo to one or more HLA alleles present in a subject, and wherein the one or more HLA alleles present in the subject is selected from the group consisting of A0204, A0205, A0206, A0207, A6802, A6827, B1301, B5702, B5703, B5802, C0202, C0210, C0217, C0229, C0302, C0303, C0304, C0317, C0501, C0509, C0801, C0803, C0804, C0812, C1202, C1203, C1502, C1504, C1505, C1509, C1601, C1602, C1604, C16112, C1646, C17, C1701, C1702, C1703, C1704, C1705, C1706, and C1707.

[0222] In some embodiments, the amino acid sequence for an MHC class I peptide composition for HIV comprises SEQ ID NO: 5, wherein a peptide with this sequence is configured to bind in vivo to one or more HLA alleles present in a subject, and wherein the one or more HLA alleles present in the subject is selected from the group consisting of A0301, A0302, A0305, A1101, A1102, A3001, A3104, A3303, A3401, A3402, A3601, A6601, A6602, A6603, A6801, A74, A7401, A7402, A7403, A7404, A7405, A7408, A7409, A7411, A7413, C0202, C0210, C0214, C0229, C0302, C0303, C0602, C1202, C1504, C1509, C1601, C1602, C1604, C16112, and C1646.

[0223] In some embodiments, the amino acid sequence for an MHC class I peptide composition for HIV comprises SEQ ID NO: 6, wherein a peptide with this sequence is configured to bind in vivo to one or more HLA alleles present in a subject, and wherein the one or more HLA alleles present in the subject is selected from the group consisting of A0205, A6802, A6827, A6901, B1302, B1303, B5107, B5108, B5201, and C1505.

[0224] In some embodiments, the amino acid sequence for an MHC class I peptide composition for HIV comprises SEQ ID NO: 7, wherein a peptide with this sequence is configured to bind in vivo to one or more HLA alleles present in a subject, and wherein the one or more HLA alleles present in the subject is selected from the group consisting of A0201, A0202, A0203, A0204, A0205, A0206, A0207, A0211, A0214, A02264, A0230, B1301, B1302, B1303, B5201, C0102, C0144, C0202, C0210, C0214, C0229, C0403, C0501, C0509, C0602, C0704, C0801, C0803, C0812, C1202, C1203, C1502, C1504, C1505, C1509, C1601, C1602, C1604, C16112, C1646, C17, C1701, C1702, C1703, C1704, C1705, C1706, and C1707.

[0225] In some embodiments, the amino acid sequence for an MHC class I peptide composition for HIV comprises SEQ ID NO: 8, wherein a peptide with this sequence is configured to bind in vivo to one or more HLA alleles present in a subject, and wherein the one or more HLA alleles present in the subject is selected from the group consisting of A0202, A0204, A0205, A0206, A0207, A0214, B1301, C0202, C0210, C0229, C0801, C0803, C1202, C1505, C17, C1701, C1702, C1703, C1704, C1705, and C1706.

[0226] In some embodiments, the amino acid sequence for an MHC class I peptide composition for HIV comprises SEQ ID NO: 9, wherein a peptide with this sequence is configured to bind in vivo to one or more HLA alleles present in a subject, and wherein the one or more HLA alleles present in the subject is selected from the group consisting of A2501, B1517, B5703, B5802, C0202, C0210, C0229, C0302, C1202, C1203, C1504, C1509, C1601, C1602, C1604, C16112, and C1646.

[0227] In some embodiments, the amino acid sequence for an MHC class I peptide composition for HIV comprises SEQ ID NO: 10, wherein a peptide with this sequence is configured to bind in vivo to one or more HLA alleles present in a subject, and wherein the one or more HLA alleles present in the subject is selected from the group consisting of A0201, A0202, A0203, A0204, A0205, A0206, A0207, A0211, A0214, A02264, A0230, A6802, A6827, B1301, B1302, B1303, B5201, C0102, C0144, C0202, C0210, C0214, C0229, C0403, C0501, C0509, C0602, C0704, C0801, C0803, C0812, C1202, C1203, C1502, C1504, C1505, C1509, C1601, C1602, C1604, C16112, C1646, C17, C1701, C1702, C1703, C1704, C1705, C1706, and C1707.

[0228] In some embodiments, the amino acid sequence for an MHC class I peptide composition for HIV comprises SEQ ID NO: 11, wherein a peptide with this sequence is configured to bind in vivo to one or more HLA alleles present in a subject, and wherein the one or more HLA alleles present in the subject is selected from the group consisting of C0102, C0144, C0303, C0304, C0305, C0401, C0403, C0404, C0407, C0501, C0509, C0704, C0801, C0802, C0803, C0804, C0812, C1502, C1504, C1505, C1509, C1601, C1602, C16112, C1646, C17, C1701, C1702, C1703, C1704, C1705, C1706, and C1707.

[0229] In some embodiments, the amino acid sequence for an MHC class I peptide composition for HIV comprises SEQ ID NO: 12, wherein a peptide with this sequence is configured to bind in vivo to one or more HLA alleles present in a subject, and wherein the one or more HLA alleles present in the subject is selected from the group consisting of A0205, A6802, A6827, A6901, B1302, B5108, B5201, and C1505.

[0230] In some embodiments, the amino acid sequence for an MHC class I peptide composition for HIV comprises SEQ ID NO: 13, wherein a peptide with this sequence is configured to bind in vivo to one or more HLA alleles present in a subject, and wherein the one or more HLA alleles present in the subject is selected from the group consisting of A0202, A0204, A0205, A0206, A0207, A0214, B1301, C0302, C0303, C0304, C0801, C0803, C1505, C1602, C17, C1701, C1702, C1703, C1704, C1705, C1706, and C1707.

[0231] In some embodiments, the amino acid sequence for an MHC class I peptide composition for HIV comprises SEQ ID NO: 14, wherein a peptide with this sequence is configured to bind in vivo to one or more HLA alleles present in a subject, and wherein the one or more HLA alleles present in the subject is selected from the group consisting of A2501, B1301, B1517, B5702, B5703, B5802, C0202, C0210, C0229, C0302, C1202, C1203, C1504, C1505, C1509, C1601, C1602, C1604, C16112, C1646, C1701, C1702, C1703, C1704, and C1705.

[0232] In some embodiments, the amino acid sequence for an MHC class I peptide composition for HIV comprises SEQ ID NO: 15, wherein a peptide with this sequence is configured to bind in vivo to one or more HLA alleles present in a subject, and wherein the one or more HLA alleles present in the subject is selected from the group consisting of A0202, A0204, A0205, A0206, A0207, A0214, and B1301.

[0233] In some embodiments, the amino acid sequence for an MHC class I peptide composition for HIV comprises SEQ ID NO: 16, wherein a peptide with this sequence is configured to bind in vivo to one or more HLA alleles present in a subject, and wherein the one or more HLA alleles present in the subject is selected from the group consisting of C0102, C0144, C0303, C0304, C0305, C0401, C0403, C0404, C0407, C0501, C0509, C0704, C0801, C0802, C0803, C0804, C0812, C1502, C1504, C1505, C1509, C1601, C1602, C16112, C1646, C17, C1701, C1702, C1703, C1704, C1705, C1706, C1707, C1801, and C1802.

[0234] In some embodiments, the amino acid sequence for an MHC class I peptide composition for HIV comprises SEQ ID NO: 17, wherein a peptide with this sequence is configured to bind in vivo to one or more HLA alleles present in a subject, and wherein the one or more HLA alleles present in the subject is selected from the group consisting of A0205, A6802, A6827, A6901, B1301, B1302, B1303, B5107, B5108, B5201, and C1505.

[0235] In some embodiments, the amino acid sequence for an MHC class I peptide composition for HIV comprises SEQ ID NO: 18, wherein a peptide with this sequence is configured to bind in vivo to one or more HLA alleles present in a subject, and wherein the one or more HLA alleles present in the subject is selected from the group consisting of A3104, A3303, A3401, A3402, A3601, A6601, A6602, A6603, A6801, A7401, A7402, A7403, A7404, A7405, A7408, A7409, A7411, A7413, C0202, C0210, C0229, C0303, C0602, C1202, C1504, C1509, C1601, C1602, C16112, and C1646.

[0236] In some embodiments, the amino acid sequence for an MHC class I peptide composition for HIV comprises SEQ ID NO: 19, wherein a peptide with this sequence is configured to bind in vivo to one or more HLA alleles present in a subject, and wherein the one or more HLA alleles present in the subject is selected from the group consisting of A0202, A0204, A0205, A0206, A0207, A0214, and B1301.

[0237] In some embodiments, the amino acid sequence for an MHC class I peptide composition for HIV comprises SEQ ID NO: 20, wherein a peptide with this sequence is configured to bind in vivo to one or more HLA alleles present in a subject, and wherein the one or more HLA alleles present in the subject is selected from the group consisting of A0201, A0202, A0203, A0204, A0205, A0206, A0207, A0211, A0214, A02264, A0230, A6802, A6827, B1301, B1302, B1303, B5201, C0102, C0144, C0202, C0210, C0214, C0229, C0403, C0501, C0509, C0602, C0704, C0801, C0803, C0812, C1202, C1203, C1502, C1504, C1505, C1509, C1601, C1602, C1604, C16112, C1646, C17, C1701, C1702, C1703, C1704, C1705, C1706, and C1707.

[0238] In some embodiments, the amino acid sequence for an MHC class I peptide composition for HIV comprises SEQ ID NO: 21, wherein a peptide with this sequence is configured to bind in vivo to one or more HLA alleles present in a subject, and wherein the one or more HLA alleles present in the subject is selected from the group consisting of A0302, A1101, A1102, A3104, A3303, A3401, A3402, A3601, A6601, A6602, A6603, A6801, A74, A7401, A7402, A7403, A7404, A7405, A7408, A7409, A7411, A7413, C0202, C0210, C0229, C0303, C0602, C1202, C1504, C1509, C1601, C1602, C16112, and C1646.

[0239] In some embodiments, the amino acid sequence for an MHC class I peptide composition for HIV comprises SEQ ID NO: 22, wherein a peptide with this sequence is configured to bind in vivo to one or more HLA alleles present in a subject, and wherein the one or more HLA alleles present in the subject is selected from the group consisting of A0202, A0204, A0205, A0206, A0207, A0214, and B1301.

[0240] In some embodiments, the amino acid sequence for an MHC class I peptide composition for HIV comprises SEQ ID NO: 23, wherein a peptide with this sequence is configured to bind in vivo to one or more HLA alleles present in a subject, and wherein the one or more HLA alleles present in the subject is selected from the group consisting of A0204, A0205, A0206, A6802, A6827, A6901, B1302, B1303, B5201, C0202, C0210, C0214, C0217, C0229, C0303, C0317, C0403, C0501, C0509, C0602, C0704, C0801, C0803, C0804, C0812, C1202, C1203, C1502, C1504, C1505, C1509, C1601, C1602, C1604, C16112, C1646, C17, C1701, C1702, C1703, C1704, C1705, C1706, and C1707.

[0241] In some embodiments, the amino acid sequence for an MHC class I peptide composition for HIV comprises SEQ ID NO: 24, wherein a peptide with this sequence is configured to bind in vivo to one or more HLA alleles present in a subject, and wherein the one or more HLA alleles present in the subject is selected from the group consisting of A0202, A0204, A0205, A0206, A0207, A0214, A6802, A6827, and B1301.

[0242] In some embodiments, the amino acid sequence for an MHC class I peptide composition for HIV comprises SEQ ID NO: 25, wherein a peptide with this sequence is configured to bind in vivo to one or more HLA alleles present in a subject, and wherein the one or more HLA alleles present in the subject is selected from the group consisting of A0302, A1101, A1102, A3104, A3303, A3401, A3402, A3601, A6601, A6602, A6603, A6801, A74, A7401, A7402, A7403, A7404, A7405, A7408, A7409, A7411, A7413, C0202, C0210, C0214, C0229, C0302, C0303, C0602, C1202, C1504, C1509, C1601, C1602, C1604, C16112, and C1646.

[0243] In some embodiments, the amino acid sequence for an MHC class I peptide composition for HIV comprises SEQ ID NO: 26, wherein a peptide with this sequence is configured to bind in vivo to one or more HLA alleles present in a subject, and wherein the one or more HLA alleles present in the subject is selected from the group consisting of B1517, B5702, B5703, B5802, C0202, C0210, C0229, C0302, C0303, C0304, C0801, C0803, C1202, C1203, C1502, C1504, C1505, C1509, C1601, C1602, C1604, C16112, C1646, C17, C1701, C1702, C1703, C1704, C1705, C1706, and C1707.

[0244] In some embodiments, the amino acid sequence for an MHC class I peptide composition for HIV comprises SEQ ID NO: 27, wherein a peptide with this sequence is configured to bind in vivo to one or more HLA alleles present in a subject, and wherein the one or more HLA alleles present in the subject is selected from the group consisting of A0201, A0202, A0203, A0204, A0205, A0206, A0207, A0211, A0214, A02264, A0230, B1301, B1302, B1303, B5201, C0102, C0144, C0202, C0210, C0214, C0217, C0229, C0303, C0304, C0305, C0317, C0403, C0501, C0509, C0602, C0704, C0801, C0803, C0804, C0812, C1202, C1203, C1502, C1504, C1505, C1509, C1601, C1602, C1604, C16112, C1646, C17, C1701, C1702, C1703, C1704, C1705, C1706, and C1707.

[0245] In some embodiments, the amino acid sequence for an MHC class I peptide composition for HIV comprises SEQ ID NO: 28, wherein a peptide with this sequence is configured to bind in vivo to one or more HLA alleles present in a subject, and wherein the one or more HLA alleles present in the subject is selected from the group consisting of A2501, B1301, B1517, B5702, B5703, B5802, C0202, C0210, C0217, C0229, C0302, C0303, C0304, C0317, C0801, C0803, C1202, C1203, C1502, C1504, C1505, C1509, C1601, C1602, C1604, C16112, C1646, C17, C1701, C1702, C1703, C1704, C1705, C1706, and C1707.

[0246] In some embodiments, the amino acid sequence for an MHC class I peptide composition for HIV comprises SEQ ID NO: 29, wherein a peptide with this sequence is configured to bind in vivo to one or more HLA alleles present in a subject, and wherein the one or more HLA alleles present in the subject is selected from the group consisting of A2501, A6603, B1517, B5703, B5802, C0202, C0210, C0217, C0229, C0302, C1202, C1203, C1504, C1509, C1601, C1602, C1604, C16112, and C1646.

[0247] In some embodiments, the amino acid sequence for an MHC class I peptide composition for HIV comprises SEQ ID NO: 30, wherein a peptide with this sequence is configured to bind in vivo to one or more HLA alleles present in a subject, and wherein the one or more HLA alleles present in the subject is selected from the group consisting of A2501, B1301, B1517, B5702, B5703, and B5802.

[0248] In some embodiments, the amino acid sequence for an MHC class I peptide composition for HIV comprises SEQ ID NO: 31, wherein a peptide with this sequence is configured to bind in vivo to one or more HLA alleles present in a subject, and wherein the one or more HLA alleles present in the subject is selected from the group consisting of A2501, B1301, B1517, B5702, B5703, and B5802.

[0249] In some embodiments, the amino acid sequence for an MHC class I peptide composition for HIV comprises SEQ ID NO: 32, wherein a peptide with this sequence is configured to bind in vivo to one or more HLA alleles present in a subject, and wherein the one or more HLA alleles present in the subject is selected from the group consisting of B1301, B1302, B1303, B5108, B5201, C0102, C0144, C0202, C0210, C0214, C0217, C0229, C0303, C0304, C0305, C0317, C0403, C0501, C0509, C0602, C0704, C0801, C0803, C0804, C0812, C1202, C1203, C1502, C1504, C1505, C1509, C1601, C1602, C1604, C16112, C1646, C17, C1701, C1702, C1703, C1704, C1705, C1706, and C1707.

[0250] In some embodiments, the amino acid sequence for an MHC class I peptide composition for HIV comprises SEQ ID NO: 33, wherein a peptide with this sequence is configured to bind in vivo to one or more HLA alleles present in a subject, and wherein the one or more HLA alleles present in the subject is selected from the group consisting of C0102, C0144, C0401, C0403, C0404, C0407, C0501, C0509, C0704, C0801, C0802, C0803, C0812, C1602, C1646, C1801, and C1802.

[0251] In some embodiments, the amino acid sequence for an MHC class I peptide composition for HIV comprises SEQ ID NO: 34, wherein a peptide with this sequence is configured to bind in vivo to one or more HLA alleles present in a subject, and wherein the one or more HLA alleles present in the subject is selected from the group consisting of A0302, A1101, A1102, A3402, A3601, and A6801.

[0252] In some embodiments, the amino acid sequence for an MHC class I peptide composition for HIV comprises SEQ ID NO: 35, wherein a peptide with this sequence is configured to bind in vivo to one or more HLA alleles present in a subject, and wherein the one or more HLA alleles present in the subject is selected from the group consisting of A0202, A0204, A0205, A0206, A0207, A0214, A6802, A6827, C1502, and C1505.

[0253] In some embodiments, the amino acid sequence for an MHC class I peptide composition for HIV comprises SEQ ID NO: 36, wherein a peptide with this sequence is configured to bind in vivo to one or more HLA alleles present in a subject, and wherein the one or more HLA alleles present in the subject is selected from the group consisting of A2501, A2601, A3401, A6601, A6602, and A6603.

[0254] In some embodiments, the amino acid sequence for an MHC class I peptide composition for HIV comprises SEQ ID NO: 37, wherein a peptide with this sequence is configured to bind in vivo to one or more HLA alleles present in a subject, and wherein the one or more HLA alleles present in the subject is selected from the group consisting of B5108, B5201, C0102, C0144, C0202, C0210, C0214, C0217, C0229, C0303, C0304, C0305, C0317, C0403, C0501, C0509, C0602, C0704, C0801, C0803, C0804, C0812, C1202, C1203, C1502, C1504, C1505, C1509, C1601, C1602, C1604, C16112, C1646, C17, C1701, C1702, C1703, C1704, C1705, C1706, and C1707.

[0255] In some embodiments, the amino acid sequence for an MHC class I peptide composition for HIV comprises SEQ ID NO: 38, wherein a peptide with this sequence is configured to bind in vivo to one or more HLA alleles present in a subject, and wherein the one or more HLA alleles present in the subject is selected from the group consisting of C0102, C0144, C0304, C0305, C0401, C0403, C0404, C0407, C0501, C0509, C0704, C0801, C0802, C0803, C0804, C0812, C1505, C1601, C1602, C16112, C1646, C17, C1701, C1702, C1703, C1704, C1705, C1706, C1801, and C1802.

[0256] In some embodiments, the amino acid sequence for an MHC class I peptide composition for HIV comprises SEQ ID NO: 39, wherein a peptide with this sequence is configured to bind in vivo to one or more HLA alleles present in a subject, and wherein the one or more HLA alleles present in the subject is selected from the group consisting of C0102, C0144, C0214, C0303, C0304, C0305, C0317, C0403, C0501, C0509, C0602, C0704, C0801, C0803, C0812, C1505, C1601, C1602, C1604, C16112, C1646, C17, C1701, C1702, C1703, C1704, and C1705.

[0257] In some embodiments, the amino acid sequence for an MHC class I peptide composition for HIV comprises SEQ ID NO: 40, wherein a peptide with this sequence is configured to bind in vivo to one or more HLA alleles present in a subject, and wherein the one or more HLA alleles present in the subject is selected from the group consisting of A3104, A3303, A7401, A7402, A7403, A7404, A7405, A7409, A7411, CO303, C0602, C1602, and C1646.

[0258] In some embodiments, the amino acid sequence for an MHC class I peptide composition for HIV comprises SEQ ID NO: 41, wherein a peptide with this sequence is configured to bind in vivo to one or more HLA alleles present in a subject, and wherein the one or more HLA alleles present in the subject is selected from the group consisting of C0403, C0501, C0509, and C0802.

[0259] In some embodiments, the amino acid sequence for an MHC class I peptide composition for HIV comprises SEQ ID NO: 42, wherein a peptide with this sequence is configured to bind in vivo to one or more HLA alleles present in a subject, and wherein the one or more HLA alleles present in the subject is selected from the group consisting of A2501, B1301, B1517, B5702, B5703, and B5802.

[0260] In some embodiments, the amino acid sequence for an MHC class I peptide composition for HIV comprises SEQ ID NO: 43, wherein a peptide with this sequence is configured to bind in vivo to one or more HLA alleles present in a subject, and wherein the one or more HLA alleles present in the subject is selected from the group consisting of B1301, B5108, C0102, C0144, C0202, C0210, C0214, C0217, C0229, C0303, C0304, C0305, C0317, C0403, C0501, C0509, C0602, C0704, C0801, C0803, C0804, C0812, C1202, C1203, C1502, C1504, C1505, C1509, C1601, C1602, C1604, C16112, C1646, C17, C1701, C1702, C1703, C1704, C1705, C1706, and C1707.

[0261] In some embodiments, the amino acid sequence for an MHC class I peptide composition for HIV comprises SEQ ID NO: 44, wherein a peptide with this sequence is configured to bind in vivo to one or more HLA alleles present in a subject, and wherein the one or more HLA alleles present in the subject is selected from the group consisting of C0401, C0403, C0404, C0407, C0501, C0509, C0704, C0801, C0802, C0803, C1801, and C1802.

[0262] In some embodiments, the amino acid sequence for an MHC class I peptide composition for HIV comprises SEQ ID NO: 45, wherein a peptide with this sequence is configured to bind in vivo to one or more HLA alleles present in a subject, and wherein the one or more HLA alleles present in the subject is selected from the group consisting of A0201, A0202, A0203, A0204, A0205, A0206, A0207, A0211, A0214, A02264, A0230, B1301, B1302, and B1303.

[0263] In some embodiments, the amino acid sequence for an MHC class I peptide composition for HIV comprises SEQ ID NO: 46, wherein a peptide with this sequence is configured to bind in vivo to one or more HLA alleles present in a subject, and wherein the one or more HLA alleles present in the subject is selected from the group consisting of C0214, C0602, and C0704.

[0264] In some embodiments, the amino acid sequence for an MHC class I peptide composition for HIV comprises SEQ ID NO: 47, wherein a peptide with this sequence is configured to bind in vivo to one or more HLA alleles present in a subject, and wherein the one or more HLA alleles present in the subject is selected from the group consisting of C0401, C0403, C0404, C0407, C0501, C0509, C0704, C0801, C0802, C0803, C1602, C1801, and C1802.

[0265] In some embodiments, the amino acid sequence for an MHC class I peptide composition for HIV comprises SEQ ID NO: 48, wherein a peptide with this sequence is configured to bind in vivo to one or more HLA alleles present in a subject, and wherein the one or more HLA alleles present in the subject is selected from the group consisting of C0403, C0501, C0509, and C0802.

[0266] In some embodiments, the amino acid sequence for an MHC class I peptide composition for HIV comprises SEQ ID NO: 49, wherein a peptide with this sequence is configured to bind in vivo to one or more HLA alleles present in a subject, and wherein the one or more HLA alleles present in the subject is selected from the group consisting of C0202, C0210, C0214, C0217, C0229, C0303, C0304, C0305, C0317, C0602, C0801, C0803, C1202, C1203, C1502, C1504, C1505, C1509, C1601, C1602, C1604, C16112, C1646, C17, C1701, C1702, C1703, C1704, C1705, C1706, and C1707.

[0267] In some embodiments, the amino acid sequence for an MHC class I peptide composition for HIV comprises SEQ ID NO: 50, wherein a peptide with this sequence is configured to bind in vivo to one or more HLA alleles present in a subject, and wherein the one or more HLA alleles present in the subject is selected from the group consisting of B1301, B5108, B5201, C0102, C0144, C0202, C0210, C0214, C0217, C0229, C0303, C0304, C0305, C0317, C0403, C0501, C0509, C0602, C0704, C0801, C0803, C0804, C0812, C1202, C1203, C1502, C1504, C1505, C1509, C1601, C1602, C1604, C16112, C1646, C17, C1701, C1702, C1703, C1704, C1705, C1706, and C1707.

[0268] In some embodiments, the amino acid sequence for an MHC class I peptide composition for HIV comprises SEQ ID NO: 51, wherein a peptide with this sequence is configured to bind in vivo to one or more HLA alleles present in a subject, and wherein the one or more HLA alleles present in the subject is selected from the group consisting of A0201, A0202, A0203, A0204, A0205, A0206, A0207, A0211, A0214, A02264, A0230, B1301, B1302, and B1303.

[0269] In some embodiments, the amino acid sequence for an MHC class I peptide composition for HIV comprises SEQ ID NO: 52, wherein a peptide with this sequence is configured to bind in vivo to one or more HLA alleles present in a subject, and wherein the one or more HLA alleles present in the subject is selected from the group consisting of C0214, C0602, and C0704.

[0270] In some embodiments, the amino acid sequence for an MHC class I peptide composition for HIV comprises SEQ ID NO: 53, wherein a peptide with this sequence is configured to bind in vivo to one or more HLA alleles present in a subject, and wherein the one or more HLA alleles present in the subject is selected from the group consisting of C0401, C0403, C0404, C0407, C0501, C0509, C0704, C1601, C1602, C16112, C1646, C1801, and C1802.

[0271] In some embodiments, the amino acid sequence for an MHC class I peptide composition for HIV comprises SEQ ID NO: 54, wherein a peptide with this sequence is configured to bind in vivo to one or more HLA alleles present in a subject, and wherein the one or more HLA alleles present in the subject is selected from the group consisting of C0403, C0501, C0509, and C0802.

[0272] In some embodiments, the amino acid sequence for an MHC class I peptide composition for HIV comprises SEQ ID NO: 55, wherein a peptide with this sequence is configured to bind in vivo to one or more HLA alleles present in a subject, and wherein the one or more HLA alleles present in the subject is selected from the group consisting of A0301, A0302, A0305, A1101, A1102, A3001, A3104, A3303, A3401, A3402, A3601, A6601, A6602, A6603, A6801, A74, A7401, A7402, A7403, A7404, A7405, A7408, A7409, A7411, A7413, C0202, C0210, C0214, C0229, C0302, C0303, C0602, C1202, C1203, C1502, C1504, C1509, C1601, C1602, C1604, C16112, and C1646.

[0273] In some embodiments, the amino acid sequence for an MHC class I peptide composition for HIV comprises SEQ ID NO: 56, wherein a peptide with this sequence is configured to bind in vivo to one or more HLA alleles present in a subject, and wherein the one or more HLA alleles present in the subject is selected from the group consisting of A0201, A0202, A0203, A0204, A0205, A0206, A0207, A0211, A0214, A02264, A0230, A6802, A6827, A6901, B1301, B1302, B1303, B5108, B5201, C0102, C0144, C0202, C0210, C0214, C0217, C0229, C0303, C0304, C0305, C0317, C0403, C0501, C0509, C0602, C0704, C0801, C0803, C0804, C0812, C1202, C1203, C1502, C1504, C1505, C1509, C1601, C1602, C1604, C16112, C1646, C17, C1701, C1702, C1703, C1704, C1705, C1706, and C1707.

### MHC Class II Peptide Sequences

[0274] In some embodiments, a peptide composition comprises about 1 to 40 MHC class II peptides with each peptide consisting of about 20 amino acids. In some embodiments, an MHC class II peptide composition is intended to prevent HIV. In some embodiments, an MHC class II peptide composition is intended to treat HIV.

[0275] In some embodiments, the amino acid sequence for an MHC class II peptide composition for HIV comprises one or more of the SEQ ID NOs: 57 to 87. In some embodiments, any one of the peptides in the HIV composition comprise an amino acid sequence 80, 81, 82, 83, 84, 85, 86, 87, 88, 89, 90, 91, 92, 93, 94, 95, 96, 97, 98 or 99% identical to SEQ ID NOs: 57 to 87.

[0276] In some embodiments, the amino acid sequence for an MHC class II peptide composition for HIV comprises two or more of the SEQ ID NOs: 57 to 87. In some embodiments, any one of the peptides in the HIV composition comprise an amino acid sequence 80, 81, 82, 83, 84, 85, 86, 87, 88, 89, 90, 91, 92, 93, 94, 95, 96, 97, 98 or 99% identical to SEQ ID NOs: 57 to 87.

[0277] Table 2 summarizes MHC class II peptide sequences described herein including the respective SEQ ID NO, amino acid sequence corresponding to the SEQ ID NO, the amino acid sequence corresponding to the peptide's binding core, the seed amino acid sequence (i.e., the amino acid sequence of the wild type protein fragment), the seed amino acid sequence of the binding core, and the amino acid substitution (if any) for heteroclitic peptides at positions 1, 4, 6, and 9. Table 2 includes peptide sequences comprising SEQ ID NOs: 57 to 87. SEQ ID NOs: 57 to 87 (Table 2) encode for recombinant peptides. In some embodiments, any combination of peptides listed in Table 2 (SEQ ID NOs: 57 to 87) may be used to create a peptide composition having between about 1 and about 40 peptides. In some embodiments, any one of the peptides (peptides 57 to 87; SEQ ID NOs: 57 to 87) in the composition comprises an amino acid sequence 80, 81, 82, 83, 84, 85, 86, 87, 88, 89, 90, 91, 92, 93, 94, 95, 96, 97, 98 or 99% identical to any of SEQ ID NOs: 57 to 87.

[0278] In some embodiments, Table 2 describes preferred peptides for compositions of a desired size. In some embodiments, a composition of size n is selected from a desired column of Table 2, and a peptide is included if it is annotated as having a number between 1 and n.

[0279] Additional amino acid sequences of MHC class II composition peptides are provided in Sequence Listings (SEQ ID NOs: 2836 to 7601). In some embodiments, any combination of MHC class II peptides disclosed herein (SEQ ID NOs: 57 to 87 and SEQ ID NOs: 2836 to 7601) may be used to create a peptide composition having between about 1 and about 40 peptides. In some embodiments, any one of the peptides (SEQ ID NOs: 57 to 87 and SEQ ID NOs: 2836 to 7601) in the composition comprises or contains an amino acid sequence 80, 81, 82, 83, 84, 85, 86, 87, 88, 89, 90, 91, 92, 93, 94, 95, 96, 97, 98 or 99% identical to any of SEQ ID NOs: 57 to 87 or SEQ ID NOs: 2836 to 7601.

[0280] In some embodiments, the composition comprising the MHC class II peptides disclosed herein is an immunogenic composition. In some embodiments, the composition is a vaccine.

[0281] In some embodiments, any combination of MHC class I and/or MHC class II peptides disclosed herein (SEQ ID NOs: 1 to 7602) may be used to create a peptide composition having between about 2 and about 40 peptides. In some embodiments, any one of the peptides (peptides 1 to 7602; SEQ ID NOs: 1 to 7602) in the composition comprises an amino acid sequence 80, 81, 82, 83, 84, 85, 86, 87, 88, 89, 90, 91, 92, 93, 94, 95, 96, 97, 98 or 99% identical to any of SEQ ID NOs: 1 to 7602.

[0282] In some embodiments, the composition comprising the MHC class I and/or MHC class II peptides disclosed herein is an immunogenic composition. In some embodiments, the composition is a vaccine.

[0283] In some embodiments, the amino acid sequence for an MHC class II peptide composition for HIV comprises SEQ ID NO: 57, wherein a peptide with this sequence is configured to bind in vivo to one or more HLA alleles present in a subject, and wherein the one or more HLA alleles present in the subject is selected from the group consisting of DRB1_0101, DRB1_1001, DPA10103-DPB10101, DPA10103-DPB10201, DPA10103-DPB10202, DPA10103-DPB10401, DPA10103-DPB10402, DPA10103-DPB10501, DPA10103-DPB110501, DPA10103-DPB112601, DPA10103-DPB11501, DPA10103-DPB11601, DPA10103-DPB11801, DPA10103-DPB11901, DPA10103-DPB12301, DPA10103-DPB13101, DPA10103-DPB13401, DPA10103-DPB13901, DPA10103-DPB14001, DPA10103-DPB14101, DPA10103-DPB14801, DPA10103-DPB14901, DPA10103-DPB15001, DPA10103-DPB15101, DPA10103-DPB15501, DPA10103-DPB15901, DPA10103-DPB18001, DPA10104-DPB10101, DPA10104-DPB11501, DPA10105-DPB10101, DPA10105-DPB10401, DPA10105-DPB11801, DPA10105-DPB15001, DPA10106-DPB10101, DPA10201-DPB10101, DPA10201-DPB10201, DPA10201-DPB10202, DPA10201-DPB10401, DPA10201-DPB10501, DPA10201-DPB110601, DPA10201-DPB11501, DPA10201-DPB11601, DPA10201-DPB11901, DPA10201-DPB13401, DPA10201-DPB15501, DPA10202-DPB10101, DPA10202-DPB10201, DPA10202-DPB10202, DPA10202-DPB10401, DPA10202-DPB10501, DPA10202-DPB110601, DPA10202-DPB11101, DPA10202-DPB11301, DPA10202-DPB11801, DPA10202-DPB11901, DPA10202-DPB13101, DPA10202-DPB13801, DPA10202-DPB15501, DPA10202-DPB16501, DPA10301-DPB10101, DPA10301-DPB10201, DPA10301-DPB10202, DPA10301-DPB10401, DPA10301-DPB10402, DPA10301-DPB110501, DPA10301-DPB110601, DPA10301-DPB11101, DPA10301-DPB11301, DPA10301-DPB11801, DPA10301-DPB12301, DPA10301-DPB13901, DPA10301-DPB14001, DPA10301-DPB14901, DPA10301-DPB15501, DPA10301-DPB16501, DPA10301-DPB17501, DPA10301-DPB18001, DPA10401-DPB10101, DPA10401-DPB10201, DPA10401-DPB10202, DPA10401-DPB10402, DPA10401-DPB10501, DPA10401-DPB110501, and DPA10401-DPB14901.

[0284] In some embodiments, the amino acid sequence for an MHC class II peptide composition for HIV comprises SEQ ID NO: 58, wherein a peptide with this sequence is configured to bind in vivo to one or more HLA alleles present in a subject, and wherein the one or more HLA alleles present in the subject is selected from the group consisting of DRB1_1602, DQA10101-DQB10501, DQA10101-DQB10503, DQA10102-DQB10501, DQA10102-DQB10502, DQA10102-DQB10503, DQA10103-DQB10501, DQA10104-DQB10501, DQA10104-DQB10503, DQA10105-DQB10501, DQA10107-DQB10503, and DQA10505-DQB10402.

[0285] In some embodiments, the amino acid sequence for an MHC class II peptide composition for HIV comprises SEQ ID NO: 59, wherein a peptide with this sequence is configured to bind in vivo to one or more HLA alleles present in a subject, and wherein the one or more HLA alleles present in the subject is selected from the group consisting of DRB1_1501 and DRB1_1503.

[0286] In some embodiments, the amino acid sequence for an MHC class II peptide composition for HIV comprises SEQ ID NO: 60, wherein a peptide with this sequence is configured to bind in vivo to one or more HLA alleles present in a subject, and wherein the one or more HLA alleles present in the subject is selected from the group consisting of DRB1_0101, DRB1_0405, DRB1_1001, DPA10103-DPB10201, DPA10103-DPB10202, DPA10103-DPB10401, DPA10103-DPB10501, DPA10103-DPB112601, DPA10103-DPB11501, DPA10103-DPB11801, DPA10103-DPB11901, DPA10103-DPB12301, DPA10103-DPB13401, DPA10103-DPB13901, DPA10103-DPB14001, DPA10103-DPB14801, DPA10103-DPB15901, DPA10104-DPB11501, DPA10105-DPB10401, DPA10105-DPB11801, DPA10106-DPB10101, DPA10201-DPB10101, DPA10201-DPB110601, DPA10201-DPB11501, DPA10201-DPB11601, DPA10201-DPB11901, DPA10201-DPB15501, DPA10202-DPB10101, DPA10202-DPB10201, DPA10202-DPB10202, DPA10202-DPB10401, DPA10202-DPB10501, DPA10202-DPB110601, DPA10202-DPB11101, DPA10202-DPB11301, DPA10202-DPB11801, DPA10202-DPB11901, DPA10202-DPB13101, DPA10202-DPB13801, DPA10202-DPB15501, DPA10202-DPB16501, DPA10301-DPB10201, DPA10301-DPB10202, DPA10301-DPB10401, DPA10301-DPB10402, DPA10301-DPB110501, DPA10301-DPB110601, DPA10301-DPB11101, DPA10301-DPB11301, DPA10301-DPB11801, DPA10301-DPB12301, DPA10301-DPB13901, DPA10301-DPB14001, DPA10301-DPB14901, DPA10301-DPB15501, DPA10301-DPB16501, DPA10301-DPB17501, DPA10301-DPB18001, DPA10401-DPB10201, DPA10401-DPB10202, DPA10401-DPB10402, DPA10401-DPB10501, DPA10401-DPB110501, and DPA10401-DPB14901.

[0287] In some embodiments, the amino acid sequence for an MHC class II peptide composition for HIV comprises SEQ ID NO: 61, wherein a peptide with this sequence is configured to bind in vivo to one or more HLA alleles present in a subject, and wherein the one or more HLA alleles present in the subject is selected from the group consisting of DPA10103-DPB10101, DPA10103-DPB10201, DPA10103-DPB10202, DPA10103-DPB10401, DPA10103-DPB10402, DPA10103-DPB10501, DPA10103-DPB110501, DPA10103-DPB112601, DPA10103-DPB11501, DPA10103-DPB11601, DPA10103-DPB11801, DPA10103-DPB11901, DPA10103-DPB12301, DPA10103-DPB13101, DPA10103-DPB13401, DPA10103-DPB13901, DPA10103-DPB14001, DPA10103-DPB14101, DPA10103-DPB14801, DPA10103-DPB14901, DPA10103-DPB15001, DPA10103-DPB15101, DPA10103-DPB15501, DPA10103-DPB15901, DPA10103-DPB18001, DPA10104-DPB10101, DPA10104-DPB11501, DPA10105-DPB10101, DPA10105-DPB10401, DPA10105-DPB11801, DPA10105-DPB15001, DPA10106-DPB10101, DPA10201-DPB10101, DPA10201-DPB10201, DPA10201-DPB10202, DPA10201-DPB10401, DPA10201-DPB10501, DPA10201-DPB110601, DPA10201-DPB11501, DPA10201-DPB11601, DPA10201-DPB11901, DPA10201-DPB13401, DPA10201-DPB15501, DPA10202-DPB10101, DPA10202-DPB10201, DPA10202-DPB10202, DPA10202-DPB10401, DPA10202-DPB10501, DPA10202-DPB110601, DPA10202-DPB11101, DPA10202-DPB11301, DPA10202-DPB11801, DPA10202-DPB11901, DPA10202-DPB13101, DPA10202-DPB13801, DPA10202-DPB15501, DPA10202-DPB16501, DPA10301-DPB10101, DPA10301-DPB10201, DPA10301-DPB10202, DPA10301-DPB10401, DPA10301-DPB10402, DPA10301-DPB110501, DPA10301-DPB110601, DPA10301-DPB11101, DPA10301-DPB11301, DPA10301-DPB11801, DPA10301-DPB12301, DPA10301-DPB13901, DPA10301-DPB14001, DPA10301-DPB14901, DPA10301-DPB15501, DPA10301-DPB16501, DPA10301-DPB17501, DPA10301-DPB18001, DPA10401-DPB10101, DPA10401-DPB10201, DPA10401-DPB10202, DPA10401-DPB10402, DPA10401-DPB10501, DPA10401-DPB110501, and DPA10401-DPB14901.

[0288] In some embodiments, the amino acid sequence for an MHC class II peptide composition for HIV comprises SEQ ID NO: 62, wherein a peptide with this sequence is configured to bind in vivo to one or more HLA alleles present in a subject, and wherein the one or more HLA alleles present in the subject is selected from the group consisting of DRB1_0101, DRB1_0405, DRB1_1001, DPA10103-DPB10201, DPA10103-DPB10202, DPA10103-DPB10401, DPA10103-DPB112601, DPA10103-DPB11501, DPA10103-DPB11601, DPA10103-DPB11901, DPA10103-DPB12301, DPA10103-DPB13101, DPA10103-DPB13401, DPA10103-DPB13901, DPA10103-DPB14001, DPA10103-DPB14801, DPA10103-DPB15501, DPA10104-DPB11501, DPA10105-DPB10401, DPA10106-DPB10101, DPA10201-DPB10101, DPA10201-DPB10202, DPA10201-DPB110601, DPA10201-DPB11501, DPA10201-DPB11601, DPA10201-DPB11901, DPA10201-DPB15501, DPA10202-DPB10101, DPA10202-DPB10201, DPA10202-DPB10202, DPA10202-DPB10401, DPA10202-DPB10501, DPA10202-DPB110601, DPA10202-DPB11101, DPA10202-DPB11301, DPA10202-DPB11901, DPA10202-DPB13101, DPA10202-DPB13801, DPA10202-DPB15501, DPA10202-DPB16501, DPA10301-DPB10101, DPA10301-DPB10201, DPA10301-DPB10202, DPA10301-DPB10401, DPA10301-DPB10402, DPA10301-DPB110501, DPA10301-DPB110601, DPA10301-DPB11101, DPA10301-DPB11301, DPA10301-DPB11801, DPA10301-DPB12301, DPA10301-DPB13901, DPA10301-DPB14001, DPA10301-DPB14901, DPA10301-DPB15501, DPA10301-DPB16501, DPA10301-DPB17501, DPA10301-DPB18001, DPA10401-DPB10201, DPA10401-DPB10202, DPA10401-DPB10402, DPA10401-DPB10501, DPA10401-DPB110501, and DPA10401-DPB14901.

[0289] In some embodiments, the amino acid sequence for an MHC class II peptide composition for HIV comprises SEQ ID NO: 63, wherein a peptide with this sequence is configured to bind in vivo to one or more HLA alleles present in a subject, and wherein the one or more HLA alleles present in the subject is selected from the group consisting of DRB1_1602, DQA10101-DQB10501, DQA10101-DQB10503, DQA10102-DQB10501, DQA10102-DQB10502, DQA10102-DQB10503, DQA10103-DQB10501, DQA10104-DQB10501, DQA10104-DQB10503, DQA10105-DQB10501, DQA10107-DQB10503, and DQA10505-DQB10402.

[0290] In some embodiments, the amino acid sequence for an MHC class II peptide composition for HIV comprises SEQ ID NO: 64, wherein a peptide with this sequence is configured to bind in vivo to one or more HLA alleles present in a subject, and wherein the one or more HLA alleles present in the subject is selected from the group consisting of DQA10101-DQB10501, DQA10101-DQB10503, DQA10102-DQB10501, DQA10102-DQB10502, DQA10102-DQB10503, DQA10103-DQB10501, DQA10104-DQB10501, DQA10104-DQB10503, DQA10105-DQB10501, and DQA10107-DQB10503.

[0291] In some embodiments, the amino acid sequence for an MHC class II peptide composition for HIV comprises SEQ ID NO: 65, wherein a peptide with this sequence is configured to bind in vivo to one or more HLA alleles present in a subject, and wherein the one or more HLA alleles present in the subject is selected from the group consisting of DRB1_0101, DPA10103-DPB10101, DPA10103-DPB10201, DPA10103-DPB10202, DPA10103-DPB10401, DPA10103-DPB10402, DPA10103-DPB10501, DPA10103-DPB110501, DPA10103-DPB112601, DPA10103-DPB11501, DPA10103-DPB11601, DPA10103-DPB11801, DPA10103-DPB11901, DPA10103-DPB12301, DPA10103-DPB13101, DPA10103-DPB13401, DPA10103-DPB13901, DPA10103-DPB14001, DPA10103-DPB14101, DPA10103-DPB14801, DPA10103-DPB14901, DPA10103-DPB15001, DPA10103-DPB15101, DPA10103-DPB15501, DPA10103-DPB15901, DPA10103-DPB18001, DPA10104-DPB10101, DPA10104-DPB11501, DPA10105-DPB10101, DPA10105-DPB10401, DPA10105-DPB11801, DPA10105-DPB15001, DPA10106-DPB10101, DPA10201-DPB10101, DPA10201-DPB10201, DPA10201-DPB10202, DPA10201-DPB10401, DPA10201-DPB10501, DPA10201-DPB110601, DPA10201-DPB11501, DPA10201-DPB11601, DPA10201-DPB11901, DPA10201-DPB13401, DPA10201-DPB15501, DPA10202-DPB10101, DPA10202-DPB10201, DPA10202-DPB10202, DPA10202-DPB10401, DPA10202-DPB10501, DPA10202-DPB110601, DPA10202-DPB11101, DPA10202-DPB11301, DPA10202-DPB11801, DPA10202-DPB11901, DPA10202-DPB13101, DPA10202-DPB13801, DPA10202-DPB15501, DPA10202-DPB16501, DPA10301-DPB10101, DPA10301-DPB10201, DPA10301-DPB10202, DPA10301-DPB10401, DPA10301-DPB10402, DPA10301-DPB110501, DPA10301-DPB110601, DPA10301-DPB11101, DPA10301-DPB11301, DPA10301-DPB11801, DPA10301-DPB12301, DPA10301-DPB13901, DPA10301-DPB14001, DPA10301-DPB14901, DPA10301-DPB15501, DPA10301-DPB16501, DPA10301-DPB17501, DPA10301-DPB18001, DPA10401-DPB10101, DPA10401-DPB10201, DPA10401-DPB10202, DPA10401-DPB10402, DPA10401-DPB10501, DPA10401-DPB110501, and DPA10401-DPB14901.

[0292] In some embodiments, the amino acid sequence for an MHC class II peptide composition for HIV comprises SEQ ID NO: 66, wherein a peptide with this sequence is configured to bind in vivo to one or more HLA alleles present in a subject, and wherein the one or more HLA alleles present in the subject is selected from the group consisting of DQA10101-DQB10501, DQA10101-DQB10503, DQA10102-DQB10501, DQA10102-DQB10502, DQA10102-DQB10503, DQA10103-DQB10501, DQA10104-DQB10501, DQA10104-DQB10503, DQA10105-DQB10501, DQA10107-DQB10503, and DQA10505-DQB10402.

[0293] In some embodiments, the amino acid sequence for an MHC class II peptide composition for HIV comprises SEQ ID NO: 67, wherein a peptide with this sequence is configured to bind in vivo to one or more HLA alleles present in a subject, and wherein the one or more HLA alleles present in the subject is selected from the group consisting of DQA10101-DQB10501, DQA10101-DQB10503, DQA10102-DQB10501, DQA10102-DQB10502, DQA10102-DQB10503, DQA10103-DQB10501, DQA10104-DQB10501, DQA10104-DQB10503, DQA10105-DQB10501, and DQA10107-DQB10503.

[0294] In some embodiments, the amino acid sequence for an MHC class II peptide composition for HIV comprises SEQ ID NO: 68, wherein a peptide with this sequence is configured to bind in vivo to one or more HLA alleles present in a subject, and wherein the one or more HLA alleles present in the subject is selected from the group consisting of DRB1_0101, DRB1_0405, DRB1_1001, DPA10103-DPB10201, DPA10103-DPB10202, DPA10103-DPB10401, DPA10103-DPB112601, DPA10103-DPB11501, DPA10103-DPB11601, DPA10103-DPB11901, DPA10103-DPB12301, DPA10103-DPB13401, DPA10103-DPB13901, DPA10103-DPB14001, DPA10103-DPB14101, DPA10103-DPB14801, DPA10103-DPB15501, DPA10104-DPB11501, DPA10105-DPB10401, DPA10106-DPB10101, DPA10201-DPB10101, DPA10201-DPB10201, DPA10201-DPB10202, DPA10201-DPB110601, DPA10201-DPB11501, DPA10201-DPB11601, DPA10201-DPB11901, DPA10201-DPB15501, DPA10202-DPB10101, DPA10202-DPB10201, DPA10202-DPB10202, DPA10202-DPB10401, DPA10202-DPB10501, DPA10202-DPB110601, DPA10202-DPB11101, DPA10202-DPB11301, DPA10202-DPB11801, DPA10202-DPB11901, DPA10202-DPB13101, DPA10202-DPB13801, DPA10202-DPB15501, DPA10202-DPB16501, DPA10301-DPB10101, DPA10301-DPB10201, DPA10301-DPB10202, DPA10301-DPB10401, DPA10301-DPB10402, DPA10301-DPB110501, DPA10301-DPB110601, DPA10301-DPB11101, DPA10301-DPB11301, DPA10301-DPB11801, DPA10301-DPB12301, DPA10301-DPB13901, DPA10301-DPB14001, DPA10301-DPB14901, DPA10301-DPB15501, DPA10301-DPB16501, DPA10301-DPB17501, DPA10301-DPB18001, DPA10401-DPB10201, DPA10401-DPB10202, DPA10401-DPB10402, DPA10401-DPB10501, DPA10401-DPB110501, and DPA10401-DPB14901.

[0295] In some embodiments, the amino acid sequence for an MHC class II peptide composition for HIV comprises SEQ ID NO: 69, wherein a peptide with this sequence is configured to bind in vivo to one or more HLA alleles present in a subject, and wherein the one or more HLA alleles present in the subject is selected from the group consisting of DRB1_0101, DPA10103-DPB10101, DPA10103-DPB10201, DPA10103-DPB10202, DPA10103-DPB10401, DPA10103-DPB10402, DPA10103-DPB10501, DPA10103-DPB110501, DPA10103-DPB112601, DPA10103-DPB11501, DPA10103-DPB11601, DPA10103-DPB11801, DPA10103-DPB11901, DPA10103-DPB12301, DPA10103-DPB13101, DPA10103-DPB13401, DPA10103-DPB13901, DPA10103-DPB14001, DPA10103-DPB14101, DPA10103-DPB14801, DPA10103-DPB14901, DPA10103-DPB15001, DPA10103-DPB15101, DPA10103-DPB15501, DPA10103-DPB15901, DPA10103-DPB18001, DPA10104-DPB10101, DPA10104-DPB11501, DPA10105-DPB10101, DPA10105-DPB10401, DPA10105-DPB11801, DPA10105-DPB15001, DPA10106-DPB10101, DPA10201-DPB10101, DPA10201-DPB10201, DPA10201-DPB10202, DPA10201-DPB10401, DPA10201-DPB10501, DPA10201-DPB110601, DPA10201-DPB11501, DPA10201-DPB11601, DPA10201-DPB11901, DPA10201-DPB13401, DPA10201-DPB15501, DPA10202-DPB10101, DPA10202-DPB10201, DPA10202-DPB10202, DPA10202-DPB10401, DPA10202-DPB10501, DPA10202-DPB110601, DPA10202-DPB11101, DPA10202-DPB11301, DPA10202-DPB11801, DPA10202-DPB11901, DPA10202-DPB13101, DPA10202-DPB13801, DPA10202-DPB15501, DPA10202-DPB16501, DPA10301-DPB10101, DPA10301-DPB10201, DPA10301-DPB10202, DPA10301-DPB10401, DPA10301-DPB10402, DPA10301-DPB110501, DPA10301-DPB110601, DPA10301-DPB11101, DPA10301-DPB11301, DPA10301-DPB11801, DPA10301-DPB12301, DPA10301-DPB13901, DPA10301-DPB14001, DPA10301-DPB14901, DPA10301-DPB15501, DPA10301-DPB16501, DPA10301-DPB17501, DPA10301-DPB18001, DPA10401-DPB10101, DPA10401-DPB10201, DPA10401-DPB10202, DPA10401-DPB10402, DPA10401-DPB10501, DPA10401-DPB110501, and DPA10401-DPB14901.

[0296] In some embodiments, the amino acid sequence for an MHC class II peptide composition for HIV comprises SEQ ID NO: 70, wherein a peptide with this sequence is configured to bind in vivo to one or more HLA alleles present in a subject, and wherein the one or more HLA alleles present in the subject is selected from the group consisting of DRB1_1602, DQA10101-DQB10501, DQA10101-DQB10503, DQA10102-DQB10501, DQA10102-DQB10502, DQA10102-DQB10503, DQA10103-DQB10501, DQA10104-DQB10501, DQA10104-DQB10503, DQA10105-DQB10501, DQA10107-DQB10503, and DQA10505-DQB10402.

[0297] In some embodiments, the amino acid sequence for an MHC class II peptide composition for HIV comprises SEQ ID NO: 71, wherein a peptide with this sequence is configured to bind in vivo to one or more HLA alleles present in a subject, and wherein the one or more HLA alleles present in the subject is selected from the group consisting of DRB1_0101, DRB1_0405, DRB1_1001, DPA10103-DPB10202, DPA10103-DPB10401, DPA10103-DPB10501, DPA10103-DPB112601, DPA10103-DPB11501, DPA10103-DPB12301, DPA10103-DPB13401, DPA10103-DPB13901, DPA10103-DPB14101, DPA10103-DPB15001, DPA10104-DPB11501, DPA10105-DPB10401, DPA10105-DPB15001, DPA10106-DPB10101, DPA10201-DPB10101, DPA10201-DPB11501, DPA10201-DPB15501, DPA10202-DPB10101, DPA10202-DPB10202, DPA10202-DPB10501, DPA10202-DPB110601, DPA10202-DPB11101, DPA10202-DPB11901, DPA10202-DPB13101, DPA10202-DPB13801, DPA10202-DPB16501, DPA10301-DPB10101, DPA10301-DPB10201, DPA10301-DPB10202, DPA10301-DPB10401, DPA10301-DPB10402, DPA10301-DPB110501, DPA10301-DPB110601, DPA10301-DPB11101, DPA10301-DPB11801, DPA10301-DPB12301, DPA10301-DPB13901, DPA10301-DPB14001, DPA10301-DPB14901, DPA10301-DPB15501, DPA10301-DPB16501, DPA10301-DPB17501, DPA10301-DPB18001, and DPA10401-DPB10501.

[0298] In some embodiments, the amino acid sequence for an MHC class II peptide composition for HIV comprises SEQ ID NO: 72, wherein a peptide with this sequence is configured to bind in vivo to one or more HLA alleles present in a subject, and wherein the one or more HLA alleles present in the subject is selected from the group consisting of DRB1_0101, DRB1_0405, DRB1_1001, DPA10103-DPB10101, DPA10103-DPB10201, DPA10103-DPB10202, DPA10103-DPB10401, DPA10103-DPB112601, DPA10103-DPB11501, DPA10103-DPB11601, DPA10103-DPB11901, DPA10103-DPB12301, DPA10103-DPB13101, DPA10103-DPB13901, DPA10103-DPB14801, DPA10103-DPB15001, DPA10103-DPB15501, DPA10104-DPB10101, DPA10104-DPB11501, DPA10105-DPB10101, DPA10105-DPB10401, DPA10105-DPB15001, DPA10106-DPB10101, DPA10201-DPB10101, DPA10201-DPB11501, DPA10202-DPB10101, DPA10202-DPB110601, DPA10202-DPB11101, DPA10202-DPB11301, DPA10202-DPB11901, DPA10202-DPB13101, DPA10202-DPB15501, DPA10202-DPB16501, DPA10301-DPB10101, DPA10301-DPB10201, DPA10301-DPB10202, DPA10301-DPB10401, DPA10301-DPB10402, DPA10301-DPB110501, DPA10301-DPB110601, DPA10301-DPB11101, DPA10301-DPB11301, DPA10301-DPB11801, DPA10301-DPB12301, DPA10301-DPB13901, DPA10301-DPB14001, DPA10301-DPB14901, DPA10301-DPB15501, DPA10301-DPB16501, DPA10301-DPB17501, DPA10301-DPB18001, DPA10401-DPB10101, DPA10401-DPB10201, DPA10401-DPB10202, and DPA10401-DPB10501.

[0299] In some embodiments, the amino acid sequence for an MHC class II peptide composition for HIV comprises SEQ ID NO: 73, wherein a peptide with this sequence is configured to bind in vivo to one or more HLA alleles present in a subject, and wherein the one or more HLA alleles present in the subject is selected from the group consisting of DPA10103-DPB10101, DPA10103-DPB10201, DPA10103-DPB10202, DPA10103-DPB10401, DPA10103-DPB10402, DPA10103-DPB10501, DPA10103-DPB110501, DPA10103-DPB112601, DPA10103-DPB11501, DPA10103-DPB11601, DPA10103-DPB11801, DPA10103-DPB11901, DPA10103-DPB12301, DPA10103-DPB13101, DPA10103-DPB13401, DPA10103-DPB13901, DPA10103-DPB14001, DPA10103-DPB14101, DPA10103-DPB14801, DPA10103-DPB14901, DPA10103-DPB15001, DPA10103-DPB15101, DPA10103-DPB15501, DPA10103-DPB15901, DPA10103-DPB18001, DPA10104-DPB10101, DPA10104-DPB11501, DPA10105-DPB10101, DPA10105-DPB10401, DPA10105-DPB11801, DPA10105-DPB15001, DPA10106-DPB10101, DPA10201-DPB10101, DPA10201-DPB10201, DPA10201-DPB10202, DPA10201-DPB10401, DPA10201-DPB10501, DPA10201-DPB110601, DPA10201-DPB11501, DPA10201-DPB11601, DPA10201-DPB11901, DPA10201-DPB13401, DPA10201-DPB15501, DPA10202-DPB10101, DPA10202-DPB10201, DPA10202-DPB10202, DPA10202-DPB10401, DPA10202-DPB10501, DPA10202-DPB110601, DPA10202-DPB11101, DPA10202-DPB11301, DPA10202-DPB11801, DPA10202-DPB11901, DPA10202-DPB13101, DPA10202-DPB13801, DPA10202-DPB15501, DPA10202-DPB16501, DPA10301-DPB10101, DPA10301-DPB10201, DPA10301-DPB10202, DPA10301-DPB10401, DPA10301-DPB10402, DPA10301-DPB110501, DPA10301-DPB110601, DPA10301-DPB11101, DPA10301-DPB11301, DPA10301-DPB11801, DPA10301-DPB12301, DPA10301-DPB13901, DPA10301-DPB14001, DPA10301-DPB14901, DPA10301-DPB15501, DPA10301-DPB16501, DPA10301-DPB17501, DPA10301-DPB18001, DPA10401-DPB10101, DPA10401-DPB10201, DPA10401-DPB10202, DPA10401-DPB10402, DPA10401-DPB10501, DPA10401-DPB110501, and DPA10401-DPB14901.

[0300] In some embodiments, the amino acid sequence for an MHC class II peptide composition for HIV comprises SEQ ID NO: 74, wherein a peptide with this sequence is configured to bind in vivo to one or more HLA alleles present in a subject, and wherein the one or more HLA alleles present in the subject is selected from the group consisting of DRB1_1602, DQA10101-DQB10501, DQA10101-DQB10503, DQA10102-DQB10501, DQA10102-DQB10502, DQA10102-DQB10503, DQA10103-DQB10501, DQA10104-DQB10501, DQA10104-DQB10503, DQA10105-DQB10501, DQA10107-DQB10503, and DQA10505-DQB10402.

[0301] In some embodiments, the amino acid sequence for an MHC class II peptide composition for HIV comprises SEQ ID NO: 75, wherein a peptide with this sequence is configured to bind in vivo to one or more HLA alleles present in a subject, and wherein the one or more HLA alleles present in the subject is selected from the group consisting of DRB1_0101, DRB1_0405, DRB1_1001, DPA10103-DPB10202, DPA10103-DPB11501, DPA10103-DPB11601, DPA10103-DPB13401, DPA10103-DPB14001, DPA10104-DPB11501, DPA10201-DPB10202, DPA10201-DPB110601, DPA10201-DPB11501, DPA10201-DPB11601, DPA10201-DPB11901, DPA10201-DPB15501, DPA10202-DPB10101, DPA10202-DPB10201, DPA10202-DPB10202, DPA10202-DPB10501, DPA10202-DPB110601, DPA10202-DPB11101, DPA10202-DPB11801, DPA10202-DPB11901, DPA10202-DPB13101, DPA10202-DPB13801, DPA10202-DPB15501, DPA10202-DPB16501, DPA10301-DPB10201, DPA10301-DPB10202, DPA10301-DPB11801, DPA10301-DPB14001, DPA10401-DPB10202, DPA10401-DPB10402, DPA10401-DPB110501, and DPA10401-DPB14901.

[0302] In some embodiments, the amino acid sequence for an MHC class II peptide composition for HIV comprises SEQ ID NO: 76, wherein a peptide with this sequence is configured to bind in vivo to one or more HLA alleles present in a subject, and wherein the one or more HLA alleles present in the subject is selected from the group consisting of DRB1_0101, DRB1_0405, DRB1_1001, DPA10103-DPB10201, DPA10103-DPB10202, DPA10103-DPB10401, DPA10103-DPB10402, DPA10103-DPB10501, DPA10103-DPB110501, DPA10103-DPB112601, DPA10103-DPB11501, DPA10103-DPB11601, DPA10103-DPB11801, DPA10103-DPB11901, DPA10103-DPB12301, DPA10103-DPB13401, DPA10103-DPB13901, DPA10103-DPB14001, DPA10103-DPB14101, DPA10103-DPB14801, DPA10103-DPB14901, DPA10103-DPB15101, DPA10103-DPB15901, DPA10103-DPB18001, DPA10104-DPB11501, DPA10105-DPB10401, DPA10105-DPB11801, DPA10106-DPB10101, DPA10201-DPB10101, DPA10201-DPB10201, DPA10201-DPB10202, DPA10201-DPB10401, DPA10201-DPB10501, DPA10201-DPB110601, DPA10201-DPB11501, DPA10201-DPB11601, DPA10201-DPB11901, DPA10201-DPB13401, DPA10201-DPB15501, DPA10202-DPB10101, DPA10202-DPB10201, DPA10202-DPB10202, DPA10202-DPB10401, DPA10202-DPB10501, DPA10202-DPB110601, DPA10202-DPB11101, DPA10202-DPB11301, DPA10202-DPB11801, DPA10202-DPB11901, DPA10202-DPB13101, DPA10202-DPB13801, DPA10202-DPB15501, DPA10202-DPB16501, DPA10301-DPB10101, DPA10301-DPB10201, DPA10301-DPB10202, DPA10301-DPB10401, DPA10301-DPB10402, DPA10301-DPB110501, DPA10301-DPB110601, DPA10301-DPB11101, DPA10301-DPB11301, DPA10301-DPB11801, DPA10301-DPB12301, DPA10301-DPB13901, DPA10301-DPB14001, DPA10301-DPB14901, DPA10301-DPB15501, DPA10301-DPB16501, DPA10301-DPB17501, DPA10301-DPB18001, DPA10401-DPB10201, DPA10401-DPB10202, DPA10401-DPB10402, DPA10401-DPB10501, DPA10401-DPB110501, and DPA10401-DPB14901.

[0303] In some embodiments, the amino acid sequence for an MHC class II peptide composition for HIV comprises SEQ ID NO: 77, wherein a peptide with this sequence is configured to bind in vivo to one or more HLA alleles present in a subject, and wherein the one or more HLA alleles present in the subject is selected from the group consisting of DRB1_0101, DRB1_0405, DRB1_1001, DPA10103-DPB11501, DPA10103-DPB11801, DPA10103-DPB13401, DPA10104-DPB11501, DPA10105-DPB11801, DPA10201-DPB11501, DPA10202-DPB10101, DPA10202-DPB10202, DPA10202-DPB10401, DPA10202-DPB10501, DPA10202-DPB110601, DPA10202-DPB11801, DPA10202-DPB11901, DPA10202-DPB13101, DPA10202-DPB13801, DPA10202-DPB15501, DPA10202-DPB16501, DPA10301-DPB10201, DPA10301-DPB10202, DPA10301-DPB10402, DPA10301-DPB110501, DPA10301-DPB11801, DPA10301-DPB14001, DPA10301-DPB14901, DPA10301-DPB17501, and DPA10301-DPB18001.

[0304] In some embodiments, the amino acid sequence for an MHC class II peptide composition for HIV comprises SEQ ID NO: 78, wherein a peptide with this sequence is configured to bind in vivo to one or more HLA alleles present in a subject, and wherein the one or more HLA alleles present in the subject is selected from the group consisting of DRB1_0101, DPA10103-DPB10101, DPA10103-DPB10201, DPA10103-DPB10202, DPA10103-DPB10401, DPA10103-DPB10402, DPA10103-DPB10501, DPA10103-DPB110501, DPA10103-DPB112601, DPA10103-DPB11501, DPA10103-DPB11601, DPA10103-DPB11801, DPA10103-DPB11901, DPA10103-DPB12301, DPA10103-DPB13101, DPA10103-DPB13401, DPA10103-DPB13901, DPA10103-DPB14001, DPA10103-DPB14101, DPA10103-DPB14801, DPA10103-DPB14901, DPA10103-DPB15001, DPA10103-DPB15101, DPA10103-DPB15501, DPA10103-DPB15901, DPA10103-DPB18001, DPA10104-DPB10101, DPA10104-DPB11501, DPA10105-DPB10101, DPA10105-DPB10401, DPA10105-DPB11801, DPA10105-DPB15001, DPA10106-DPB10101, DPA10201-DPB10101, DPA10201-DPB10201, DPA10201-DPB10202, DPA10201-DPB10401, DPA10201-DPB10501, DPA10201-DPB110601, DPA10201-DPB11501, DPA10201-DPB11601, DPA10201-DPB11901, DPA10201-DPB13401, DPA10201-DPB15501, DPA10202-DPB10101, DPA10202-DPB10201, DPA10202-DPB10202, DPA10202-DPB10401, DPA10202-DPB10501, DPA10202-DPB110601, DPA10202-DPB11101, DPA10202-DPB11301, DPA10202-DPB11801, DPA10202-DPB11901, DPA10202-DPB13101, DPA10202-DPB13801, DPA10202-DPB15501, DPA10202-DPB16501, DPA10301-DPB10101, DPA10301-DPB10201, DPA10301-DPB10202, DPA10301-DPB10401, DPA10301-DPB10402, DPA10301-DPB110501, DPA10301-DPB110601, DPA10301-DPB11101, DPA10301-DPB11301, DPA10301-DPB11801, DPA10301-DPB12301, DPA10301-DPB13901, DPA10301-DPB14001, DPA10301-DPB14901, DPA10301-DPB15501, DPA10301-DPB16501, DPA10301-DPB17501, DPA10301-DPB18001, DPA10401-DPB10101, DPA10401-DPB10201, DPA10401-DPB10202, DPA10401-DPB10402, DPA10401-DPB10501, DPA10401-DPB110501, and DPA10401-DPB14901.

[0305] In some embodiments, the amino acid sequence for an MHC class II peptide composition for HIV comprises SEQ ID NO: 79, wherein a peptide with this sequence is configured to bind in vivo to one or more HLA alleles present in a subject, and wherein the one or more HLA alleles present in the subject is selected from the group consisting of DRB1_0101, DRB1_1001, DPA10103-DPB10101, DPA10103-DPB10201, DPA10103-DPB10202, DPA10103-DPB10401, DPA10103-DPB10402, DPA10103-DPB10501, DPA10103-DPB110501, DPA10103-DPB112601, DPA10103-DPB11501, DPA10103-DPB11601, DPA10103-DPB11801, DPA10103-DPB11901, DPA10103-DPB12301, DPA10103-DPB13101, DPA10103-DPB13401, DPA10103-DPB13901, DPA10103-DPB14001, DPA10103-DPB14101, DPA10103-DPB14801, DPA10103-DPB14901, DPA10103-DPB15001, DPA10103-DPB15101, DPA10103-DPB15501, DPA10103-DPB15901, DPA10103-DPB18001, DPA10104-DPB10101, DPA10104-DPB11501, DPA10105-DPB10101, DPA10105-DPB10401, DPA10105-DPB11801, DPA10105-DPB15001, DPA10106-DPB10101, DPA10201-DPB10101, DPA10201-DPB10201, DPA10201-DPB10202, DPA10201-DPB10401, DPA10201-DPB10501, DPA10201-DPB110601, DPA10201-DPB11501, DPA10201-DPB11601, DPA10201-DPB11901, DPA10201-DPB13401, DPA10201-DPB15501, DPA10202-DPB10101, DPA10202-DPB10201, DPA10202-DPB10202, DPA10202-DPB10401, DPA10202-DPB10501, DPA10202-DPB110601, DPA10202-DPB11101, DPA10202-DPB11301, DPA10202-DPB11801, DPA10202-DPB11901, DPA10202-DPB13101, DPA10202-DPB13801, DPA10202-DPB15501, DPA10202-DPB16501, DPA10301-DPB10101, DPA10301-DPB10201, DPA10301-DPB10202, DPA10301-DPB10401, DPA10301-DPB10402, DPA10301-DPB110501, DPA10301-DPB110601, DPA10301-DPB11101, DPA10301-DPB11301, DPA10301-DPB11801, DPA10301-DPB12301, DPA10301-DPB13901, DPA10301-DPB14001, DPA10301-DPB14901, DPA10301-DPB15501, DPA10301-DPB16501, DPA10301-DPB17501, DPA10301-DPB18001, DPA10401-DPB10101, DPA10401-DPB10201, DPA10401-DPB10202, DPA10401-DPB10402, DPA10401-DPB10501, DPA10401-DPB110501, and DPA10401-DPB14901.

[0306] In some embodiments, the amino acid sequence for an MHC class II peptide composition for HIV comprises SEQ ID NO: 80, wherein a peptide with this sequence is configured to bind in vivo to one or more HLA alleles present in a subject, and wherein the one or more HLA alleles present in the subject is selected from the group consisting of DRB1_1602, DQA10101-DQB10501, DQA10101-DQB10503, DQA10102-DQB10501, DQA10102-DQB10502, DQA10102-DQB10503, DQA10103-DQB10501, DQA10104-DQB10501, DQA10104-DQB10503, DQA10105-DQB10501, DQA10107-DQB10503, and DQA10505-DQB10402.

[0307] In some embodiments, the amino acid sequence for an MHC class II peptide composition for HIV comprises SEQ ID NO: 81, wherein a peptide with this sequence is configured to bind in vivo to one or more HLA alleles present in a subject, and wherein the one or more HLA alleles present in the subject is selected from the group consisting of DRB1_1602, DQA10101-DQB10501, DQA10101-DQB10503, DQA10102-DQB10501, DQA10102-DQB10502, DQA10102-DQB10503, DQA10103-DQB10501, DQA10104-DQB10501, DQA10104-DQB10503, DQA10105-DQB10501, DQA10107-DQB10503, and DQA10505-DQB10402.

[0308] In some embodiments, the amino acid sequence for an MHC class II peptide composition for HIV comprises SEQ ID NO: 82, wherein a peptide with this sequence is configured to bind in vivo to one or more HLA alleles present in a subject, and wherein the one or more HLA alleles present in the subject is selected from the group consisting of DRB1_0101, DRB1_1001, DPA10103-DPB10101, DPA10103-DPB10201, DPA10103-DPB10202, DPA10103-DPB10401, DPA10103-DPB10402, DPA10103-DPB10501, DPA10103-DPB110501, DPA10103-DPB112601, DPA10103-DPB11501, DPA10103-DPB11601, DPA10103-DPB11801, DPA10103-DPB11901, DPA10103-DPB12301, DPA10103-DPB13101, DPA10103-DPB13401, DPA10103-DPB13901, DPA10103-DPB14001, DPA10103-DPB14101, DPA10103-DPB14801, DPA10103-DPB14901, DPA10103-DPB15001, DPA10103-DPB15101, DPA10103-DPB15501, DPA10103-DPB15901, DPA10103-DPB18001, DPA10104-DPB10101, DPA10104-DPB11501, DPA10105-DPB10101, DPA10105-DPB10401, DPA10105-DPB11801, DPA10105-DPB15001, DPA10106-DPB10101, DPA10201-DPB10101, DPA10201-DPB10201, DPA10201-DPB10202, DPA10201-DPB10401, DPA10201-DPB10501, DPA10201-DPB110601, DPA10201-DPB11501, DPA10201-DPB11601, DPA10201-DPB11901, DPA10201-DPB13401, DPA10201-DPB15501, DPA10202-DPB10101, DPA10202-DPB10201, DPA10202-DPB10202, DPA10202-DPB10401, DPA10202-DPB10501, DPA10202-DPB110601, DPA10202-DPB11101, DPA10202-DPB11301, DPA10202-DPB11801, DPA10202-DPB11901, DPA10202-DPB13101, DPA10202-DPB13801, DPA10202-DPB15501, DPA10202-DPB16501, DPA10301-DPB10101, DPA10301-DPB10201, DPA10301-DPB10202, DPA10301-DPB10401, DPA10301-DPB10402, DPA10301-DPB110501, DPA10301-DPB110601, DPA10301-DPB11101, DPA10301-DPB11301, DPA10301-DPB11801, DPA10301-DPB12301, DPA10301-DPB13901, DPA10301-DPB14001, DPA10301-DPB14901, DPA10301-DPB15501, DPA10301-DPB16501, DPA10301-DPB17501, DPA10301-DPB18001, DPA10401-DPB10101, DPA10401-DPB10201, DPA10401-DPB10202, DPA10401-DPB10402, DPA10401-DPB10501, DPA10401-DPB110501, and DPA10401-DPB14901.

[0309] In some embodiments, the amino acid sequence for an MHC class II peptide composition for HIV comprises SEQ ID NO: 83, wherein a peptide with this sequence is configured to bind in vivo to one or more HLA alleles present in a subject, and wherein the one or more HLA alleles present in the subject is selected from the group consisting of DRB1_0405, DRB1_1001, DPA10103-DPB10101, DPA10103-DPB10201, DPA10103-DPB10202, DPA10103-DPB10401, DPA10103-DPB112601, DPA10103-DPB11501, DPA10103-DPB11601, DPA10103-DPB11901, DPA10103-DPB12301, DPA10103-DPB13101, DPA10103-DPB13401, DPA10103-DPB13901, DPA10103-DPB14001, DPA10103-DPB14101, DPA10103-DPB14801, DPA10103-DPB15001, DPA10103-DPB15501, DPA10104-DPB10101, DPA10104-DPB11501, DPA10105-DPB10101, DPA10105-DPB10401, DPA10105-DPB15001, DPA10106-DPB10101, DPA10201-DPB10101, DPA10201-DPB110601, DPA10201-DPB11501, DPA10201-DPB11901, DPA10201-DPB15501, DPA10202-DPB10101, DPA10202-DPB10202, DPA10202-DPB110601, DPA10202-DPB11101, DPA10202-DPB11301, DPA10202-DPB11901, DPA10202-DPB13101, DPA10202-DPB15501, DPA10202-DPB16501, DPA10301-DPB10101, DPA10301-DPB10201, DPA10301-DPB10202, DPA10301-DPB10401, DPA10301-DPB10402, DPA10301-DPB110501, DPA10301-DPB110601, DPA10301-DPB11101, DPA10301-DPB11301, DPA10301-DPB11801, DPA10301-DPB12301, DPA10301-DPB13901, DPA10301-DPB14001, DPA10301-DPB14901, DPA10301-DPB15501, DPA10301-DPB16501, DPA10301-DPB17501, DPA10301-DPB18001, DPA10401-DPB10101, DPA10401-DPB10201, DPA10401-DPB10202, and DPA10401-DPB10501.

[0310] In some embodiments, the amino acid sequence for an MHC class II peptide composition for HIV comprises SEQ ID NO: 84, wherein a peptide with this sequence is configured to bind in vivo to one or more HLA alleles present in a subject, and wherein the one or more HLA alleles present in the subject is selected from the group consisting of DRB1_0101, DRB1_0405, DRB1_1001, DPA10103-DPB11501, DPA10104-DPB11501, DPA10201-DPB11501, DPA10202-DPB10101, DPA10202-DPB110601, DPA10202-DPB11101, DPA10202-DPB11901, DPA10202-DPB13101, DPA10301-DPB11801, and DPA10301-DPB14001.

[0311] In some embodiments, the amino acid sequence for an MHC class II peptide composition for HIV comprises SEQ ID NO: 85, wherein a peptide with this sequence is configured to bind in vivo to one or more HLA alleles present in a subject, and wherein the one or more HLA alleles present in the subject is selected from the group consisting of DRB1_1602, DQA10101-DQB10501, DQA10101-DQB10503, DQA10102-DQB10501, DQA10102-DQB10502, DQA10102-DQB10503, DQA10103-DQB10501, DQA10104-DQB10501, DQA10104-DQB10503, DQA10105-DQB10501, DQA10107-DQB10503, and DQA10505-DQB10402.

[0312] In some embodiments, the amino acid sequence for an MHC class II peptide composition for HIV comprises SEQ ID NO: 86, wherein a peptide with this sequence is configured to bind in vivo to one or more HLA alleles present in a subject, and wherein the one or more HLA alleles present in the subject is selected from the group consisting of DRB1_1602, DQA10101-DQB10501, DQA10101-DQB10503, DQA10102-DQB10501, DQA10102-DQB10502, DQA10102-DQB10503, DQA10103-DQB10501, DQA10104-DQB10501, DQA10104-DQB10503, DQA10105-DQB10501, DQA10107-DQB10503, and DQA10505-DQB10402.

[0313] In some embodiments, the amino acid sequence for an MHC class II peptide composition for HIV comprises SEQ ID NO: 87, wherein a peptide with this sequence is configured to bind in vivo to one or more HLA alleles present in a subject, and wherein the one or more HLA alleles present in the subject is selected from the group consisting of DRB1_1001, DPA10103-DPB10101, DPA10103-DPB10201, DPA10103-DPB10202, DPA10103-DPB10401, DPA10103-DPB112601, DPA10103-DPB11501, DPA10103-DPB11601, DPA10103-DPB11901, DPA10103-DPB12301, DPA10103-DPB13101, DPA10103-DPB13401, DPA10103-DPB13901, DPA10103-DPB14001, DPA10103-DPB14101, DPA10103-DPB14801, DPA10103-DPB15001, DPA10103-DPB15901, DPA10104-DPB10101, DPA10104-DPB11501, DPA10105-DPB10101, DPA10105-DPB10401, DPA10105-DPB15001, DPA10106-DPB10101, DPA10201-DPB10101, DPA10201-DPB110601, DPA10201-DPB11501, DPA10201-DPB11601, DPA10201-DPB11901, DPA10202-DPB10101, DPA10202-DPB10201, DPA10202-DPB10202, DPA10202-DPB10401, DPA10202-DPB110601, DPA10202-DPB11901, DPA10202-DPB13101, DPA10202-DPB16501, DPA10301-DPB10101, DPA10301-DPB10201, DPA10301-DPB10202, DPA10301-DPB10401, DPA10301-DPB10402, DPA10301-DPB110501, DPA10301-DPB110601, DPA10301-DPB11801, DPA10301-DPB12301, DPA10301-DPB13901, DPA10301-DPB14001, DPA10301-DPB14901, DPA10301-DPB15501, DPA10301-DPB16501, DPA10301-DPB17501, DPA10301-DPB18001, DPA10401-DPB10101, DPA10401-DPB10201, DPA10401-DPB10202, DPA10401-DPB10402, DPA10401-DPB10501, DPA10401-DPB110501, and DPA10401-DPB14901.

TABLE 1
Example Composition Peptides (MHC class I)

| | | | | Hetero- | Hetero- | | |
|---|---|---|---|---|---|---|---|
| | Sequence | | | clitic | clitic | | |
| | corres- | | | Modifi- | Modifi- | Vaccine | Vaccine |
| | ponding | | Seed | action | cation | Sizes | Sizes |
| SEQ ID NO | to SEQ ID | Seed | SEQ ID NO | P2 | C-term | (Set 1) | (Set 2) |
| SEQ ID NO: 1 | WAVNDIQKM | WTVNDIQKL | SEQ ID NO: 1211 | T2A | L9M | 1-3, 9-30 | |
| SEQ ID NO: 2 | VSDSQYAL | VTDSQYAL | SEQ ID NO: 1170 | T2S | — | 3-30 | 18-21 |
| SEQ ID NO: 3 | TMNDIQKLL | TVNDIQKLV | SEQ ID NO: 56 | V2M | V9L | 4, 14-30 | |
| SEQ ID NO: 4 | WAVNDIQKL | WTVNDIQKL | SEQ ID NO: 1211 | T2A | — | 4-30 | |
| SEQ ID NO: 5 | TTNDIQKLVGK | TVNDIQKLVGK | SEQ ID NO: 55 | V2T | — | 5-30 | 23-30 |
| SEQ ID NO: 6 | EVHPDKWTV | ELHPDKWTV | SEQ ID NO: 246 | L2V | — | 5-30 | |
| SEQ ID NO: 7 | TMNDIQKLI | TVNDIQKLV | SEQ ID NO: 56 | V2M | V9I | 5-30 | |
| SEQ ID NO: 8 | WQVNDIQKL | WTVNDIQKL | SEQ ID NO: 1211 | T2Q | — | 6-13, | |
| | | | | | | 18-20, 23, | |
| | | | | | | 27-30 | |
| SEQ ID NO: 9 | WSVNDIQKY | WTVNDIQKL | SEQ ID NO: 1211 | T2S | L9Y | 7-12, | |
| | | | | | | 14-16, | |
| | | | | | | 19-30 | |
| SEQ ID NO: 10 | TMNDIQKLV | TVNDIQKLV | SEQ ID NO: 56 | V2M | — | 10-30 | 2-30 |
| SEQ ID NO: 11 | VADSQYAM | VTDSQYAL | SEQ ID NO: 1170 | T2A | L8M | 11-30 | |
| SEQ ID NO: 12 | ETHPDKWTV | ELHPDKWTV | SEQ ID NO: 246 | L2T | — | 12-30 | |
| SEQ ID NO: 13 | WMVNDIQKL | WTVNDIQKL | SEQ ID NO: 1211 | T2M | — | 13-30 | |
| SEQ ID NO: 14 | WSVNDIQKF | WTVNDIQKL | SEQ ID NO: 1211 | T2S | L9F | 13, 17-30 | |
| SEQ ID NO: 15 | WQVNDIQKI | WTVNDIQKL | SEQ ID NO: 1211 | T2Q | L9I | 14-16, | |
| | | | | | | 24-26 | |
| SEQ ID NO: 16 | VADSQYAL | VTDSQYAL | SEQ ID NO: 1170 | T2A | — | 15-30 | 5-30 |
| SEQ ID NO: 17 | EIHPDKWTV | ELHPDKWTV | SEQ ID NO: 246 | L2I | — | 16-30 | |
| SEQ ID NO: 18 | TSNDIQKLVGR | TVNDIQKLVGK | SEQ ID NO: 55 | V2S | K11R | 17-19, | |
| | | | | | | 21-30 | |
| SEQ ID NO: 19 | WLVNDIQKI | WTVNDIQKL | SEQ ID NO: 1211 | T2L | L9I | 17-19, | |
| | | | | | | 21-30 | |
| SEQ ID NO: 20 | TLNDIQKLV | TVNDIQKLV | SEQ ID NO: 56 | V2L | — | 20-30 | 12-30 |
| SEQ ID NO: 21 | TTNDIQKLVGR | TVNDIQKLVGK | SEQ ID NO: 55 | V2T | K11R | 20, 27-30 | |
| SEQ ID NO: 22 | WQVNDIQKV | WTVNDIQKL | SEQ ID NO: 1211 | T2Q | L9V | 20, 28-30 | |
| SEQ ID NO: 23 | TTNDIQKLV | TVNDIQKLV | SEQ ID NO: 56 | V2T | — | 21-30 | 24-30 |
| SEQ ID NO: 24 | WMVNDIQKV | WTVNDIQKL | SEQ ID NO: 1211 | T2M | L9V | 21-30 | |
| SEQ ID NO: 25 | TVNDIQKLVGR | TVNDIQKLVGK | SEQ ID NO: 55 | — | K11R | 22-30 | 4-30 |
| SEQ ID NO: 26 | WSVNDIQKM | WTVNDIQKL | SEQ ID NO: 1211 | T2S | L9M | 24-26 | |
| SEQ ID NO: 27 | TLNDIQKLL | TVNDIQKLV | SEQ ID NO: 56 | V2L | V9L | 25-30 | 19-30 |
| SEQ ID NO: 28 | WAVNDIQKF | WTVNDIQKL | SEQ ID NO: 1211 | T2A | L9F | 27-30 | |
| SEQ ID NO: 29 | WTVNDIQKY | WTVNDIQKL | SEQ ID NO: 1211 | — | L9Y | 29 | |
| SEQ ID NO: 30 | WTVNDIQKW | WTVNDIQKL | SEQ ID NO: 1211 | — | L9W | 30 | 8-14 |
| SEQ ID NO: 31 | WVVNDIQKW | WTVNDIQKL | SEQ ID NO: 1211 | T2V | L9W | 30 | |
| SEQ ID NO: 32 | TANDIQKLL | TVNDIQKLV | SEQ ID NO: 56 | V2A | V9L | | 1-30 |
| SEQ ID NO: 33 | VYDSQYAL | VTDSQYAL | SEQ ID NO: 1170 | T2Y | — | | 3-30 |
| SEQ ID NO: 34 | YTVLPQGWK | YNVLPQGWK | SEQ ID NO: 1242 | N2T | — | | 6-30 |
| SEQ ID NO: 35 | WVVNDIQKV | WTVNDIQKL | SEQ ID NO: 1211 | T2V | L9V | | 8-30 |
| SEQ ID NO: 36 | DVQKLVGKY | DIQKLVGKL | SEQ ID NO: 194 | I2V | L9Y | | 9-30 |
| SEQ ID NO: 37 | TANDIQKLM | TVNDIQKLV | SEQ ID NO: 56 | V2A | V9M | | 10-30 |
| SEQ ID NO: 38 | VFDSQYAL | VTDSQYAL | SEQ ID NO: 1170 | T2F | — | | 11-30 |
| SEQ ID NO: 39 | TYNDIQKLL | TVNDIQKLV | SEQ ID NO: 56 | V2Y | V9L | | 13-30 |
| SEQ ID NO: 40 | TYNDIQKLVGR | TVNDIQKLVGK | SEQ ID NO: 55 | V2Y | K11R | | 14-30 |
| SEQ ID NO: 41 | VTDIQKLL | VNDIQKLV | SEQ ID NO: 1140 | N2T | V8L | | 15-17, |
| | | | | | | | 22-30 |
| SEQ ID NO: 42 | WSVNDIQKW | WTVNDIQKL | SEQ ID NO: 1211 | T2S | L9W | | 15-30 |
| SEQ ID NO: 43 | TANDIQKLF | TVNDIQKLV | SEQ ID NO: 56 | V2A | V9F | | 17-30 |
| SEQ ID NO: 44 | VWDSQYAL | VTDSQYAL | SEQ ID NO: 1170 | T2W | — | | 18-21, |
| | | | | | | | 26-29 |
| SEQ ID NO: 45 | AMLDTGADDT | ALLDTGADDTV | SEQ ID NO: 122 | L2M | V11L | | 20-30 |
| | L | | | | | | |
| SEQ ID NO: 46 | TRNDIQKLL | TVNDIQKLV | SEQ ID NO: 56 | V2R | V9L | | 21-30 |
| SEQ ID NO: 47 | VFDSQYAM | VTDSQYAL | SEQ ID NO: 1170 | T2F | L8M | | 22-30 |
| SEQ ID NO: 48 | VSDIQKLL | VNDIQKLV | SEQ ID NO: 1140 | N2S | V8L | | 22-30 |
| SEQ ID NO: 49 | TANDIQKLY | TVNDIQKLV | SEQ ID NO: 56 | V2A | V9Y | | 25-30 |
| SEQ ID NO: 50 | TSNDIQKLL | TVNDIQKLV | SEQ ID NO: 56 | V2S | V9L | | 27-30 |
| SEQ ID NO: 51 | ALLDTGADDTL | ALLDTGADDTV | SEQ ID NO: 122 | — | V11L | | 28-30 |
| SEQ ID NO: 52 | TRNDIQKLV | TVNDIQKLV | SEQ ID NO: 56 | V2R | — | | 29-30 |
| SEQ ID NO: 53 | VFDSQYAF | VTDSQYAL | SEQ ID NO: 1170 | T2F | L8F | | 30 |
| SEQ ID NO: 54 | VIDIQKLL | VNDIQKLV | SEQ ID NO: 1140 | N2I | V8L | | 30 |
| SEQ ID NO: 55 | TVNDIQKLVGK | — | — | — | — | 2-4, 8-30 | 16-30 |
| SEQ ID NO: 56 | TVNDIQKLV | — | — | — | — | 26-30 | 7 |

TABLE 2
Example Composition Peptides (MHC class II)

| | | | | | | Hetero- | Hetero- | Hetero- | Hetero- | |
|---|---|---|---|---|---|---|---|---|---|---|
| | | | | | | clitic | clitic | clitic | clitic | |
| | Sequence | | | | | Modifi- | Modifi- | Modifi- | Modifi- | |
| SEQ ID | corresponding | | | Seed | | cation | cation | cation | cation | Vaccine |
| NO | to SEQ ID | Core | Seed | SEQ ID NO | Seed Core | P1 | P4 | P6 | P9 | Sizes |
| SEQ ID | KEPPFLWSGFE | FLWSG | KEPPFLWMGY | SEQ ID | FLWMGY | — | M4S | Y6F | H9V | 1-30 |
| NO: 57 | LVPDKWTVQ | FELV | ELHPDKWTVQ | NO: 4090 | ELH | | | | | |
| SEQ ID | KEPPFLIMGFE | IMGFE | KEPPFLWMGY | SEQ ID | WMGYEL | W1I | Y4F | L6D | D9V | 2-30 |
| NO: 58 | DHPVKWTVQ | DHPV | ELHPDKWTVQ | NO: 4090 | HPD | | | | | |
| SEQ ID | KEPIFLYMNYE | IFLYM | KEPPFLWMGY | SEQ ID | PFLWMG | P1I | W4Y | G6N | L9A | 3-30 |
| NO: 59 | AHPDKWTVQ | NYEA | ELHPDKWTVQ | NO: 4090 | YEL | | | | | |
| SEQ ID | KEPPFLWIGSE | FLWIG | KEPPFLWMGY | SEQ ID | FLWMGY | — | M4I | Y6S | H9A | 4, 7-30 |
| NO: 60 | LAPDKWTVQ | SELA | ELHPDKWTVQ | NO: 4090 | ELH | | | | | |
| SEQ ID | KEPPFLWHGF | FLWHG | KEPPFLWMGY | SEQ ID | FLWMGY | — | M4H | Y6F | H9L | 5-30 |
| NO: 61 | ELLPDKWTVQ | FELL | ELHPDKWTVQ | NO: 4090 | ELH | | | | | |
| SEQ ID | KEPPFLWMGN | FLWM | KEPPFLWMGY | SEQ ID | FLWMGY | — | — | Y6N | H9I | 5-6, |
| NO: 62 | ELIPDKWTVQ | GNELI | ELHPDKWTVQ | NO: 4090 | ELH | | | | | 8-30 |
| SEQ ID | KEPPFLIMGFE | IMGFE | KEPPFLWMGY | SEQ ID | WMGYEL | W1I | Y4F | L6D | D9A | 6-30 |
| NO: 63 | DHPAKWTVQ | DHPA | ELHPDKWTVQ | NO: 4090 | HPD | | | | | |
| SEQ ID | PPFLIMGFEDH | IMGFE | PPFLWMGYEL | SEQ ID | WMGYEL | W1I | Y4F | L6D | D9L | 7-30 |
| NO: 64 | PLK | DHPL | HPDK | NO: 4973 | HPD | | | | | |
| SEQ ID | KEPPFLWTGFE | FLWTG | KEPPFLWMGY | SEQ ID | FLWMGY | — | M4T | Y6F | H9L | 9-30 |
| NO: 65 | LLPDKWTVQ | FELL | ELHPDKWTVQ | NO: 4090 | ELH | | | | | |
| SEQ ID | KEPPFLIMGFEI | IMGFEI | KEPPFLWMGY | SEQ ID | WMGYEL | W1I | Y4F | L6I | — | 10-30 |
| NO: 66 | HPDKWTVQ | HPD | ELHPDKWTVQ | NO: 4090 | HPD | | | | | |
| SEQ ID | PPFLIMGFEDH | IMGFE | PPFLWMGYEL | SEQ ID | WMGYEL | W1I | Y4F | L6D | D9I | 11-30 |
| NO: 67 | PIK | DHPI | HPDK | NO: 4973 | HPD | | | | | |
| SEQ ID | KEPPFLWIGNE | FLWIG | KEPPFLWMGY | SEQ ID | FLWMGY | — | M4I | Y6N | H9V | 12-30 |
| NO: 68 | LVPDKWTVQ | NELV | ELHPDKWTVQ | NO: 4090 | ELH | | | | | |
| SEQ ID | KEPPFLWSGFE | FLWSG | KEPPFLWMGY | SEQ ID | FLWMGY | — | M4S | Y6F | H9A | 13-30 |
| NO: 69 | LAPDKWTVQ | FELA | ELHPDKWTVQ | NO: 4090 | ELH | | | | | |
| SEQ ID | KEPPFLIMGFE | IMGFE | KEPPFLWMGY | SEQ ID | WMGYEL | W1I | Y4F | L6A | D9V | 14-30 |
| NO: 70 | AHPVKWTVQ | AHPV | ELHPDKWTVQ | NO: 4090 | HPD | | | | | |
| SEQ ID | KEPPFLWMGV | FLWM | KEPPFLWMGY | SEQ ID | FLWMGY | — | — | Y6V | H9E | 15, 17-30 |
| NO: 71 | ELEPDKWTVQ | GVELE | ELHPDKWTVQ | NO: 4090 | ELH | | | | | |
| SEQ ID | KEPPFLWIGAE | FLWIG | KEPPFLWMGY | SEQ ID | FLWMGY | — | M4I | Y6A | H9D | 16, 19, |
| NO: 72 | LDPDKWTVQ | AELD | ELHPDKWTVQ | NO: 4090 | ELH | | | | | 24-30 |
| SEQ ID | KEPPFLWSGFE | FLWSG | KEPPFLWMGY | SEQ ID | FLWMGY | — | M4S | Y6F | H9M | 16-30 |
| NO: 73 | LMPDKWTVQ | FELM | ELHPDKWTVQ | NO: 4090 | ELH | | | | | |
| SEQ ID | KEPPFLIMGFE | IMGFE | KEPPFLWMGY | SEQ ID | WMGYEL | W1I | Y4F | L6A | D9L | 17-30 |
| NO: 74 | AHPLKWTVQ | AHPL | ELHPDKWTVQ | NO: 4090 | HPD | | | | | |
| SEQ ID | KEPPFLWFGTE | FLWFG | KEPPFLWMGY | SEQ ID | FLWMGY | — | M4F | Y6T | H9A | 18, 20-30 |
| NO: 75 | LAPDKWTVQ | TELA | ELHPDKWTVQ | NO: 4090 | ELH | | | | | |
| SEQ ID | KEPPFLWTGSE | FLWTG | KEPPFLWMGY | SEQ ID | FLWMGY | — | M4T | Y6S | H9L | 19-30 |
| NO: 76 | LLPDKWTVQ | SELL | ELHPDKWTVQ | NO: 4090 | ELH | | | | | |
| SEQ ID | KEPPLLWMGS | LLWM | KEPPFLWMGY | SEQ ID | FLWMGY | F1L | — | Y6S | H9L | 20-30 |
| NO: 77 | ELLPDKWTVQ | GSELL | ELHPDKWTVQ | NO: 4090 | ELH | | | | | |
| SEQ ID | KEPPFLWAGF | FLWAG | KEPPFLWMGY | SEQ ID | FLWMGY | — | M4A | Y6F | H9L | 21-30 |
| NO: 78 | ELLPDKWTVQ | FELL | ELHPDKWTVQ | NO: 4090 | ELH | | | | | |
| SEQ ID | KEPPFLWAGF | FLWAG | KEPPFLWMGY | SEQ ID | FLWMGY | — | M4A | Y6F | H9I | 22-24, |
| NO: 79 | ELIPDKWTVQ | FELI | ELHPDKWTVQ | NO: 4090 | ELH | | | | | 27-30 |
| SEQ ID | KEPPFLFMGFE | FMGFE | KEPPFLWMGY | SEQ ID | WMGYEL | W1F | Y4F | L6A | D9M | 23-30 |
| NO: 80 | AHPMKWTVQ | AHPM | ELHPDKWTVQ | NO: 4090 | HPD | | | | | |
| SEQ ID | KEPPFLFMGFE | FMGFE | KEPPFLWMGY | SEQ ID | WMGYEL | W1F | Y4F | L6A | D9I | 25-30 |
| NO: 81 | AHPIKWTVQ | AHPI | ELHPDKWTVQ | NO: 4090 | HPD | | | | | |
| SEQ ID | KEPPFLWAGF | FLWAG | KEPPFLWMGY | SEQ ID | FLWMGY | — | M4A | Y6F | H9V | 25-30 |
| NO: 82 | ELVPDKWTVQ | FELV | ELHPDKWTVQ | NO: 4090 | ELH | | | | | |
| SEQ ID | KEPPFLWFGV | FLWFG | KEPPFLWMGY | SEQ ID | FLWMGY | — | M4F | Y6V | H9D | 26, 29-30 |
| NO: 83 | ELDPDKWTVQ | VELD | ELHPDKWTVQ | NO: 4090 | ELH | | | | | |
| SEQ ID | KEPPFLWIGTE | FLWIG | KEPPFLWMGY | SEQ ID | FLWMGY | — | M4I | Y6T | H9E | 27-30 |
| NO: 84 | LEPDKWTVQ | TELE | ELHPDKWTVQ | NO: 4090 | ELH | | | | | |
| SEQ ID | KEPPFLFMGY | FMGYE | KEPPFLWMGY | SEQ ID | WMGYEL | W1F | — | L6A | D9V | 28-29 |
| NO: 85 | EAHPVKWTVQ | AHPV | ELHPDKWTVQ | NO: 4090 | HPD | | | | | |
| SEQ ID | KEPPFLFMGFE | FMGFE | KEPPFLWMGY | SEQ ID | WMGYEL | W1F | Y4F | L6A | D9L | 30 |
| NO: 86 | AHPLKWTVQ | AHPL | ELHPDKWTVQ | NO: 4090 | HPD | | | | | |
| SEQ ID | PPFLWAGFELL | FLWAG | PPFLWMGYEL | SEQ ID | FLWMGY | — | M4A | Y6F | H9L | 30 |
| NO: 87 | PDK | FELL | HPDK | NO: 4973 | ELH | | | | | |

mRNA and DNA Compositions

[0314] In some embodiments, composition peptides are encoded as mRNA or DNA molecules and are administered for expression in vivo as is known in the art. One example of the delivery of compositions by mRNA is found in Kranz et al. (2016), incorporated herein by reference. In some embodiments, composition peptides are encoded in more than one mRNA or DNA molecule as is found in Sahin et. al. (2017). In some embodiments, composition peptides are encoded in a circular RNA molecule, and the term mRNA includes circular RNA. One example of encoding circular RNA is described in Wesselhoeft et al. (2018). In one embodiment, a construct comprises 40 peptides, including a 20-peptide combined MHC class I HIV composition and a 20-peptide MHC class II combined HIV composition, as optimized by the procedure described herein. Peptides are prepended with a secretion signal sequence at the N-terminus and followed by an MHC class I trafficking signal (MITD) (See Kreiter et al., 2008; Sahin et al., 2017; U.S. Pat. No. 8,637,006, incorporated by reference in their entireties herein). The MITD has been shown to route antigens to pathways for HLA class I and class II presentation (Kreiter et al., 2008). Here we combine all peptides of each MHC class into a single construct using non-immunogenic glycine/serine linkers from Sahin et al. (2017), though it is also plausible to construct individual constructs containing single peptides with the same secretion and MITD signals as demonstrated by Kreiter et al. (2008).

[0315] In some embodiments, the amino acid sequence encoded by the mRNA composition comprises SEQ ID NO: 7602. Underlined amino acids correspond to the signal peptide (or leader) sequence. Bolded amino acids correspond to MHC class I (8-11 amino acids in length; 20 peptides) and MHC class II (13-25 amino acids in length; 10 peptides) peptide sequences. Italicized amino acids correspond to the trafficking signal. In alternate embodiments, any number and variation of peptide sequences disclosed herein can be included in an mRNA composition comprising the signal peptide sequence and the trafficking signal as shown in SEQ ID NO: 7602 below.

(SEQ ID NO: 7602)
MRVTAPRTLILLLSGALALTETWAGSGGSGGGGSGGTANDIQKLLGGSG
GGGSGGTYNDIQKLLGGSGGGGSGGWVVNDIQKVGGSGGGGSGGWSVND
IQKWGGSGGGGSGGTLNDIQKLLGGSGGGGSGGAMLDTGADDTLGGSGG
GGSGGTMNDIQKLVGGSGGGGSGGKEPPFLWMGNELIPDKWTVQGGSGG
GGSGGPPFLIMGFEDHPLKGGSGGGGSGGVSDSQYALGGSGGGGSGGKE
PIFLYMNYEAHPDKWTVQGGSGGGGSGGKEPPFLWIGSELAPDKWTVQG
GSGGGGSGGKEPPFLIMGFEDHPAKWTVQGGSGGGGSGGTANDIQKLFG
GSGGGGSGGYTVLPQGWKGGSGGGGSGGTANDIQKLMGGSGGGGSGGKE
PPFLIMGFEIHPDKWTVQGGSGGGGSGGTLNDIQKLVGGSGGGGSGGTY
NDIQKLVGRGGSGGGGSGGKEPPFLIMGFEDHPVKWTVQGGSGGGGSGG
TVNDIQKLVGRGGSGGGGSGGKEPPFLWTGFELLPDKWTVQGGSGGGGS
GGVWDSQYALGGSGGGGSGGVYDSQYALGGSGGGGSGGTVNDIQKLVGK
GGSGGGGSGGDVQKLVGKYGGSGGGGSGGVFDSQYALGGSGGGGSGGKE
PPFLWHGFELLPDKWTVQGGSGGGGSGGVADSQYALGGSGGGGSGGKEP
PFLWSGFELVPDKWTVQGGSLGGGGSGIVGIVAGLAVLAVVVIGAVVAT
VMCRRKSSGGKGGSYSQAASSDSAQGSDVSLTA

[0316] In some embodiments, an MHC class I and/or MHC class II peptide sequence includes one or more additional flanking residues found in a native context of the peptide. In some embodiments, an MHC class I and/or MHC class II peptide sequence includes five flanking resides found in a native context of a peptide on one or both ends of the peptide sequence. In some embodiments, a MHC class I and/or MHC class II peptide sequence includes 5, 6, 7, 8, 9, 10, or more flanking residues found in a native context of a peptide on one or both ends of the peptide sequence.

[0317] In some embodiments, mRNA encoded composition peptides are used as the payload of a self-amplifying RNA vaccine. In one embodiment, the mRNA sequence encoding the composition peptides replaces one or more structural proteins of an infectious alphavirus particle as described in Geall et al. (2012) that is incorporated herein by reference. As is described by Geall et al. (2012), self-amplifying RNA composition can increase the efficiency of antigen production in vivo.

[0318] In some embodiments, the composition comprising the nucleic acids sequence described herein is an immunogenic composition. In some embodiments, the composition is a vaccine.

### Non-Limiting Embodiments of the Subject Matter

[0319] In one aspect, the invention provides for nucleic acid sequences encoding one or more amino acid sequences selected from the group consisting of SEQ ID NOs: 1 to 56.

[0320] In some embodiments, the nucleic acid sequences encode two or more amino acid sequences selected from the group consisting of SEQ ID NOs: 1 to 56.

[0321] In another aspect, the invention provides for a composition comprising nucleic acid sequences encoding one or more amino acid sequences selected from the group consisting of SEQ ID NOs: 1 to 56.

[0322] In some embodiments, the composition is administered to a subject. In some embodiments, the composition comprises nucleic acid sequences encoding two or more amino acid sequences selected from the group consisting of SEQ ID NOs: 1 to 56. In some embodiments, the nucleic acid sequences are administered in a construct for expression in vivo. In some embodiments, the in vivo administration of the nucleic acid sequences are configured to produce one or more peptides that is displayed by an HLA class I molecule. In some embodiments, the nucleic acid sequences are configured to allow expression of at least two peptides encoded by the nucleic acid sequences that are each displayed by a peptide specific set of HLA class I alleles, wherein all of the peptide specific sets of HLA class I alleles are not identical. In some embodiments, each of the one or more peptides is a modified or unmodified fragment of an HIV protein. In some embodiments, the composition is administered in an effective amount to a subject to prevent HIV. In some embodiments, the composition is administered in an effective amount to a subject to treat HIV.

[0323] In some embodiments, the composition comprises nucleic acid sequences encoding at least three amino acid sequences selected from the group consisting of SEQ ID NOs: 1 to 56.

[0324] In another aspect, the invention provides for a peptide composition comprising one or more peptides selected from the group consisting of SEQ ID NOs: 1 to 56.

[0325] In some embodiments, the peptide composition comprises two or more peptides selected from the group consisting of SEQ ID NOs: 1 to 56. In some embodiments, the composition is administered to a subject.

[0326] In some embodiments, the peptide composition comprises three or more peptides selected from the group consisting of SEQ ID NOs: 1 to 56.

[0327] In another aspect, the invention provides for a composition comprising nucleic acid sequences encoding one or more amino acid sequences selected from the group consisting of SEQ ID NOs: 1 to 54.

[0328] In some embodiments, the composition is administered to a subject. In some embodiments, the composition comprises nucleic acid sequences encoding two or more amino acid sequences selected from the group consisting of SEQ ID NOs: 1 to 54. In some embodiments, the nucleic acid sequences are administered in a construct for expression in vivo. In some embodiments, the in vivo administration of the nucleic acid sequences are configured to produce one or more peptides that is displayed by an HLA class I molecule. In some embodiments, the nucleic acid sequences are configured to allow expression of at least two peptides encoded by the nucleic acid sequences that are each displayed by a peptide specific set of HLA class I alleles, wherein all of the peptide specific sets of HLA class I alleles are not identical. In some embodiments, each of the one or more peptides is a modified or unmodified fragment of an HIV protein. In some embodiments, the composition is administered in an effective amount to a subject to prevent HIV. In some embodiments, the composition is administered in an effective amount to a subject to treat HIV.

[0329] In some embodiments, the composition comprises nucleic acid sequences encoding at least three amino acid sequences selected from the group consisting of SEQ ID NOs: 1 to 54.

[0330] In another aspect, the invention provides for a method of treating or preventing HIV by administering to a subject a composition comprising nucleic acid sequences encoding one or more amino acid sequences selected from the group consisting of SEQ ID NOs: 1 to 54.

[0331] In some embodiments, the composition comprises nucleic acid sequences encoding two or more amino acid sequences selected from the group consisting of SEQ ID NOs: 1 to 54.

[0332] In another aspect, the invention provides for a peptide composition comprising one or more peptides selected from the group consisting of SEQ ID NOs: 1 to 54.

[0333] In some embodiments, the peptide composition comprises two or more peptides selected from the group consisting of SEQ ID NOs: 1 to 54. In some embodiments a peptide in the peptide composition is displayed by an HLA class I molecule. In some embodiments, the at least two peptides are each capable of being displayed by a peptide specific set of HLA class I alleles, wherein all of the peptide specific sets of HLA class I alleles are not identical. In some embodiments, a peptide in the peptide composition is a modified or unmodified fragment of an HIV protein. In some embodiments, the peptide composition is administered in an effective amount to a subject to prevent HIV. In some embodiments, the peptide composition is administered in an effective amount to a subject to treat HIV.

[0334] In some embodiments, the peptide composition comprises three or more peptides selected from the group consisting of SEQ ID NOs: 1 to 54.

[0335] In another aspect, the invention provides for a method of treating or preventing HIV in a subject comprising administering to the subject a peptide composition comprising one or more peptides selected from the group consisting of SEQ ID NOs: 1 to 54.

[0336] In some embodiments, the peptide composition comprises two or more peptides selected from the group consisting of SEQ ID NOs: 1 to 54.

[0337] In another aspect, the invention provides for nucleic acid sequences encoding one or more amino acid sequences selected from the group consisting of SEQ ID NOs: 57 to 87.

[0338] In some embodiments, the nucleic acid sequences encode two or more amino acid sequences selected from the group consisting of SEQ ID NOs: 57 to 87.

[0339] In another aspect, the invention provides for a composition comprising nucleic acid sequences encoding one or more amino acid sequences selected from the group consisting of SEQ ID NOs: 57 to 87.

[0340] In some embodiments, the composition is administered to a subject. In some embodiments, the composition comprises nucleic acid sequences encoding two or more amino acid sequences selected from the group consisting of SEQ ID NOs: 57 to 87. In some embodiments, the nucleic acid sequences are administered in a construct for expression in vivo. In some embodiments, the in vivo administration of the nucleic acid sequences are configured to produce one or more peptides that is displayed by an HLA class II molecule. In some embodiments, the nucleic acid sequences are configured to allow expression of at least two peptides encoded by the nucleic acid sequences that are each displayed by a peptide specific set of HLA class II alleles, wherein all of the peptide specific sets of HLA class II alleles are not identical. In some embodiments, each of the one or more peptides is a modified or unmodified fragment of an HIV protein. In some embodiments, the composition is administered in an effective amount to a subject to prevent HIV. In some embodiments, the composition is administered in an effective amount to a subject to treat HIV.

[0341] In some embodiments, the composition comprises nucleic acid sequences encoding at least three amino acid sequences selected from the group consisting of SEQ ID NOs: 57 to 87.

[0342] In another aspect, the invention provides for a peptide composition comprising one or more peptides selected from the group consisting of SEQ ID NOs: 57 to 87.

[0343] In some embodiments, the peptide composition comprises two or more peptides selected from the group consisting of SEQ ID NOs: 57 to 87. In some embodiments, the composition is administered to a subject.

[0344] In some embodiments, the peptide composition comprises three or more peptides selected from the group consisting of SEQ ID NOs: 57 to 87.

[0345] In another aspect, the invention provides for nucleic acid sequences encoding one or more amino acid sequences selected from the group consisting of SEQ ID NOs: 57 to 87.

[0346] In some embodiments, the nucleic acid sequences encode two or more amino acid sequences selected from the group consisting of SEQ ID NOs: 57 to 87.

[0347] In another aspect, the invention provides for a composition comprising nucleic acid sequences encoding one or more amino acid sequences selected from the group consisting of SEQ ID NOs: 57 to 87.

[0348] In some embodiments, the composition comprises nucleic acid sequences encoding two or more amino acid sequences selected from the group consisting of SEQ ID NOs: 57 to 87. In some embodiments, the nucleic acid sequences are administered in a construct for expression in vivo. In some embodiments, the in vivo administration of the nucleic acid sequences are configured to produce one or more peptides that is displayed by an HLA class II molecule. In some embodiments, the nucleic acid sequences are configured to allow expression of at least two peptides encoded by the nucleic acid sequences that are each displayed by a peptide specific set of HLA class II alleles, wherein all of the peptide specific sets of HLA class II alleles are not identical. In some embodiments, each of the one or more peptides is a modified or unmodified fragment of an HIV protein. In some embodiments, the composition is administered in an effective amount to a subject to prevent HIV. In some embodiments, the composition is administered in an effective amount to a subject to treat HIV. In some embodiments, the composition comprises nucleic acid sequences encoding at least three amino acid sequences selected from the group consisting of SEQ ID NOs: 57 to 87.

[0349] In some embodiments, the composition comprises nucleic acid sequences encoding at least three amino acid sequences selected from the group consisting of SEQ ID NOs: 57 to 87.

[0350] In another aspect, the invention provides for a method of treating or preventing HIV by administering to a subject a composition comprising nucleic acid sequences encoding one or more amino acid sequences selected from the group consisting of SEQ ID NOs: 57 to 87.

[0351] In some embodiments, the composition comprises nucleic acid sequences encoding two or more amino acid sequences selected from the group consisting of SEQ ID NOs: 57 to 87.

[0352] In another aspect, the invention provides for a peptide composition comprising one or more peptides selected from the group consisting of SEQ ID NOs: 57 to 87.

[0353] In some embodiments, the peptide composition comprises two or more peptides selected from the group consisting of SEQ ID NOs: 57 to 87. In some embodiments a peptide in the peptide composition is displayed by an HLA class II molecule. In some embodiments, the at least two peptides are each capable of being displayed by a peptide specific set of HLA class II alleles, wherein all of the peptide specific sets of HLA class II alleles are not identical. In some embodiments, a peptide in the peptide composition is a modified or unmodified fragment of an HIV protein. In some embodiments, the peptide composition is administered in an effective amount to a subject to prevent HIV. In some embodiments, the peptide composition is administered in an effective amount to a subject to treat HIV.

[0354] In some embodiments, the peptide composition comprises three or more peptides selected from the group consisting of SEQ ID NOs: 57 to 87.

[0355] In another aspect, the invention provides for a method of treating or preventing HIV in a subject comprising administering to the subject a peptide composition comprising one or more peptides selected from the group consisting of SEQ ID NOs: 57 to 87.

[0356] In some embodiments, the peptide composition comprises two or more peptides selected from the group consisting of SEQ ID NOs: 57 to 87.

[0357] In some embodiments, the compositions, including peptide compositions, of the invention are immunogenic compositions. To this end, the invention provides for a method of inducing an immunogenic response in a subject comprising administering to the subject a composition of the invention.

[0358] In some embodiments, compositions, including peptide compositions, of the invention are vaccines.

### Compositions

[0359] In some embodiments, the nucleic acid sequences of this disclosure are administered in a composition. In some embodiments, the nucleic acid sequences of this disclosure are administered in a pharmaceutical composition that includes a pharmaceutically acceptable carrier. In some embodiments, the pharmaceutical composition is in the form of a spray, aerosol, gel, solution, emulsion, lipid nanoparticle, nanoparticle, or suspension. In some embodiments, the composition or pharmaceutical composition is in the form of a cationic nanoemulsion, one example of which is described by Brito et al. (2014) that is incorporated herein by reference.

[0360] In some embodiments, the one or more peptides of this disclosure are administered in a composition. In some embodiments, the one or more peptides of this disclosure are administered in a pharmaceutical composition that includes a pharmaceutically acceptable carrier. In some embodiments, the composition or pharmaceutical composition is comprised of the third peptide set, as described in this disclosure. In some embodiments, the pharmaceutical composition is in the form of a spray, aerosol, gel, solution, emulsion, lipid nanoparticle, nanoparticle, or suspension. In some embodiments, the composition pharmaceutical composition is in the form of a cationic nanoemulsion, one example of which is described by Brito et al. (2014) that is incorporated herein by reference.

[0361] The composition is preferably administered to a subject with a pharmaceutically acceptable carrier, i.e., as a pharmaceutical composition. Typically, in some embodiments, an appropriate amount of a pharmaceutically acceptable salt is used in the formulation, which in some embodiments can render the formulation isotonic.

[0362] In certain embodiments, nucleic acid sequences are provided as an immunogenic composition comprising any one of the nucleic acid sequences described herein and a pharmaceutically acceptable carrier. In some embodiments, modified RNA is used with full substitution of 5-Methoxy-U for uracil or other nucleoside analogs are used to reduce the immunogenicity of the RNA. In some embodiments, modified RNA is used with full substitution of N1-methylpseudouridine for uracil. In some embodiments, modified RNA is used with partial substitution of N1-methylpseudouridine for uracil to reduce the immunogenicity of the RNA with some percentage of unmodified uracil (e.g. 99% N1-methylpseudouridine modified uracil and 1% unmodified uracil, or 99.9% N1-methylpseudouridine modified uracil and 0.1% unmodified uracil). In some embodiments, modified RNA is used with partial substitution of a nucleoside analog with some percentage of unmodified nucleoside (e.g. 99% modified nucleoside and 1% unmodified nucleoside, or 99.9% modified nucleoside and 0.1% unmodified nucleoside). Some embodiments of modified RNA are described in U.S. Pat. No. 10,232,055. In some embodiments, the RNA is capped. One embodiment of capping is described in U.S. Pat. No. 10,494,399. In some embodiments, the RNA is polyadenylated, for example, with 120 adenosines. In some embodiments, the open reading frame of the RNA is flanked by a 5′ untranslated region (UTR) containing a strong Kozak translational initiation signal, and an alpha-globin 3′ UTR terminating with an oligo (dT) sequence for templated addition of a polyA tail as described in Warren et al., 2010. In some embodiments, linear RNA is employed to encode peptides. In some embodiments, circular RNA is employed to encode peptides. One embodiment of the use of circular RNA for vaccines is described by Li et al., 2022. One example of a method to prepare circular RNA is described in U.S. Pat. No. 11,203,767. In some embodiments, nucleic acid is encapsulated in lipid nanoparticles (LNPs). One embodiment of preparing lipid nanoparticles that contain RNA is described by Pardi et al., 2017. In one embodiment, to prepare mRNA-LNPs an ethanolic solution of ALC-0315 (described in Patent WO2017075531), cholesterol, distearoylphosphatidylcholine (DSPC), and 2-[(polyethylene glycol)-2000] N,N ditetradecylacetamide (ALC-0159, described in U.S. Pat. No. 14,732,218) is rapidly mixed with a solution of RNA in citrate buffer at pH 4.0 (the composition is described in Patent WO2018081480).

[0363] In certain embodiments, the peptides are provided as an immunogenic composition comprising any one of the peptides described herein and a pharmaceutically acceptable carrier. In certain embodiments, the immunogenic composition further comprises an adjuvant. In certain embodiments, the peptides are conjugated with other molecules to increase their effectiveness as is known by those practiced in the art. For example, peptides can be coupled to antibodies that recognize cell surface proteins on antigen presenting cells to enhance vaccine effectiveness. One such method for increasing the effectiveness of peptide delivery is described in Woodham, et al. (2018). In certain embodiments for the treatment of autoimmune disorders, the peptides are delivered with a composition and protocol designed to induce tolerance as is known in the art. Example methods for using peptides for immune tolerization are described in Alhadj et al. (2017) and Gibson et al. (2015). In some embodiments, an MHC class I and/or MHC class II peptide in an immunogenic composition includes one or more additional flanking residues found in a native context of the peptide.

[0364] In some embodiments, the pharmaceutically acceptable carrier is selected from the group consisting of saline, Ringer's solution, dextrose solution, and a combination thereof. Other suitable pharmaceutically acceptable carriers known in the art are contemplated. Suitable carriers and their formulations are described in Remington's Pharmaceutical Sciences, 2005, Mack Publishing Co. The pH of the solution is preferably from about 5 to about 8, and more preferably from about 7 to about 7.5. The formulation may also comprise a lyophilized powder. Further carriers include sustained release preparations such as semipermeable matrices of solid hydrophobic polymers, which matrices are in the form of shaped articles, e.g., films, liposomes or microparticles. It will be apparent to those persons skilled in the art that certain carriers may be more preferable depending upon, for instance, the route of administration and concentration of peptides being administered.

[0365] The phrase pharmaceutically acceptable carrier as used herein means a pharmaceutically acceptable material, composition or vehicle, such as a liquid or solid filler, diluent, excipient, solvent or encapsulating material, involved in carrying or transporting the subject pharmaceutical agent from one organ, or portion of the body, to another organ, or portion of the body. Each carrier is acceptable in the sense of being compatible with the other ingredients of the formulation and not injurious to the patient. Some examples of materials which can serve as pharmaceutically acceptable carriers include: sugars, such as lactose, glucose and sucrose; starches, such as corn starch and potato starch; cellulose, and its derivatives, such as sodium carboxymethyl cellulose, ethyl cellulose and cellulose acetate; powdered tragacanth; malt; gelatin; talc; excipients, such as cocoa butter and suppository waxes; oils, such as peanut oil, cottonseed oil, safflower oil, sesame oil, olive oil, corn oil and soybean oil; glycols, such as butylene glycol; polyols, such as glycerin, sorbitol, mannitol and polyethylene glycol; esters, such as ethyl oleate and ethyl laurate; agar; buffering agents, such as magnesium hydroxide and aluminum hydroxide; alginic acid; pyrogen-free water; isotonic saline; Ringer's solution; ethyl alcohol; phosphate buffer solutions; and other non-toxic compatible substances employed in pharmaceutical formulations. The term carrier denotes an organic or inorganic ingredient, natural or synthetic, with which the active ingredient is combined to facilitate the application. The components of the pharmaceutical compositions also are capable of being comingled with the compounds of the present invention, and with each other, in a manner such that there is no interaction which would substantially impair the desired pharmaceutical efficiency. The composition may also include additional agents such as an isotonicity agent, a preservative, a surfactant, and, a divalent cation, preferably, zinc.

[0366] The composition can also include an excipient, or an agent for stabilization of a peptide composition, such as a buffer, a reducing agent, a bulk protein, amino acids (such as e.g., glycine or praline) or a carbohydrate. Bulk proteins useful in formulating peptide compositions include albumin. Typical carbohydrates useful in formulating peptides include but are not limited to sucrose, mannitol, lactose, trehalose, or glucose.

[0367] Surfactants may also be used to prevent soluble and insoluble aggregation and/or precipitation of peptides or proteins included in the composition. Suitable surfactants include but are not limited to sorbitan trioleate, soya lecithin, and oleic acid. In certain cases, solution aerosols are preferred using solvents such as ethanol. Thus, formulations including peptides can also include a surfactant that can reduce or prevent surface-induced aggregation of peptides by atomization of the solution in forming an aerosol. Various conventional surfactants can be employed, such as polyoxyethylene fatty acid esters and alcohols, and polyoxyethylene sorbitol fatty acid esters. Amounts will generally range between 0.001% and 4% by weight of the formulation. In some embodiments, surfactants used with the present disclosure are polyoxyethylene sorbitan mono-oleate, polysorbate 80, polysorbate 20. Additional agents known in the art can also be included in the composition.

[0368] In some embodiments, the compositions and dosage forms further comprise one or more compounds that reduce the rate by which an active ingredient will decay, or the composition will change in character. So called stabilizers or preservatives may include, but are not limited to, amino acids, antioxidants, pH buffers, or salt buffers. Non-limiting examples of antioxidants include butylated hydroxy anisole (BHA), ascorbic acid and derivatives thereof, tocopherol and derivatives thereof, butylated hydroxy anisole and cysteine. Non-limiting examples of preservatives include parabens, such as methyl or propyl p-hydroxybenzoate and benzalkonium chloride. Additional non-limiting examples of amino acids include glycine or proline.

[0369] The present invention also teaches the stabilization (preventing or minimizing thermally or mechanically induced soluble or insoluble aggregation and/or precipitation of an inhibitor protein) of liquid solutions containing peptides at neutral pH or less than neutral pH by the use of amino acids including proline or glycine, with or without divalent cations resulting in clear or nearly clear solutions that are stable at room temperature or preferred for pharmaceutical administration.

[0370] In one embodiment, the composition is of single unit or multiple unit dosage forms. Compositions of single unit or multiple unit dosage forms of the invention comprise a prophylactically or therapeutically effective amount of one or more compositions (e.g., a compound of the invention, or other prophylactic or therapeutic agent), typically, one or more vehicles, carriers, or excipients, stabilizing agents, and/or preservatives. Preferably, the vehicles, carriers, excipients, stabilizing agents and preservatives are pharmaceutically acceptable.

[0371] In some embodiments, the compositions and dosage forms comprise anhydrous compositions and dosage forms. Anhydrous compositions and dosage forms of the invention can be prepared using anhydrous or low moisture containing ingredients and low moisture or low humidity conditions. Compositions and dosage forms that comprise lactose and at least one active ingredient that comprise a primary or secondary amine are preferably anhydrous if substantial contact with moisture and/or humidity during manufacturing, packaging, and/or storage is expected. An anhydrous composition should be prepared and stored such that its anhydrous nature is maintained. Accordingly, anhydrous compositions are preferably packaged using materials known to prevent exposure to water such that they can be included in suitable formulary kits. Examples of suitable packaging include, but are not limited to, hermetically sealed foils, plastics, unit dose containers (e.g., vials), blister packs, and strip packs.

[0372] Suitable vehicles are well known to those skilled in the art of pharmacy, and non-limiting examples of suitable vehicles include glucose, sucrose, starch, lactose, gelatin, rice, silica gel, glycerol, talc, sodium chloride, dried skim milk, propylene glycol, water, sodium stearate, ethanol, and similar substances well known in the art. Saline solutions and aqueous dextrose and glycerol solutions can also be employed as liquid vehicles. Whether a particular vehicle is suitable for incorporation into a composition or dosage form depends on a variety of factors well known in the art including, but not limited to, the way in which the dosage form will be administered to a patient and the specific active ingredients in the dosage form. Pharmaceutical vehicles can be sterile liquids, such as water and oils, including those of petroleum, animal, vegetable or synthetic origin, such as peanut oil, soybean oil, mineral oil, sesame oil and the like.

[0373] The invention also provides that a composition can be packaged in a hermetically sealed container such as an ampoule or sachette indicating the quantity. In one embodiment, the composition can be supplied as a dry sterilized lyophilized powder in a delivery device suitable for administration to the lower airways of a patient. The compositions can, if desired, be presented in a pack or dispenser device that can contain one or more unit dosage forms containing the active ingredient. The pack can for example comprise metal or plastic foil, such as a blister pack. The pack or dispenser device can be accompanied by instructions for administration.

[0374] Methods of preparing these formulations or compositions include the step of bringing into association a compound of the present invention with the carrier and, optionally, one or more accessory ingredients. In general, the formulations are prepared by uniformly and intimately bringing into association a compound of the present invention with liquid carriers, or finely divided solid carriers, or both, and then, if necessary, shaping the product.

[0375] Formulations of the invention suitable for administration may be in the form of powders, granules, or as a solution or a suspension in an aqueous or non-aqueous liquid, or as an oil-in-water or water-in-oil liquid emulsion, or as an elixir or syrup, or as pastilles (using an inert base, such as gelatin and glycerin, or sucrose and acacia) and/or as mouthwashes and the like, each containing a predetermined amount of a compound of the present invention (e.g., peptides) as an active ingredient.

[0376] A liquid composition herein can be used as such with a delivery device, or they can be used for the preparation of pharmaceutically acceptable formulations comprising peptides that are prepared, for example, by the method of spray drying. The methods of spray freeze-drying peptides/proteins for pharmaceutical administration disclosed in Maa et al. (2021), Curr. Pharm. Biotechnol., 2001, 1, 283-302, are incorporated herein. In another embodiment, the liquid solutions herein are freeze spray dried and the spray-dried product is collected as a dispersible peptide-containing powder that is therapeutically effective when administered to an individual.

[0377] The compounds and compositions of the present invention can be employed in combination therapies, that is, the compounds and compositions can be administered concurrently with, prior to, or subsequent to, one or more other desired therapeutics or medical procedures (e.g., peptide vaccine can be used in combination therapy with another treatment such as chemotherapy, radiation, pharmaceutical agents, and/or another treatment). The particular combination of therapies (therapeutics or procedures) to employ in a combination regimen will take into account compatibility of the desired therapeutics and/or procedures and the desired therapeutic effect to be achieved. It will also be appreciated that the therapies employed may achieve a desired effect for the same disorder (for example, the compound of the present invention may be administered concurrently with another therapeutic or prophylactic).

[0378] The invention also provides a pharmaceutical pack or kit comprising one or more containers filled with one or more of the ingredients of the compositions of the invention. Optionally associated with such container(s) can be a notice in the form prescribed by a governmental agency regulating the manufacture, use or sale of pharmaceuticals or biological products, which notice reflects approval by the agency of manufacture, use or sale for human administration.

[0379] The current invention provides for dosage forms comprising nucleic acid sequences or peptides suitable for treating HIV infection. The dosage forms can be formulated, e.g., as sprays, aerosols, nanoparticles, liposomes, or other forms known to one of skill in the art. See, e.g., Remington's Pharmaceutical Sciences; Remington: The Science and Practice of Pharmacy supra; Pharmaceutical Dosage Forms and Drug Delivery Systems by Howard C., Ansel et al., Lippincott Williams & Wilkins; 7th edition (Oct. 1, 1999).

[0380] Generally, a dosage form used in the acute treatment of a disease may contain larger amounts of one or more of the active ingredients it comprises than a dosage form used in the chronic treatment of the same disease. In addition, the prophylactically and therapeutically effective dosage form may vary among different conditions. For example, a therapeutically effective dosage form may contain peptides that has an appropriate immunogenic action when intending to treat HIV infection. On the other hand, a different effective dosage may contain nucleic acid sequences or peptides that has an appropriate immunogenic action when intending to use the peptides of the invention as a prophylactic (e.g., vaccine) against HIV infection. These and other ways in which specific dosage forms encompassed by this invention will vary from one another and will be readily apparent to those skilled in the art. See, e.g., Remington's Pharmaceutical Sciences, 2005, Mack Publishing Co.; Remington: The Science and Practice of Pharmacy by Gennaro, Lippincott Williams & Wilkins; 20th edition (2003); Pharmaceutical Dosage Forms and Drug Delivery Systems by Howard C. Ansel et al., Lippincott Williams & Wilkins; 7th edition (Oct. 1, 1999); and Encyclopedia of Pharmaceutical Technology, edited by Swarbrick, J. & J. C. Boylan, Marcel Dekker, Inc., New York, 1988, which are incorporated herein by reference in their entirety.

[0381] The pH of a composition or dosage form may also be adjusted to improve delivery and/or stability of one or more active ingredients. Similarly, the polarity of a solvent carrier, its ionic strength, or tonicity can be adjusted to improve delivery. Compounds such as stearates can also be added to compositions or dosage forms to alter advantageously the hydrophilicity or lipophilicity of one or more active ingredients to improve delivery. In this regard, stearates can also serve as a lipid vehicle for the formulation, as an emulsifying agent or surfactant, and as a delivery enhancing or penetration-enhancing agent. Different salts, hydrates, or solvates of the active ingredients can be used to adjust further the properties of the resulting composition.

[0382] Compositions can be formulated with appropriate carriers and adjuvants using techniques to yield compositions suitable for immunization. The compositions can include an adjuvant, such as, for example but not limited to, alum, poly IC, MF-59, squalene-based adjuvants, or liposomal based adjuvants suitable for immunization.

[0383] In some embodiments, the compositions and methods comprise any suitable agent or immune modulation which could modulate mechanisms of host immune tolerance and release of the induced antibodies. In certain embodiments, an immunomodulatory agent is administered in at time and in an amount sufficient for transient modulation of the subject's immune response so as to induce an immune response.

### Expression Systems

[0384] In certain aspects, the invention provides culturing a cell line that expresses any one of the peptides of the invention in a culture medium comprising any of the peptides described herein.

[0385] Various expression systems for producing recombinant proteins/peptides are known in the art, and include, prokaryotic (e.g., bacteria), plant, insect, yeast, and mammalian expression systems. Suitable cell lines can be transformed, transduced, or transfected with nucleic acids containing coding sequences for the peptides of the invention in order to produce the molecule of interest. Expression vectors containing such a nucleic acid sequence, which can be linked to at least one regulatory sequence in a manner that allows expression of the nucleotide sequence in a host cell, can be introduced via methods known in the art. Practitioners in the art understand that designing an expression vector can depend on factors, such as the choice of host cell to be transfected and/or the type and/or amount of desired protein to be expressed. Enhancer regions, which are those sequences found upstream or downstream of the promoter region in non-coding DNA regions, are also known in the art to be important in optimizing expression. If needed, origins of replication from viral sources can be employed, such as if a prokaryotic host is utilized for introduction of plasmid DNA. However, in eukaryotic organisms, chromosome integration is a common mechanism for DNA replication. For stable transfection of mammalian cells, a small fraction of cells can integrate introduced DNA into their genomes. The expression vector and transfection method utilized can be factors that contribute to a successful integration event. For stable amplification and expression of a desired protein, a vector containing DNA encoding a protein of interest is stably integrated into the genome of eukaryotic cells (for example mammalian cells), resulting in the stable expression of transfected genes. A gene that encodes a selectable marker (for example, resistance to antibiotics or drugs) can be introduced into host cells along with the gene of interest in order to identify and select clones that stably express a gene encoding a protein of interest. Cells containing the gene of interest can be identified by drug selection wherein cells that have incorporated the selectable marker gene will survive in the presence of the drug. Cells that have not incorporated the gene for the selectable marker die. Surviving cells can then be screened for the production of the desired protein molecule.

[0386] A host cell strain, which modulates the expression of the inserted sequences, or modifies and processes the nucleic acid in a specific fashion desired also may be chosen. Such modifications (for example, glycosylation and other post-translational modifications) and processing (for example, cleavage) of peptide/protein products may be important for the function of the peptide/protein. Different host cell strains have characteristic and specific mechanisms for the post-translational processing and modification of proteins and gene products. As such, appropriate host systems or cell lines can be chosen to ensure the correct modification and processing of the target protein expressed. Thus, eukaryotic host cells possessing the cellular machinery for proper processing of the primary transcript, glycosylation, and phosphorylation of the gene product may be used.

[0387] Various culturing parameters can be used with respect to the host cell being cultured. Appropriate culture conditions for mammalian cells are well known in the art (Cleveland W L, et al., J Immunol Methods, 1983, 56 (2): 221-234) or can be determined by the skilled artisan (see, for example, Animal Cell Culture: A Practical Approach 2nd Ed., Rickwood, D. and Hames, B. D., eds. (Oxford University Press: New York, 1992)). Cell culturing conditions can vary according to the type of host cell selected. Commercially available medium can be utilized.

[0388] Peptides of the invention can be purified from any human or non-human cell which expresses the peptide, including those which have been transfected with expression constructs that express peptides of the invention. For protein recovery, isolation and/or purification, the cell culture medium or cell lysate is centrifuged to remove particulate cells and cell debris. The desired peptide molecule is isolated or purified away from contaminating soluble proteins and peptides by suitable purification techniques. Non-limiting purification methods for proteins include: size exclusion chromatography; affinity chromatography; ion exchange chromatography; ethanol precipitation; reverse phase HPLC; chromatography on a resin, such as silica, or cation exchange resin, e.g., DEAE; chromatofocusing; SDS-PAGE; ammonium sulfate precipitation; gel filtration using, e.g., Sephadex G-75, Sepharose; protein A sepharose chromatography for removal of immunoglobulin contaminants; and the like. Other additives, such as protease inhibitors (e.g., PMSF or proteinase K) can be used to inhibit proteolytic degradation during purification. Purification procedures that can select for carbohydrates can also be used, e.g., ion-exchange soft gel chromatography, or HPLC using cation- or anionexchange resins, in which the more acidic fraction(s) is/are collected.

### Methods of Treatment

[0389] In one embodiment, the subject matter disclosed herein relates to a preventive medical treatment started after following diagnosis of HIV infection in order to prevent the infection from worsening or to cure the infection. In one embodiment, the subject matter disclosed herein relates to prophylaxis of subjects who are believed to be at risk for HIV infection or have previously been diagnosed with HIV infection. In one embodiment, said subjects can be administered a composition of the invention. The invention contemplates using any of the nucleic acid sequences or peptides produced by the systems and methods described herein. In one embodiment, the compositions described herein can be administered subcutaneously via syringe or any other suitable method known in the art.

[0390] The compound(s) or combination of compounds disclosed herein, or compositions may be administered to a cell, mammal, or human by any suitable means. Non-limiting examples of methods of administration include, among others, (a) administration though oral pathways, which includes administration in capsule, tablet, granule, spray, syrup, or other such forms; (b) administration through non-oral pathways such as intraocular, intranasal, intraauricular, rectal, vaginal, intraurethral, transmucosal, buccal, or transdermal, which includes administration as an aqueous suspension, an oily preparation or the like or as a drip, spray, suppository, salve, ointment or the like; (c) administration via injection, including subcutaneously, intraperitoneally, intravenously, intramuscularly, intradermally, intraorbitally, intracapsularly, intraspinally, intrasternally, or the like, including infusion pump delivery; (d) administration locally such as by injection directly in the renal or cardiac area, e.g., by depot implantation; (c) administration topically; as deemed appropriate by those of skill in the art for bringing the compound or combination of compounds disclosed herein into contact with living tissue; (f) administration via inhalation, including through aerosolized, nebulized, and powdered formulations; and (g) administration through implantation.

[0391] As will be readily apparent to one skilled in the art, the effective in vivo dose to be administered and the particular mode of administration will vary depending upon the age, weight and species treated, and the specific use for which the compound or combination of compounds disclosed herein are employed. The determination of effective dose levels, that is the dose levels necessary to achieve the desired result, can be accomplished by one skilled in the art using routine pharmacological methods. Typically, human clinical applications of products are commenced at lower dose levels, with dose level being increased until the desired effect is achieved. Alternatively, acceptable in vitro studies can be used to establish useful doses and routes of administration of the compositions identified by the present methods using established pharmacological methods. Effective animal doses from in vivo studies can be converted to appropriate human doses using conversion methods known in the art (e.g., see Nair A B, Jacob S. A simple practice guide for dose conversion between animals and human. Journal of Basic and Clinical Pharmacy. 2016 March; 7 (2): 27.)

### Methods of Prevention

[0392] In some embodiments, the peptides prepared using methods of the invention can be used as a vaccine to promote an immune response against HIV infection. In some embodiments, the invention provides compositions and methods for induction of immune response, for example induction of antibodies to HIV antigens. In some embodiments, the antibodies are broadly neutralizing antibodies. In some embodiments, the invention provides compositions and methods for induction of immune response, for example induction of a T cell response to HIV antigens. In some embodiments, the compositions prepared using methods of the invention can be used as a vaccine to promote an immune response against a pathogen. In some embodiments, the nucleic acid sequences or peptides prepared using methods of the invention can be used to promote immune tolerance as an autoimmune disease therapeutic.

[0393] In some embodiments, the peptides prepared using methods of the invention can be combined with additional therapeutic components. In some embodiments, the combination can be encoded in one or more nucleic acids that encode the peptides produced with the methods described herein and additional therapeutic components (e.g., peptides or proteins) that are known in the art. In some embodiments, the combination is created by adding one or more nucleic acids that encode the additional therapeutic components of the peptides that result from the methods described herein for combined formulation and packaging. In some embodiments, additional therapeutic components are encoded on the same nucleic acid molecules that encode the sequences described herein. An example of the combination of components is the creation of HIV vaccines that contain components of strains of HIV known as mosaic vaccines. In some embodiments, peptide components to invoke an adaptative immune response can be added to such combined vaccines (e.g., HIV) by using one or more nucleic acids to encode the components and packaging the nucleic acids in an LNP to form an RNA-LNP (e.g. mRNA-LNP) or DNA-LNP formulation, or separately formulating different components as mRNA-LNP or DNA-LNP and then combining them for packaging or immediately before administration to a person. In some embodiments, HIV or other vaccines that contain nucleic acids encoding one more protein fragments to produce an antibody response that can be combined with a peptide vaccine using the methods described herein to produce a cellular immune response.

[0394] The compositions, systems, and methods disclosed herein are not to be limited in scope to the specific embodiments described herein. Indeed, various modifications of the compositions, systems, and methods in addition to those described will become apparent to those of skill in the art from the foregoing description.

### REFERENCES

[0395] Alhadj A. M., et al., Metabolic and immune effects of immunotherapy with proinsulin peptide in human new-onset type 1 diabetes, Sci. Transl. Med., 2017, 9 (402): eaaf7779.
[0396] Alvarez B., et al., MHC Peptidome Deconvolution for Accurate MHC Binding Motif Characterization and Improved T-cell Epitope Predictions, Mol. Cell. Proteomics, 2019, 18 (12): 2459-2477.
[0397] Antunes D. A., et al., General Prediction of Peptide-MHC Binding Modes Using Incremental Docking: A Proof of Concept. Sci Rep., 2018 Mar. 12; 8 (1): 4327-4339.
[0398] Bear A. S., et al., Biochemical and functional characterization of mutant KRAS epitopes validates this oncoprotein for immunological targeting. Nat Commun., 2021 Jul. 16; 12 (1): 4365-4380.
[0399] Brito L. A., et al., A cationic nanoemulsion for the delivery of next-generation RNA vaccines, Mol. Ther., 2014, 22 (12): 2118-2129.
[0400] Bulik-Sullivan B., et al., Deep learning using tumor HLA peptide mass spectrometry datasets improves neoantigen identification, Nat Biotechnol., 2018, 37:55-63.
[0401] Candia M., et al., On peptides and altered peptide ligands: from origin, mode of action and design to clinical application (immunotherapy), Int. Arch. Allergy Immunol., 2016, 170 (4): 211-233.
[0402] Chicz R. M., et al., Predominant naturally processed peptides bound to HLA-DR1 are derived from MHC-related molecules and are heterogeneous in size, Nature, 1992, 358 (6389): 764-768.
[0403] Cleveland W. L., et al., Routine large-scale production of monoclonal antibodies in a protein-free culture medium, J. Immunol. Methods, 1983, 56 (2): 221-234.
[0404] Croft N. P., et al., Most viral peptides displayed by class I MHC on infected cells are immunogenic, Proc. Natl. Acad. Sci. U.S.A., 2019, 116 (8): 3112-3117.
[0405] Dai Z, Huisman B D, Zeng H, Carter B, Jain S, Birnbaum M E, Gifford D K. Machine learning optimization of peptides for presentation by class II MHCs. Bioinformatics. 2021 Oct. 11; 37 (19): 3160-3167. doi: 10.1093/bioinformatics/btab131. PMID: 33705522; PMCID: PMC8504626. Also at bioRxiv, 2020.
[0406] Dai, Z., & Gifford, D. K. (2023). Constrained Submodular Optimization for Vaccine Design. Proceedings of the AAAI Conference on Artificial Intelligence, 37 (4), 5045-5053. https://doi.org/10.1609/aaai.v37i4.25632, also arXiv preprint arXiv: 2206.08336. https://arxiv.org/abs/2206.08336, Version 2, 27 Jan. 2023.
[0407] Geall A. J., et al., Nonviral delivery of self-amplifying RNA vaccines, Proc. Natl. Acad. Sci. USA., 2012, 109 (36): 14604-14609.
[0408] Gibson V. B., et al., Proinsulin multi-peptide immunotherapy induces antigen-specific regulatory T cells and limits autoimmunity in a humanized model, Clin. Exp. Immunol., 2015, 182 (3): 251-260.
[0409] Hie B., et al., Learning the language of viral evolution and escape, Science, 2021 15; 371 (6526): 284-288.
[0410] Houghton C. S., Immunological validation of the EpitOptimizer program for streamlined design of heteroclitic epitopes, Vaccine, 2007, 25 (29): 5330-5342.
[0411] Klinger M., et al., Multiplex identification of antigen-specific T cell receptors using a combination of immune assays and immune receptor sequencing, PLOS One, 2015, 10 (10): e0141561.
[0412] Kranz L. M., et al., Systemic RNA delivery to dendritic cells exploits antiviral defence for cancer immunotherapy, Nature, 2016, 534 (7607): 396-401.
[0413] Kreiter, S., et al., Increased antigen presentation efficiency by coupling antigens to MHC class I trafficking signals, J. Immunol., 2008, 180 (1): 309-318
[0414] Li H, Peng K, Yang K, Ma W, Qi S, Yu X, He J, Lin X, Yu G. Circular RNA cancer vaccines drive immunity in hard-to-treat malignancies. Theranostics. 2022 Aug. 29; 12 (14): 6422-6436. doi: 10.7150/thno.77350. PMID: 36168634; PMCID: PMC9475446.
[0415] Liu G., et al., Computationally optimized SARS-COV-2 MHC class I and II vaccine formulations predicted to target human haplotype distributions, Cell Syst., 2020a, 11 (2): 131-144.
[0416] Liu G., et al., Predicted cellular immunity population coverage gaps for sars-cov-2 subunit vaccines and their augmentation by compact peptide sets, Cell Syst., 2020b, 12 (1): P102-P107.
[0417] Liu G., et al., Maximum n-times Coverage for Vaccine Design, https://arxiv.org/abs/2101.10902v3, 2021.
[0418] London N., et al., Rosetta FlexPepDock web server—high resolution modeling of peptide-protein interactions, Nucleic Acids Res., 2011 July; 39 (Web Server issue): W249-253.
[0419] Maa Y. F. & Prestrelski S., Biopharmaceutical powders: particle formation and formulation considerations, Curr. Pharm. Biotechnol., 2000, 1 (3) 283-302.
[0420] Ng A. W. R., et al., In silico-guided sequence modifications of K-ras epitopes improve immunological outcome against G12V and G13D mutant KRAS antigens, PeerJ, 2018, 6: e5056.
[0421] Nielsen M., et al., The role of the proteasome in generating cytotoxic T-cell epitopes: insights obtained from improved predictions of proteasomal cleavage, Immunogenetics, 2005, 57 (1-2): 33-41.
[0422] Nielsen M., et al., Quantitative predictions of peptide binding to any HLA-DR molecule of known sequence: NetMHCIIpan. PLOS Comput. Biol., 2008, 4 (7): e1000107.
[0423] Nielsen M., et al., An artificial neural network-based alignment algorithm for MHC class II peptide binding prediction, BMC Bioinformatics, 2009, 10:296.
[0424] Nielsen M, et al., NNAlign: a platform to construct and evaluate artificial neural network models of receptor-ligand interactions, Nucleic Acids Res., 2017, 45 (W1): W344-W349.
[0425] O'Donnell T. J., et al., MHCflurry: open-source class I MHC binding affinity prediction, Cell Syst., 2018, 7 (1): 129-132.
[0426] O'Donnell T. J., et al., MHCflurry 2.0: Improved pan-allele prediction of MHC class I-presented peptides by incorporating antigen processing. Cell Syst., 2020, 11 (1): 42-48.
[0427] Ogishi M., et al., Quantitative prediction of the landscape of t cell epitope immunogenicity in sequence space, Front. Immunol., 2019, 10:827.
[0428] Pardi N., et al., Zika virus protection by a single low-dose nucleoside-modified mRNA vaccination. Nature. 2017 Mar. 9; 543 (7644): 248-251.
[0429] Park M. S., et al., Accurate structure prediction of peptide-MHC complexes for identifying highly immunogenic antigens, Mol. Immunol., 2013, 56 (1-2): 81-90.
[0430] Reynisson B., et al., NetMHCpan-4.1 and NetMHCIIpan-4.0: improved predictions of MHC antigen presentation by concurrent motif deconvolution and integration of MS MHC eluted ligand data, Nucleic Acids Res., 2020, 48 (W1): W449-W454.
[0431] Rist M. J., et al., HLA peptide length preferences control CD8+ T cell responses, J. Immunol., 2013, 191 (2): 561-571.
[0432] Sahin U., et al., Personalized RNA mutanome vaccines mobilize poly-specific therapeutic immunity against cancer, Nature, 2017, 547 (7662): 222-226.
[0433] Slota M., et al., ELISpot for measuring human immune responses to vaccines, Expert Rev. Vaccines, 2011, 10 (3): 299-306.
[0434] Tapia-Calle G., et al., A PBMC-based system to assess human t cell responses to SARS-COV vaccine candidates in vitro, Vaccines (Basel), 2019, 7 (4): 181.
[0435] Toussaint N. C., et al., A mathematical framework for the selection of an optimal set of peptides for epitope-based vaccines. PLOS Comput. Biol., 2008, 4 (12): e1000246.
[0436] Trolle T., et al., The length distribution of class I-restricted T cell epitopes is determined by both peptide supply and MHC allele-specific binding preference, J. Immunol., 2016, 196 (4): 1480-1487.
[0437] Vita R., et al., The Immune Epitope Database (IEDB): 2018 update, Nucleic Acids Res., 2019, 47 (D1): D339-D343.
[0438] Wang Y, Wu H, Cai Y. A benchmark study of sequence alignment methods for protein clustering. BMC Bioinformatics. 2018 Dec. 31; 19 (Suppl 19): 529. doi: 10.1186/s12859-018-2524-4. PMID: 30598070; PMCID: PMC6311937.
[0439] Wang Q, Douglass J, Hwang M S, Hsiue E H, Mog B J, Zhang M, Papadopoulos N, Kinzler K W, Zhou S, Vogelstein B. Direct Detection and Quantification of Neoantigens. Cancer Immunol Res. 2019 November; 7 (11): 1748-1754. doi: 10.1158/2326-6066.CIR-19-0107. Epub 2019 Sep. 16.
[0440] Warren L., et al., Highly efficient reprogramming to pluripotency and directed differentiation of human cells with synthetic modified mRNA. Cell Stem Cell. 2010 Nov. 5; 7 (5): 618-30.
[0441] Wesselhoeft R A, Kowalski P S, Anderson D G. Engineering circular RNA for potent and stable translation in eukaryotic cells. Nat Commun. 2018 Jul. 6; 9 (1): 2629. doi: 10.1038/s41467-018-05096-6. PMID: 29980667; PMCID: PMC6035260.
[0442] Woodham A. W., et al., Nanobody-antigen conjugates elicit hpv-specific antitumor immune responses, Cancer Immunol. Res., 2018, 6 (7): 870-880.
[0443] Zirlik, K. M., et al., Cytotoxic T cells generated against heteroclitic peptides kill primary tumor cells independent of the binding affinity of the native tumor antigen peptide, Blood, 2006, 108 (12): 3865-3870.

The application's sequence listing, which the Patent Office published only in electronic form, follows.

SEQUENCE LISTING (7602 sequences)

SEQ ID NO: 1 - protein, 9 aa, synthetic construct
  source 1..9: note = Seed: WTVNDIQKL; note = HLAs: B5703 B5802 C0202 C0210 C0217 C0229 C0302 C0303 C0304 C0317 C0501 C0509 C0801 C0803 C0804 C0812 C1202 C1203 C1502 C1504 C1505 C1509 C1601 C1602 C1604 C16112 C1646 C17 C1701 C1702 C1703 C1704 C1705 C1706 C1707
WAVNDIQKM

SEQ ID NO: 2 - protein, 8 aa, synthetic construct
  source 1..8: note = Seed: VTDSQYAL; note = HLAs: C0102 C0144 C0303 C0304 C0305 C0401 C0403 C0404 C0407 C0501 C0509 C0704 C0801 C0802 C0803 C0804 C0812 C1502 C1504 C1505 C1509 C1601 C1602 C16112 C1646 C17 C1701 C1702 C1703 C1704 C1705 C1706 C1707 C1801 C1802
VSDSQYAL

SEQ ID NO: 3 - protein, 9 aa, synthetic construct
  source 1..9: note = Seed: TVNDIQKLV; note = HLAs: A0201 A0202 A0203 A0204 A0205 A0206 A0207 A0211 A0214 A02264 A0230 B1301 B1302 B1303 B5201 C0102 C0144 C0202 C0210 C0214 C0217 C0229 C0303 C0304 C0305 C0317 C0403 C0501 C0509 C0602 C0704 C0801 C0803 C0804 C0812 C1202 C1203 C1502 C1504 C1505 C1509 C1601 C1602 C1604 C16112 C1646 C17 C1701 C1702 C1703 C1704 C1705 C1706 C1707
TMNDIQKLL

SEQ ID NO: 4 - protein, 9 aa, synthetic construct
  source 1..9: note = Seed: WTVNDIQKL; note = HLAs: A0204 A0205 A0206 A0207 A6802 A6827 B1301 B5702 B5703 B5802 C0202 C0210 C0217 C0229 C0302 C0303 C0304 C0317 C0501 C0509 C0801 C0803 C0804 C0812 C1202 C1203 C1502 C1504 C1505 C1509 C1601 C1602 C1604 C16112 C1646 C17 C1701 C1702 C1703 C1704 C1705 C1706 C1707
WAVNDIQKL

SEQ ID NO: 5 - protein, 11 aa, synthetic construct
  source 1..11: note = Seed: TVNDIQKLVGK; note = HLAs: A0301 A0302 A0305 A1101 A1102 A3001 A3104 A3303 A3401 A3402 A3601 A6601 A6602 A6603 A6801 A74 A7401 A7402 A7403 A7404 A7405 A7408 A7409 A7411 A7413 C0202 C0210 C0214 C0229 C0302 C0303 C0602 C1202 C1504 C1509 C1601 C1602 C1604 C16112 C1646
TTNDIQKLVGK

SEQ ID NO: 6 - protein, 9 aa, synthetic construct
  source 1..9: note = Seed: ELHPDKWTV; note = HLAs: A0205 A6802 A6827 A6901 B1302 B1303 B5107 B5108 B5201 C1505
EVHPDKWTV

SEQ ID NO: 7 - protein, 9 aa, synthetic construct
  source 1..9: note = Seed: TVNDIQKLV; note = HLAs: A0201 A0202 A0203 A0204 A0205 A0206 A0207 A0211 A0214 A02264 A0230 B1301 B1302 B1303 B5201 C0102 C0144 C0202 C0210 C0214 C0229 C0403 C0501 C0509 C0602 C0704 C0801 C0803 C0812 C1202 C1203 C1502 C1504 C1505 C1509 C1601 C1602 C1604 C16112 C1646 C17 C1701 C1702 C1703 C1704 C1705 C1706 C1707
TMNDIQKLI

SEQ ID NO: 8 - protein, 9 aa, synthetic construct
  source 1..9: note = Seed: WTVNDIQKL; note = HLAs: A0202 A0204 A0205 A0206 A0207 A0214 B1301 C0202 C0210 C0229 C0801 C0803 C1202 C1505 C17 C1701 C1702 C1703 C1704 C1705 C1706
WQVNDIQKL

SEQ ID NO: 9 - protein, 9 aa, synthetic construct
  source 1..9: note = Seed: WTVNDIQKL; note = HLAs: A2501 B1517 B5703 B5802 C0202 C0210 C0229 C0302 C1202 C1203 C1504 C1509 C1601 C1602 C1604 C16112 C1646
WSVNDIQKY

SEQ ID NO: 10 - protein, 9 aa, synthetic construct
  source 1..9: note = Seed: TVNDIQKLV; note = HLAs: A0201 A0202 A0203 A0204 A0205 A0206 A0207 A0211 A0214 A02264 A0230 A6802 A6827 B1301 B1302 B1303 B5201 C0102 C0144 C0202 C0210 C0214 C0229 C0403 C0501 C0509 C0602 C0704 C0801 C0803 C0812 C1202 C1203 C1502 C1504 C1505 C1509 C1601 C1602 C1604 C16112 C1646 C17 C1701 C1702 C1703 C1704 C1705 C1706 C1707
TMNDIQKLV

SEQ ID NO: 11 - protein, 8 aa, synthetic construct
  source 1..8: note = Seed: VTDSQYAL; note = HLAs: C0102 C0144 C0303 C0304 C0305 C0401 C0403 C0404 C0407 C0501 C0509 C0704 C0801 C0802 C0803 C0804 C0812 C1502 C1504 C1505 C1509 C1601 C1602 C16112 C1646 C17 C1701 C1702 C1703 C1704 C1705 C1706 C1707
VADSQYAM

SEQ ID NO: 12 - protein, 9 aa, synthetic construct
  source 1..9: note = Seed: ELHPDKWTV; note = HLAs: A0205 A6802 A6827 A6901 B1302 B5108 B5201 C1505
ETHPDKWTV

SEQ ID NO: 13 - protein, 9 aa, synthetic construct
  source 1..9: note = Seed: WTVNDIQKL; note = HLAs: A0202 A0204 A0205 A0206 A0207 A0214 B1301 C0302 C0303 C0304 C0801 C0803 C1505 C1602 C17 C1701 C1702 C1703 C1704 C1705 C1706 C1707
WMVNDIQKL

SEQ ID NO: 14 - protein, 9 aa, synthetic construct
  source 1..9: note = Seed: WTVNDIQKL; note = HLAs: A2501 B1301 B1517 B5702 B5703 B5802 C0202 C0210 C0229 C0302 C1202 C1203 C1504 C1505 C1509 C1601 C1602 C1604 C16112 C1646 C1701 C1702 C1703 C1704 C1705
WSVNDIQKF

SEQ ID NO: 15 - protein, 9 aa, synthetic construct
  source 1..9: note = Seed: WTVNDIQKL; note = HLAs: A0202 A0204 A0205 A0206 A0207 A0214 B1301
WQVNDIQKI

SEQ ID NO: 16 - protein, 8 aa, synthetic construct
  source 1..8: note = Seed: VTDSQYAL; note = HLAs: C0102 C0144 C0303 C0304 C0305 C0401 C0403 C0404 C0407 C0501 C0509 C0704 C0801 C0802 C0803 C0804 C0812 C1502 C1504 C1505 C1509 C1601 C1602 C16112 C1646 C17 C1701 C1702 C1703 C1704 C1705 C1706 C1707 C1801 C1802
VADSQYAL

SEQ ID NO: 17 - protein, 9 aa, synthetic construct
  source 1..9: note = Seed: ELHPDKWTV; note = HLAs: A0205 A6802 A6827 A6901 B1301 B1302 B1303 B5107 B5108 B5201 C1505
EIHPDKWTV

SEQ ID NO: 18 - protein, 11 aa, synthetic construct
  source 1..11: note = Seed: TVNDIQKLVGK; note = HLAs: A3104 A3303 A3401 A3402 A3601 A6601 A6602 A6603 A6801 A7401 A7402 A7403 A7404 A7405 A7408 A7409 A7411 A7413 C0202 C0210 C0229 C0303 C0602 C1202 C1504 C1509 C1601 C1602 C16112 C1646
TSNDIQKLVGR

SEQ ID NO: 19 - protein, 9 aa, synthetic construct
  source 1..9: note = Seed: WTVNDIQKL; note = HLAs: A0202 A0204 A0205 A0206 A0207 A0214 B1301
WLVNDIQKI

SEQ ID NO: 20 - protein, 9 aa, synthetic construct
  source 1..9: note = Seed: TVNDIQKLV; note = HLAs: A0201 A0202 A0203 A0204 A0205 A0206 A0207 A0211 A0214 A02264 A0230 A6802 A6827 B1301 B1302 B1303 B5201 C0102 C0144 C0202 C0210 C0214 C0229 C0403 C0501 C0509 C0602 C0704 C0801 C0803 C0812 C1202 C1203 C1502 C1504 C1505 C1509 C1601 C1602 C1604 C16112 C1646 C17 C1701 C1702 C1703 C1704 C1705 C1706 C1707
TLNDIQKLV

SEQ ID NO: 21 - protein, 11 aa, synthetic construct
  source 1..11: note = Seed: TVNDIQKLVGK; note = HLAs: A0302 A1101 A1102 A3104 A3303 A3401 A3402 A3601 A6601 A6602 A6603 A6801 A74 A7401 A7402 A7403 A7404 A7405 A7408 A7409 A7411 A7413 C0202 C0210 C0229 C0303 C0602 C1202 C1504 C1509 C1601 C1602 C16112 C1646
TTNDIQKLVGR

SEQ ID NO: 22 - protein, 9 aa, synthetic construct
  source 1..9: note = Seed: WTVNDIQKL; note = HLAs: A0202 A0204 A0205 A0206 A0207 A0214 B1301
WQVNDIQKV

SEQ ID NO: 23 - protein, 9 aa, synthetic construct
  source 1..9: note = Seed: TVNDIQKLV; note = HLAs: A0204 A0205 A0206 A6802 A6827 A6901 B1302 B1303 B5201 C0202 C0210 C0214 C0217 C0229 C0303 C0317 C0403 C0501 C0509 C0602 C0704 C0801 C0803 C0804 C0812 C1202 C1203 C1502 C1504 C1505 C1509 C1601 C1602 C1604 C16112 C1646 C17 C1701 C1702 C1703 C1704 C1705 C1706 C1707
TTNDIQKLV

SEQ ID NO: 24 - protein, 9 aa, synthetic construct
  source 1..9: note = Seed: WTVNDIQKL; note = HLAs: A0202 A0204 A0205 A0206 A0207 A0214 A6802 A6827 B1301
WMVNDIQKV

SEQ ID NO: 25 - protein, 11 aa, synthetic construct
  source 1..11: note = Seed: TVNDIQKLVGK; note = HLAs: A0302 A1101 A1102 A3104 A3303 A3401 A3402 A3601 A6601 A6602 A6603 A6801 A74 A7401 A7402 A7403 A7404 A7405 A7408 A7409 A7411 A7413 C0202 C0210 C0214 C0229 C0302 C0303 C0602 C1202 C1504 C1509 C1601 C1602 C1604 C16112 C1646
TVNDIQKLVGR

SEQ ID NO: 26 - protein, 9 aa, synthetic construct
  source 1..9: note = Seed: WTVNDIQKL; note = HLAs: B1517 B5702 B5703 B5802 C0202 C0210 C0229 C0302 C0303 C0304 C0801 C0803 C1202 C1203 C1502 C1504 C1505 C1509 C1601 C1602 C1604 C16112 C1646 C17 C1701 C1702 C1703 C1704 C1705 C1706 C1707
WSVNDIQKM

SEQ ID NO: 27 - protein, 9 aa, synthetic construct
  source 1..9: note = Seed: TVNDIQKLV; note = HLAs: A0201 A0202 A0203 A0204 A0205 A0206 A0207 A0211 A0214 A02264 A0230 B1301 B1302 B1303 B5201 C0102 C0144 C0202 C0210 C0214 C0217 C0229 C0303 C0304 C0305 C0317 C0403 C0501 C0509 C0602 C0704 C0801 C0803 C0804 C0812 C1202 C1203 C1502 C1504 C1505 C1509 C1601 C1602 C1604 C16112 C1646 C17 C1701 C1702 C1703 C1704 C1705 C1706 C1707
TLNDIQKLL

SEQ ID NO: 28 - protein, 9 aa, synthetic construct
  source 1..9: note = Seed: WTVNDIQKL; note = HLAs: A2501 B1301 B1517 B5702 B5703 B5802 C0202 C0210 C0217 C0229 C0302 C0303 C0304 C0317 C0801 C0803 C1202 C1203 C1502 C1504 C1505 C1509 C1601 C1602 C1604 C16112 C1646 C17 C1701 C1702 C1703 C1704 C1705 C1706 C1707
WAVNDIQKF

SEQ ID NO: 29 - protein, 9 aa, synthetic construct
  source 1..9: note = Seed: WTVNDIQKL; note = HLAs: A2501 A6603 B1517 B5703 B5802 C0202 C0210 C0217 C0229 C0302 C1202 C1203 C1504 C1509 C1601 C1602 C1604 C16112 C1646
WTVNDIQKY

SEQ ID NO: 30 - protein, 9 aa, synthetic construct
  source 1..9: note = Seed: WTVNDIQKL; note = HLAs: A2501 B1301 B1517 B5702 B5703 B5802
WTVNDIQKW

SEQ ID NO: 31 - protein, 9 aa, synthetic construct
  source 1..9: note = Seed: WTVNDIQKL; note = HLAs: A2501 B1301 B1517 B5702 B5703 B5802
WVVNDIQKW

SEQ ID NO: 32 - protein, 9 aa, synthetic construct
  source 1..9: note = Seed: TVNDIQKLV; note = HLAs: B1301 B1302 B1303 B5108 B5201 C0102 C0144 C0202 C0210 C0214 C0217 C0229 C0303 C0304 C0305 C0317 C0403 C0501 C0509 C0602 C0704 C0801 C0803 C0804 C0812 C1202 C1203 C1502 C1504 C1505 C1509 C1601 C1602 C1604 C16112 C1646 C17 C1701 C1702 C1703 C1704 C1705 C1706 C1707
TANDIQKLL

SEQ ID NO: 33 - protein, 8 aa, synthetic construct
  source 1..8: note = Seed: VTDSQYAL; note = HLAs: C0102 C0144 C0401 C0403 C0404 C0407 C0501 C0509 C0704 C0801 C0802 C0803 C0812 C1602 C1646 C1801 C1802
VYDSQYAL

SEQ ID NO: 34 - protein, 9 aa, synthetic construct
  source 1..9: note = Seed: YNVLPQGWK; note = HLAs: A0302 A1101 A1102 A3402 A3601 A6801
YTVLPQGWK

SEQ ID NO: 35 - protein, 9 aa, synthetic construct
  source 1..9: note = Seed: WTVNDIQKL; note = HLAs: A0202 A0204 A0205 A0206 A0207 A0214 A6802 A6827 C1502 C1505
WVVNDIQKV

SEQ ID NO: 36 - protein, 9 aa, synthetic construct
  source 1..9: note = Seed: DIQKLVGKL; note = HLAs: A2501 A2601 A3401 A6601 A6602 A6603
DVQKLVGKY

SEQ ID NO: 37 - protein, 9 aa, synthetic construct
  source 1..9: note = Seed: TVNDIQKLV; note = HLAs: B5108 B5201 C0102 C0144 C0202 C0210 C0214 C0217 C0229 C0303 C0304 C0305 C0317 C0403 C0501 C0509 C0602 C0704 C0801 C0803 C0804 C0812 C1202 C1203 C1502 C1504 C1505 C1509 C1601 C1602 C1604 C16112 C1646 C17 C1701 C1702 C1703 C1704 C1705 C1706 C1707
TANDIQKLM

SEQ ID NO: 38 - protein, 8 aa, synthetic construct
  source 1..8: note = Seed: VTDSQYAL; note = HLAs: C0102 C0144 C0304 C0305 C0401 C0403 C0404 C0407 C0501 C0509 C0704 C0801 C0802 C0803 C0804 C0812 C1505 C1601 C1602 C16112 C1646 C17 C1701 C1702 C1703 C1704 C1705 C1706 C1801 C1802
VFDSQYAL

SEQ ID NO: 39 - protein, 9 aa, synthetic construct
  source 1..9: note = Seed: TVNDIQKLV; note = HLAs: C0102 C0144 C0214 C0303 C0304 C0305 C0317 C0403 C0501 C0509 C0602 C0704 C0801 C0803 C0812 C1505 C1601 C1602 C1604 C16112 C1646 C17 C1701 C1702 C1703 C1704 C1705
TYNDIQKLL

SEQ ID NO: 40 - protein, 11 aa, synthetic construct
  source 1..11: note = Seed: TVNDIQKLVGK; note = HLAs: A3104 A3303 A7401 A7402 A7403 A7404 A7405 A7409 A7411 C0303 C0602 C1602 C1646
TYNDIQKLVGR

SEQ ID NO: 41 - protein, 8 aa, synthetic construct
  source 1..8: note = Seed: VNDIQKLV; note = HLAs: C0403 C0501 C0509 C0802
VTDIQKLL

SEQ ID NO: 42 - protein, 9 aa, synthetic construct
  source 1..9: note = Seed: WTVNDIQKL; note = HLAs: A2501 B1301 B1517 B5702 B5703 B5802
WSVNDIQKW

SEQ ID NO: 43 - protein, 9 aa, synthetic construct
  source 1..9: note = Seed: TVNDIQKLV; note = HLAs: B1301 B5108 C0102 C0144 C0202 C0210 C0214 C0217 C0229 C0303 C0304 C0305 C0317 C0403 C0501 C0509 C0602 C0704 C0801 C0803 C0804 C0812 C1202 C1203 C1502 C1504 C1505 C1509 C1601 C1602 C1604 C16112 C1646 C17 C1701 C1702 C1703 C1704 C1705 C1706 C1707
TANDIQKLF

SEQ ID NO: 44 - protein, 8 aa, synthetic construct
  source 1..8: note = Seed: VTDSQYAL; note = HLAs: C0401 C0403 C0404 C0407 C0501 C0509 C0704 C0801 C0802 C0803 C1801 C1802
VWDSQYAL

SEQ ID NO: 45 - protein, 11 aa, synthetic construct
  source 1..11: note = Seed: ALLDTGADDTV; note = HLAs: A0201 A0202 A0203 A0204 A0205 A0206 A0207 A0211 A0214 A02264 A0230 B1301 B1302 B1303
AMLDTGADDTL

SEQ ID NO: 46 - protein, 9 aa, synthetic construct
  source 1..9: note = Seed: TVNDIQKLV; note = HLAs: C0214 C0602 C0704
TRNDIQKLL

SEQ ID NO: 47 - protein, 8 aa, synthetic construct
  source 1..8: note = Seed: VTDSQYAL; note = HLAs: C0401 C0403 C0404 C0407 C0501 C0509 C0704 C0801 C0802 C0803 C1602 C1801 C1802
VFDSQYAM

SEQ ID NO: 48 - protein, 8 aa, synthetic construct
  source 1..8: note = Seed: VNDIQKLV; note = HLAs: C0403 C0501 C0509 C0802
VSDIQKLL

SEQ ID NO: 49 - protein, 9 aa, synthetic construct
  source 1..9: note = Seed: TVNDIQKLV; note = HLAs: C0202 C0210 C0214 C0217 C0229 C0303 C0304 C0305 C0317 C0602 C0801 C0803 C1202 C1203 C1502 C1504 C1505 C1509 C1601 C1602 C1604 C16112 C1646 C17 C1701 C1702 C1703 C1704 C1705 C1706 C1707
TANDIQKLY

SEQ ID NO: 50 - protein, 9 aa, synthetic construct
  source 1..9: note = Seed: TVNDIQKLV; note = HLAs: B1301 B5108 B5201 C0102 C0144 C0202 C0210 C0214 C0217 C0229 C0303 C0304 C0305 C0317 C0403 C0501 C0509 C0602 C0704 C0801 C0803 C0804 C0812 C1202 C1203 C1502 C1504 C1505 C1509 C1601 C1602 C1604 C16112 C1646 C17 C1701 C1702 C1703 C1704 C1705 C1706 C1707
TSNDIQKLL

SEQ ID NO: 51 - protein, 11 aa, synthetic construct
  source 1..11: note = Seed: ALLDTGADDTV; note = HLAs: A0201 A0202 A0203 A0204 A0205 A0206 A0207 A0211 A0214 A02264 A0230 B1301 B1302 B1303
ALLDTGADDTL

SEQ ID NO: 52 - protein, 9 aa, synthetic construct
  source 1..9: note = Seed: TVNDIQKLV; note = HLAs: C0214 C0602 C0704
TRNDIQKLV

SEQ ID NO: 53 - protein, 8 aa, synthetic construct
  source 1..8: note = Seed: VTDSQYAL; note = HLAs: C0401 C0403 C0404 C0407 C0501 C0509 C0704 C1601 C1602 C16112 C1646 C1801 C1802
VFDSQYAF

SEQ ID NO: 54 - protein, 8 aa, synthetic construct
  source 1..8: note = Seed: VNDIQKLV; note = HLAs: C0403 C0501 C0509 C0802
VIDIQKLL

SEQ ID NO: 55 - protein, 11 aa, Human immunodeficiency virus 1
  source 1..11: note = HLAs: A0301 A0302 A0305 A1101 A1102 A3001 A3104 A3303 A3401 A3402 A3601 A6601 A6602 A6603 A6801 A74 A7401 A7402 A7403 A7404 A7405 A7408 A7409 A7411 A7413 C0202 C0210 C0214 C0229 C0302 C0303 C0602 C1202 C1203 C1502 C1504 C1509 C1601 C1602 C1604 C16112 C1646
TVNDIQKLVGK

SEQ ID NO: 56 - protein, 9 aa, Human immunodeficiency virus 1
  source 1..9: note = HLAs: A0201 A0202 A0203 A0204 A0205 A0206 A0207 A0211 A0214 A02264 A0230 A6802 A6827 A6901 B1301 B1302 B1303 B5108 B5201 C0102 C0144 C0202 C0210 C0214 C0217 C0229 C0303 C0304 C0305 C0317 C0403 C0501 C0509 C0602 C0704 C0801 C0803 C0804 C0812 C1202 C1203 C1502 C1504 C1505 C1509 C1601 C1602 C1604 C16112 C1646 C17 C1701 C1702 C1703 C1704 C1705 C1706 C1707
TVNDIQKLV

SEQ ID NO: 57 - protein, 20 aa, synthetic construct
  source 1..20: note = Seed: KEPPFLWMGYELHPDKWTVQ; note = HLAs: DRB1_0101 DRB1_1001 DPA10103-DPB10101 DPA10103-DPB10201 DPA10103-DPB10202 DPA10103-DPB10401 DPA10103-DPB10402 DPA10103-DPB10501 DPA10103-DPB110501 DPA10103-DPB112601 DPA10103-DPB11501 DPA10103-DPB11601 DPA10103-DPB11801 DPA10103-DPB11901 DPA10103-DPB12301 DPA10103-DPB13101 DPA10103-DPB13401 DPA10103-DPB13901 DPA10103-DPB14001 DPA10103-DPB14101 DPA10103-DPB14801 DPA10103-DPB14901 DPA10103-DPB15001 DPA10103-DPB15101 DPA10103-DPB15501 DPA10103-DPB15901 DPA10103-DPB18001 DPA10104-DPB10101 DPA10104-DPB11501 DPA10105-DPB10101 DPA10105-DPB10401 DPA10105-DPB11801 DPA10105-DPB15001 DPA10106-DPB10101 DPA10201-DPB10101 DPA10201-DPB10201 DPA10201-DPB10202 DPA10201-DPB10401 DPA10201-DPB10501 DPA10201-DPB110601 DPA10201-DPB11501 DPA10201-DPB11601 DPA10201-DPB11901 DPA10201-DPB13401 DPA10201-DPB15501 DPA10202-DPB10101 DPA10202-DPB10201 DPA10202-DPB10202 DPA10202-DPB10401 DPA10202-DPB10501 DPA10202-DPB110601 DPA10202-DPB11101 DPA10202-DPB11301 DPA10202-DPB11801 DPA10202-DPB11901; note = HLAs: DPA10202-DPB13101 DPA10202-DPB13801 DPA10202-DPB15501 DPA10202-DPB16501 DPA10301-DPB10101 DPA10301-DPB10201 DPA10301-DPB10202 DPA10301-DPB10401 DPA10301-DPB10402 DPA10301-DPB110501 DPA10301-DPB110601 DPA10301-DPB11101 DPA10301-DPB11301 DPA10301-DPB11801 DPA10301-DPB12301 DPA10301-DPB13901 DPA10301-DPB14001 DPA10301-DPB14901 DPA10301-DPB15501 DPA10301-DPB16501 DPA10301-DPB17501 DPA10301-DPB18001 DPA10401-DPB10101 DPA10401-DPB10201 DPA10401-DPB10202 DPA10401-DPB10402 DPA10401-DPB10501 DPA10401-DPB110501 DPA10401-DPB14901
KEPPFLWSGFELVPDKWTVQ

SEQ ID NO: 58 - protein, 20 aa, synthetic construct
  source 1..20: note = Seed: KEPPFLWMGYELHPDKWTVQ; note = HLAs: DRB1_1602 DQA10101-DQB10501 DQA10101-DQB10503 DQA10102-DQB10501 DQA10102-DQB10502 DQA10102-DQB10503 DQA10103-DQB10501 DQA10104-DQB10501 DQA10104-DQB10503 DQA10105-DQB10501 DQA10107-DQB10503 DQA10505-DQB10402
KEPPFLIMGFEDHPVKWTVQ

SEQ ID NO: 59 - protein, 20 aa, synthetic construct
  source 1..20: note = Seed: KEPPFLWMGYELHPDKWTVQ; note = HLAs: DRB1_1501 DRB1_1503
KEPIFLYMNYEAHPDKWTVQ

SEQ ID NO: 60 - protein, 20 aa, synthetic construct
  source 1..20: note = Seed: KEPPFLWMGYELHPDKWTVQ; note = HLAs: DRB1_0101 DRB1_0405 DRB1_1001 DPA10103-DPB10201 DPA10103-DPB10202 DPA10103-DPB10401 DPA10103-DPB10501 DPA10103-DPB112601 DPA10103-DPB11501 DPA10103-DPB11801 DPA10103-DPB11901 DPA10103-DPB12301 DPA10103-DPB13401 DPA10103-DPB13901 DPA10103-DPB14001 DPA10103-DPB14801 DPA10103-DPB15901 DPA10104-DPB11501 DPA10105-DPB10401 DPA10105-DPB11801 DPA10106-DPB10101 DPA10201-DPB10101 DPA10201-DPB110601 DPA10201-DPB11501 DPA10201-DPB11601 DPA10201-DPB11901 DPA10201-DPB15501 DPA10202-DPB10101 DPA10202-DPB10201 DPA10202-DPB10202 DPA10202-DPB10401 DPA10202-DPB10501 DPA10202-DPB110601 DPA10202-DPB11101 DPA10202-DPB11301 DPA10202-DPB11801 DPA10202-DPB11901 DPA10202-DPB13101 DPA10202-DPB13801 DPA10202-DPB15501 DPA10202-DPB16501 DPA10301-DPB10201 DPA10301-DPB10202 DPA10301-DPB10401 DPA10301-DPB10402 DPA10301-DPB110501 DPA10301-DPB110601 DPA10301-DPB11101 DPA10301-DPB11301 DPA10301-DPB11801 DPA10301-DPB12301 DPA10301-DPB13901 DPA10301-DPB14001 DPA10301-DPB14901 DPA10301-DPB15501 DPA10301-DPB16501; note = HLAs: DPA10301-DPB17501 DPA10301-DPB18001 DPA10401-DPB10201 DPA10401-DPB10202 DPA10401-DPB10402 DPA10401-DPB10501 DPA10401-DPB110501 DPA10401-DPB14901
KEPPFLWIGSELAPDKWTVQ

SEQ ID NO: 61 - protein, 20 aa, synthetic construct
  source 1..20: note = Seed: KEPPFLWMGYELHPDKWTVQ; note = HLAs: DPA10103-DPB10101 DPA10103-DPB10201 DPA10103-DPB10202 DPA10103-DPB10401 DPA10103-DPB10402 DPA10103-DPB10501 DPA10103-DPB110501 DPA10103-DPB112601 DPA10103-DPB11501 DPA10103-DPB11601 DPA10103-DPB11801 DPA10103-DPB11901 DPA10103-DPB12301 DPA10103-DPB13101 DPA10103-DPB13401 DPA10103-DPB13901 DPA10103-DPB14001 DPA10103-DPB14101 DPA10103-DPB14801 DPA10103-DPB14901 DPA10103-DPB15001 DPA10103-DPB15101 DPA10103-DPB15501 DPA10103-DPB15901 DPA10103-DPB18001 DPA10104-DPB10101 DPA10104-DPB11501 DPA10105-DPB10101 DPA10105-DPB10401 DPA10105-DPB11801 DPA10105-DPB15001 DPA10106-DPB10101 DPA10201-DPB10101 DPA10201-DPB10201 DPA10201-DPB10202 DPA10201-DPB10401 DPA10201-DPB10501 DPA10201-DPB110601 DPA10201-DPB11501 DPA10201-DPB11601 DPA10201-DPB11901 DPA10201-DPB13401 DPA10201-DPB15501 DPA10202-DPB10101 DPA10202-DPB10201 DPA10202-DPB10202 DPA10202-DPB10401 DPA10202-DPB10501 DPA10202-DPB110601 DPA10202-DPB11101 DPA10202-DPB11301 DPA10202-DPB11801 DPA10202-DPB11901 DPA10202-DPB13101 DPA10202-DPB13801; note = HLAs: DPA10202-DPB15501 DPA10202-DPB16501 DPA10301-DPB10101 DPA10301-DPB10201 DPA10301-DPB10202 DPA10301-DPB10401 DPA10301-DPB10402 DPA10301-DPB110501 DPA10301-DPB110601 DPA10301-DPB11101 DPA10301-DPB11301 DPA10301-DPB11801 DPA10301-DPB12301 DPA10301-DPB13901 DPA10301-DPB14001 DPA10301-DPB14901 DPA10301-DPB15501 DPA10301-DPB16501 DPA10301-DPB17501 DPA10301-DPB18001 DPA10401-DPB10101 DPA10401-DPB10201 DPA10401-DPB10202 DPA10401-DPB10402 DPA10401-DPB10501 DPA10401-DPB110501 DPA10401-DPB14901
KEPPFLWHGFELLPDKWTVQ

SEQ ID NO: 62 - protein, 20 aa, synthetic construct
  source 1..20: note = Seed: KEPPFLWMGYELHPDKWTVQ; note = HLAs: DRB1_0101 DRB1_0405 DRB1_1001 DPA10103-DPB10201 DPA10103-DPB10202 DPA10103-DPB10401 DPA10103-DPB112601 DPA10103-DPB11501 DPA10103-DPB11601 DPA10103-DPB11901 DPA10103-DPB12301 DPA10103-DPB13101 DPA10103-DPB13401 DPA10103-DPB13901 DPA10103-DPB14001 DPA10103-DPB14801 DPA10103-DPB15501 DPA10104-DPB11501 DPA10105-DPB10401 DPA10106-DPB10101 DPA10201-DPB10101 DPA10201-DPB10202 DPA10201-DPB110601 DPA10201-DPB11501 DPA10201-DPB11601 DPA10201-DPB11901 DPA10201-DPB15501 DPA10202-DPB10101 DPA10202-DPB10201 DPA10202-DPB10202 DPA10202-DPB10401 DPA10202-DPB10501 DPA10202-DPB110601 DPA10202-DPB11101 DPA10202-DPB11301 DPA10202-DPB11901 DPA10202-DPB13101 DPA10202-DPB13801 DPA10202-DPB15501 DPA10202-DPB16501 DPA10301-DPB10101 DPA10301-DPB10201 DPA10301-DPB10202 DPA10301-DPB10401 DPA10301-DPB10402 DPA10301-DPB110501 DPA10301-DPB110601 DPA10301-DPB11101 DPA10301-DPB11301 DPA10301-DPB11801 DPA10301-DPB12301 DPA10301-DPB13901 DPA10301-DPB14001 DPA10301-DPB14901 DPA10301-DPB15501 DPA10301-DPB16501; note = HLAs: DPA10301-DPB17501 DPA10301-DPB18001 DPA10401-DPB10201 DPA10401-DPB10202 DPA10401-DPB10402 DPA10401-DPB10501 DPA10401-DPB110501 DPA10401-DPB14901
KEPPFLWMGNELIPDKWTVQ

SEQ ID NO: 63 - protein, 20 aa, synthetic construct
  source 1..20: note = Seed: KEPPFLWMGYELHPDKWTVQ; note = HLAs: DRB1_1602 DQA10101-DQB10501 DQA10101-DQB10503 DQA10102-DQB10501 DQA10102-DQB10502 DQA10102-DQB10503 DQA10103-DQB10501 DQA10104-DQB10501 DQA10104-DQB10503 DQA10105-DQB10501 DQA10107-DQB10503 DQA10505-DQB10402
KEPPFLIMGFEDHPAKWTVQ

SEQ ID NO: 64 - protein, 14 aa, synthetic construct
  source 1..14: note = Seed: PPFLWMGYELHPDK; note = HLAs: DQA10101-DQB10501 DQA10101-DQB10503 DQA10102-DQB10501 DQA10102-DQB10502 DQA10102-DQB10503 DQA10103-DQB10501 DQA10104-DQB10501 DQA10104-DQB10503 DQA10105-DQB10501 DQA10107-DQB10503
PPFLIMGFEDHPLK

SEQ ID NO: 65 - protein, 20 aa, synthetic construct
  source 1..20: note = Seed: KEPPFLWMGYELHPDKWTVQ; note = HLAs: DRB1_0101 DPA10103-DPB10101 DPA10103-DPB10201 DPA10103-DPB10202 DPA10103-DPB10401 DPA10103-DPB10402 DPA10103-DPB10501 DPA10103-DPB110501 DPA10103-DPB112601 DPA10103-DPB11501 DPA10103-DPB11601 DPA10103-DPB11801 DPA10103-DPB11901 DPA10103-DPB12301 DPA10103-DPB13101 DPA10103-DPB13401 DPA10103-DPB13901 DPA10103-DPB14001 DPA10103-DPB14101 DPA10103-DPB14801 DPA10103-DPB14901 DPA10103-DPB15001 DPA10103-DPB15101 DPA10103-DPB15501 DPA10103-DPB15901 DPA10103-DPB18001 DPA10104-DPB10101 DPA10104-DPB11501 DPA10105-DPB10101 DPA10105-DPB10401 DPA10105-DPB11801 DPA10105-DPB15001 DPA10106-DPB10101 DPA10201-DPB10101 DPA10201-DPB10201 DPA10201-DPB10202 DPA10201-DPB10401 DPA10201-DPB10501 DPA10201-DPB110601 DPA10201-DPB11501 DPA10201-DPB11601 DPA10201-DPB11901 DPA10201-DPB13401 DPA10201-DPB15501 DPA10202-DPB10101 DPA10202-DPB10201 DPA10202-DPB10202 DPA10202-DPB10401 DPA10202-DPB10501 DPA10202-DPB110601 DPA10202-DPB11101 DPA10202-DPB11301 DPA10202-DPB11801 DPA10202-DPB11901 DPA10202-DPB13101; note = HLAs: DPA10202-DPB13801 DPA10202-DPB15501 DPA10202-DPB16501 DPA10301-DPB10101 DPA10301-DPB10201 DPA10301-DPB10202 DPA10301-DPB10401 DPA10301-DPB10402 DPA10301-DPB110501 DPA10301-DPB110601 DPA10301-DPB11101 DPA10301-DPB11301 DPA10301-DPB11801 DPA10301-DPB12301 DPA10301-DPB13901 DPA10301-DPB14001 DPA10301-DPB14901 DPA10301-DPB15501 DPA10301-DPB16501 DPA10301-DPB17501 DPA10301-DPB18001 DPA10401-DPB10101 DPA10401-DPB10201 DPA10401-DPB10202 DPA10401-DPB10402 DPA10401-DPB10501 DPA10401-DPB110501 DPA10401-DPB14901
KEPPFLWTGFELLPDKWTVQ

SEQ ID NO: 66 - protein, 20 aa, synthetic construct
  source 1..20: note = Seed: KEPPFLWMGYELHPDKWTVQ; note = HLAs: DQA10101-DQB10501 DQA10101-DQB10503 DQA10102-DQB10501 DQA10102-DQB10502 DQA10102-DQB10503 DQA10103-DQB10501 DQA10104-DQB10501 DQA10104-DQB10503 DQA10105-DQB10501 DQA10107-DQB10503 DQA10505-DQB10402
KEPPFLIMGFEIHPDKWTVQ

SEQ ID NO: 67 - protein, 14 aa, synthetic construct
  source 1..14: note = Seed: PPFLWMGYELHPDK; note = HLAs: DQA10101-DQB10501 DQA10101-DQB10503 DQA10102-DQB10501 DQA10102-DQB10502 DQA10102-DQB10503 DQA10103-DQB10501 DQA10104-DQB10501 DQA10104-DQB10503 DQA10105-DQB10501 DQA10107-DQB10503
PPFLIMGFEDHPIK

SEQ ID NO: 68 - protein, 20 aa, synthetic construct
  source 1..20: note = Seed: KEPPFLWMGYELHPDKWTVQ; note = HLAs: DRB1_0101 DRB1_0405 DRB1_1001 DPA10103-DPB10201 DPA10103-DPB10202 DPA10103-DPB10401 DPA10103-DPB112601 DPA10103-DPB11501 DPA10103-DPB11601 DPA10103-DPB11901 DPA10103-DPB12301 DPA10103-DPB13401 DPA10103-DPB13901 DPA10103-DPB14001 DPA10103-DPB14101 DPA10103-DPB14801 DPA10103-DPB15501 DPA10104-DPB11501 DPA10105-DPB10401 DPA10106-DPB10101 DPA10201-DPB10101 DPA10201-DPB10201 DPA10201-DPB10202 DPA10201-DPB110601 DPA10201-DPB11501 DPA10201-DPB11601 DPA10201-DPB11901 DPA10201-DPB15501 DPA10202-DPB10101 DPA10202-DPB10201 DPA10202-DPB10202 DPA10202-DPB10401 DPA10202-DPB10501 DPA10202-DPB110601 DPA10202-DPB11101 DPA10202-DPB11301 DPA10202-DPB11801 DPA10202-DPB11901 DPA10202-DPB13101 DPA10202-DPB13801 DPA10202-DPB15501 DPA10202-DPB16501 DPA10301-DPB10101 DPA10301-DPB10201 DPA10301-DPB10202 DPA10301-DPB10401 DPA10301-DPB10402 DPA10301-DPB110501 DPA10301-DPB110601 DPA10301-DPB11101 DPA10301-DPB11301 DPA10301-DPB11801 DPA10301-DPB12301 DPA10301-DPB13901 DPA10301-DPB14001 DPA10301-DPB14901; note = HLAs: DPA10301-DPB15501 DPA10301-DPB16501 DPA10301-DPB17501 DPA10301-DPB18001 DPA10401-DPB10201 DPA10401-DPB10202 DPA10401-DPB10402 DPA10401-DPB10501 DPA10401-DPB110501 DPA10401-DPB14901
KEPPFLWIGNELVPDKWTVQ

SEQ ID NO: 69 - protein, 20 aa, synthetic construct
  source 1..20: note = Seed: KEPPFLWMGYELHPDKWTVQ; note = HLAs: DRB1_0101 DPA10103-DPB10101 DPA10103-DPB10201 DPA10103-DPB10202 DPA10103-DPB10401 DPA10103-DPB10402 DPA10103-DPB10501 DPA10103-DPB110501 DPA10103-DPB112601 DPA10103-DPB11501 DPA10103-DPB11601 DPA10103-DPB11801 DPA10103-DPB11901 DPA10103-DPB12301 DPA10103-DPB13101 DPA10103-DPB13401 DPA10103-DPB13901 DPA10103-DPB14001 DPA10103-DPB14101 DPA10103-DPB14801 DPA10103-DPB14901 DPA10103-DPB15001 DPA10103-DPB15101 DPA10103-DPB15501 DPA10103-DPB15901 DPA10103-DPB18001 DPA10104-DPB10101 DPA10104-DPB11501 DPA10105-DPB10101 DPA10105-DPB10401 DPA10105-DPB11801 DPA10105-DPB15001 DPA10106-DPB10101 DPA10201-DPB10101 DPA10201-DPB10201 DPA10201-DPB10202 DPA10201-DPB10401 DPA10201-DPB10501 DPA10201-DPB110601 DPA10201-DPB11501 DPA10201-DPB11601 DPA10201-DPB11901 DPA10201-DPB13401 DPA10201-DPB15501 DPA10202-DPB10101 DPA10202-DPB10201 DPA10202-DPB10202 DPA10202-DPB10401 DPA10202-DPB10501 DPA10202-DPB110601 DPA10202-DPB11101 DPA10202-DPB11301 DPA10202-DPB11801 DPA10202-DPB11901 DPA10202-DPB13101; note = HLAs: DPA10202-DPB13801 DPA10202-DPB15501 DPA10202-DPB16501 DPA10301-DPB10101 DPA10301-DPB10201 DPA10301-DPB10202 DPA10301-DPB10401 DPA10301-DPB10402 DPA10301-DPB110501 DPA10301-DPB110601 DPA10301-DPB11101 DPA10301-DPB11301 DPA10301-DPB11801 DPA10301-DPB12301 DPA10301-DPB13901 DPA10301-DPB14001 DPA10301-DPB14901 DPA10301-DPB15501 DPA10301-DPB16501 DPA10301-DPB17501 DPA10301-DPB18001 DPA10401-DPB10101 DPA10401-DPB10201 DPA10401-DPB10202 DPA10401-DPB10402 DPA10401-DPB10501 DPA10401-DPB110501 DPA10401-DPB14901
KEPPFLWSGFELAPDKWTVQ

SEQ ID NO: 70 - protein, 20 aa, synthetic construct
  source 1..20: note = Seed: KEPPFLWMGYELHPDKWTVQ; note = HLAs: DRB1_1602 DQA10101-DQB10501 DQA10101-DQB10503 DQA10102-DQB10501 DQA10102-DQB10502 DQA10102-DQB10503 DQA10103-DQB10501 DQA10104-DQB10501 DQA10104-DQB10503 DQA10105-DQB10501 DQA10107-DQB10503 DQA10505-DQB10402
KEPPFLIMGFEAHPVKWTVQ

SEQ ID NO: 71 - protein, 20 aa, synthetic construct
  source 1..20: note = Seed: KEPPFLWMGYELHPDKWTVQ; note = HLAs: DRB1_0101 DRB1_0405 DRB1_1001 DPA10103-DPB10202 DPA10103-DPB10401 DPA10103-DPB10501 DPA10103-DPB112601 DPA10103-DPB11501 DPA10103-DPB12301 DPA10103-DPB13401 DPA10103-DPB13901 DPA10103-DPB14101 DPA10103-DPB15001 DPA10104-DPB11501 DPA10105-DPB10401 DPA10105-DPB15001 DPA10106-DPB10101 DPA10201-DPB10101 DPA10201-DPB11501 DPA10201-DPB15501 DPA10202-DPB10101 DPA10202-DPB10202 DPA10202-DPB10501 DPA10202-DPB110601 DPA10202-DPB11101 DPA10202-DPB11901 DPA10202-DPB13101 DPA10202-DPB13801 DPA10202-DPB16501 DPA10301-DPB10101 DPA10301-DPB10201 DPA10301-DPB10202 DPA10301-DPB10401 DPA10301-DPB10402 DPA10301-DPB110501 DPA10301-DPB110601 DPA10301-DPB11101 DPA10301-DPB11801 DPA10301-DPB12301 DPA10301-DPB13901 DPA10301-DPB14001 DPA10301-DPB14901 DPA10301-DPB15501 DPA10301-DPB16501 DPA10301-DPB17501 DPA10301-DPB18001 DPA10401-DPB10501
KEPPFLWMGVELEPDKWTVQ

SEQ ID NO: 72 - protein, 20 aa, synthetic construct
  source 1..20: note = Seed: KEPPFLWMGYELHPDKWTVQ; note = HLAs: DRB1_0101 DRB1_0405 DRB1_1001 DPA10103-DPB10101 DPA10103-DPB10201 DPA10103-DPB10202 DPA10103-DPB10401 DPA10103-DPB112601 DPA10103-DPB11501 DPA10103-DPB11601 DPA10103-DPB11901 DPA10103-DPB12301 DPA10103-DPB13101 DPA10103-DPB13901 DPA10103-DPB14801 DPA10103-DPB15001 DPA10103-DPB15501 DPA10104-DPB10101 DPA10104-DPB11501 DPA10105-DPB10101 DPA10105-DPB10401 DPA10105-DPB15001 DPA10106-DPB10101 DPA10201-DPB10101 DPA10201-DPB11501 DPA10202-DPB10101 DPA10202-DPB110601 DPA10202-DPB11101 DPA10202-DPB11301 DPA10202-DPB11901 DPA10202-DPB13101 DPA10202-DPB15501 DPA10202-DPB16501 DPA10301-DPB10101 DPA10301-DPB10201 DPA10301-DPB10202 DPA10301-DPB10401 DPA10301-DPB10402 DPA10301-DPB110501 DPA10301-DPB110601 DPA10301-DPB11101 DPA10301-DPB11301 DPA10301-DPB11801 DPA10301-DPB12301 DPA10301-DPB13901 DPA10301-DPB14001 DPA10301-DPB14901 DPA10301-DPB15501 DPA10301-DPB16501 DPA10301-DPB17501 DPA10301-DPB18001 DPA10401-DPB10101 DPA10401-DPB10201 DPA10401-DPB10202 DPA10401-DPB10501
KEPPFLWIGAELDPDKWTVQ

SEQ ID NO: 73 - protein, 20 aa, synthetic construct
  source 1..20: note = Seed: KEPPFLWMGYELHPDKWTVQ; note = HLAs: DPA10103-DPB10101 DPA10103-DPB10201 DPA10103-DPB10202 DPA10103-DPB10401 DPA10103-DPB10402 DPA10103-DPB10501 DPA10103-DPB110501 DPA10103-DPB112601 DPA10103-DPB11501 DPA10103-DPB11601 DPA10103-DPB11801 DPA10103-DPB11901 DPA10103-DPB12301 DPA10103-DPB13101 DPA10103-DPB13401 DPA10103-DPB13901 DPA10103-DPB14001 DPA10103-DPB14101 DPA10103-DPB14801 DPA10103-DPB14901 DPA10103-DPB15001 DPA10103-DPB15101 DPA10103-DPB15501 DPA10103-DPB15901 DPA10103-DPB18001 DPA10104-DPB10101 DPA10104-DPB11501 DPA10105-DPB10101 DPA10105-DPB10401 DPA10105-DPB11801 DPA10105-DPB15001 DPA10106-DPB10101 DPA10201-DPB10101 DPA10201-DPB10201 DPA10201-DPB10202 DPA10201-DPB10401 DPA10201-DPB10501 DPA10201-DPB110601 DPA10201-DPB11501 DPA10201-DPB11601 DPA10201-DPB11901 DPA10201-DPB13401 DPA10201-DPB15501 DPA10202-DPB10101 DPA10202-DPB10201 DPA10202-DPB10202 DPA10202-DPB10401 DPA10202-DPB10501 DPA10202-DPB110601 DPA10202-DPB11101 DPA10202-DPB11301 DPA10202-DPB11801 DPA10202-DPB11901 DPA10202-DPB13101 DPA10202-DPB13801; note = HLAs: DPA10202-DPB15501 DPA10202-DPB16501 DPA10301-DPB10101 DPA10301-DPB10201 DPA10301-DPB10202 DPA10301-DPB10401 DPA10301-DPB10402 DPA10301-DPB110501 DPA10301-DPB110601 DPA10301-DPB11101 DPA10301-DPB11301 DPA10301-DPB11801 DPA10301-DPB12301 DPA10301-DPB13901 DPA10301-DPB14001 DPA10301-DPB14901 DPA10301-DPB15501 DPA10301-DPB16501 DPA10301-DPB17501 DPA10301-DPB18001 DPA10401-DPB10101 DPA10401-DPB10201 DPA10401-DPB10202 DPA10401-DPB10402 DPA10401-DPB10501 DPA10401-DPB110501 DPA10401-DPB14901
KEPPFLWSGFELMPDKWTVQ

SEQ ID NO: 74 - protein, 20 aa, synthetic construct
  source 1..20: note = Seed: KEPPFLWMGYELHPDKWTVQ; note = HLAs: DRB1_1602 DQA10101-DQB10501 DQA10101-DQB10503 DQA10102-DQB10501 DQA10102-DQB10502 DQA10102-DQB10503 DQA10103-DQB10501 DQA10104-DQB10501 DQA10104-DQB10503 DQA10105-DQB10501 DQA10107-DQB10503 DQA10505-DQB10402
KEPPFLIMGFEAHPLKWTVQ

SEQ ID NO: 75 - protein, 20 aa, synthetic construct
  source 1..20: note = Seed: KEPPFLWMGYELHPDKWTVQ; note = HLAs: DRB1_0101 DRB1_0405 DRB1_1001 DPA10103-DPB10202 DPA10103-DPB11501 DPA10103-DPB11601 DPA10103-DPB13401 DPA10103-DPB14001 DPA10104-DPB11501 DPA10201-DPB10202 DPA10201-DPB110601 DPA10201-DPB11501 DPA10201-DPB11601 DPA10201-DPB11901 DPA10201-DPB15501 DPA10202-DPB10101 DPA10202-DPB10201 DPA10202-DPB10202 DPA10202-DPB10501 DPA10202-DPB110601 DPA10202-DPB11101 DPA10202-DPB11801 DPA10202-DPB11901 DPA10202-DPB13101 DPA10202-DPB13801 DPA10202-DPB15501 DPA10202-DPB16501 DPA10301-DPB10201 DPA10301-DPB10202 DPA10301-DPB11801 DPA10301-DPB14001 DPA10401-DPB10202 DPA10401-DPB10402 DPA10401-DPB110501 DPA10401-DPB14901
KEPPFLWFGTELAPDKWTVQ

SEQ ID NO: 76 - protein, 20 aa, synthetic construct
  source 1..20: note = Seed: KEPPFLWMGYELHPDKWTVQ; note = HLAs: DRB1_0101 DRB1_0405 DRB1_1001 DPA10103-DPB10201 DPA10103-DPB10202 DPA10103-DPB10401 DPA10103-DPB10402 DPA10103-DPB10501 DPA10103-DPB110501 DPA10103-DPB112601 DPA10103-DPB11501 DPA10103-DPB11601 DPA10103-DPB11801 DPA10103-DPB11901 DPA10103-DPB12301 DPA10103-DPB13401 DPA10103-DPB13901 DPA10103-DPB14001 DPA10103-DPB14101 DPA10103-DPB14801 DPA10103-DPB14901 DPA10103-DPB15101 DPA10103-DPB15901 DPA10103-DPB18001 DPA10104-DPB11501 DPA10105-DPB10401 DPA10105-DPB11801 DPA10106-DPB10101 DPA10201-DPB10101 DPA10201-DPB10201 DPA10201-DPB10202 DPA10201-DPB10401 DPA10201-DPB10501 DPA10201-DPB110601 DPA10201-DPB11501 DPA10201-DPB11601 DPA10201-DPB11901 DPA10201-DPB13401 DPA10201-DPB15501 DPA10202-DPB10101 DPA10202-DPB10201 DPA10202-DPB10202 DPA10202-DPB10401 DPA10202-DPB10501 DPA10202-DPB110601 DPA10202-DPB11101 DPA10202-DPB11301 DPA10202-DPB11801 DPA10202-DPB11901 DPA10202-DPB13101 DPA10202-DPB13801 DPA10202-DPB15501 DPA10202-DPB16501 DPA10301-DPB10101 DPA10301-DPB10201 DPA10301-DPB10202; note = HLAs: DPA10301-DPB10401 DPA10301-DPB10402 DPA10301-DPB110501 DPA10301-DPB110601 DPA10301-DPB11101 DPA10301-DPB11301 DPA10301-DPB11801 DPA10301-DPB12301 DPA10301-DPB13901 DPA10301-DPB14001 DPA10301-DPB14901 DPA10301-DPB15501 DPA10301-DPB16501 DPA10301-DPB17501 DPA10301-DPB18001 DPA10401-DPB10201 DPA10401-DPB10202 DPA10401-DPB10402 DPA10401-DPB10501 DPA10401-DPB110501 DPA10401-DPB14901
KEPPFLWTGSELLPDKWTVQ

SEQ ID NO: 77 - protein, 20 aa, synthetic construct
  source 1..20: note = Seed: KEPPFLWMGYELHPDKWTVQ; note = HLAs: DRB1_0101 DRB1_0405 DRB1_1001 DPA10103-DPB11501 DPA10103-DPB11801 DPA10103-DPB13401 DPA10104-DPB11501 DPA10105-DPB11801 DPA10201-DPB11501 DPA10202-DPB10101 DPA10202-DPB10202 DPA10202-DPB10401 DPA10202-DPB10501 DPA10202-DPB110601 DPA10202-DPB11801 DPA10202-DPB11901 DPA10202-DPB13101 DPA10202-DPB13801 DPA10202-DPB15501 DPA10202-DPB16501 DPA10301-DPB10201 DPA10301-DPB10202 DPA10301-DPB10402 DPA10301-DPB110501 DPA10301-DPB11801 DPA10301-DPB14001 DPA10301-DPB14901 DPA10301-DPB17501 DPA10301-DPB18001
KEPPLLWMGSELLPDKWTVQ

SEQ ID NO: 78 - protein, 20 aa, synthetic construct
  source 1..20: note = Seed: KEPPFLWMGYELHPDKWTVQ; note = HLAs: DRB1_0101 DPA10103-DPB10101 DPA10103-DPB10201 DPA10103-DPB10202 DPA10103-DPB10401 DPA10103-DPB10402 DPA10103-DPB10501 DPA10103-DPB110501 DPA10103-DPB112601 DPA10103-DPB11501 DPA10103-DPB11601 DPA10103-DPB11801 DPA10103-DPB11901 DPA10103-DPB12301 DPA10103-DPB13101 DPA10103-DPB13401 DPA10103-DPB13901 DPA10103-DPB14001 DPA10103-DPB14101 DPA10103-DPB14801 DPA10103-DPB14901 DPA10103-DPB15001 DPA10103-DPB15101 DPA10103-DPB15501 DPA10103-DPB15901 DPA10103-DPB18001 DPA10104-DPB10101 DPA10104-DPB11501 DPA10105-DPB10101 DPA10105-DPB10401 DPA10105-DPB11801 DPA10105-DPB15001 DPA10106-DPB10101 DPA10201-DPB10101 DPA10201-DPB10201 DPA10201-DPB10202 DPA10201-DPB10401 DPA10201-DPB10501 DPA10201-DPB110601 DPA10201-DPB11501 DPA10201-DPB11601 DPA10201-DPB11901 DPA10201-DPB13401 DPA10201-DPB15501 DPA10202-DPB10101 DPA10202-DPB10201 DPA10202-DPB10202 DPA10202-DPB10401 DPA10202-DPB10501 DPA10202-DPB110601 DPA10202-DPB11101 DPA10202-DPB11301 DPA10202-DPB11801 DPA10202-DPB11901 DPA10202-DPB13101; note = HLAs: DPA10202-DPB13801 DPA10202-DPB15501 DPA10202-DPB16501 DPA10301-DPB10101 DPA10301-DPB10201 DPA10301-DPB10202 DPA10301-DPB10401 DPA10301-DPB10402 DPA10301-DPB110501 DPA10301-DPB110601 DPA10301-DPB11101 DPA10301-DPB11301 DPA10301-DPB11801 DPA10301-DPB12301 DPA10301-DPB13901 DPA10301-DPB14001 DPA10301-DPB14901 DPA10301-DPB15501 DPA10301-DPB16501 DPA10301-DPB17501 DPA10301-DPB18001 DPA10401-DPB10101 DPA10401-DPB10201 DPA10401-DPB10202 DPA10401-DPB10402 DPA10401-DPB10501 DPA10401-DPB110501 DPA10401-DPB14901
KEPPFLWAGFELLPDKWTVQ

SEQ ID NO: 79 - protein, 20 aa, synthetic construct
  source 1..20: note = Seed: KEPPFLWMGYELHPDKWTVQ; note = HLAs: DRB1_0101 DRB1_1001 DPA10103-DPB10101 DPA10103-DPB10201 DPA10103-DPB10202 DPA10103-DPB10401 DPA10103-DPB10402 DPA10103-DPB10501 DPA10103-DPB110501 DPA10103-DPB112601 DPA10103-DPB11501 DPA10103-DPB11601 DPA10103-DPB11801 DPA10103-DPB11901 DPA10103-DPB12301 DPA10103-DPB13101 DPA10103-DPB13401 DPA10103-DPB13901 DPA10103-DPB14001 DPA10103-DPB14101 DPA10103-DPB14801 DPA10103-DPB14901 DPA10103-DPB15001 DPA10103-DPB15101 DPA10103-DPB15501 DPA10103-DPB15901 DPA10103-DPB18001 DPA10104-DPB10101 DPA10104-DPB11501 DPA10105-DPB10101 DPA10105-DPB10401 DPA10105-DPB11801 DPA10105-DPB15001 DPA10106-DPB10101 DPA10201-DPB10101 DPA10201-DPB10201 DPA10201-DPB10202 DPA10201-DPB10401 DPA10201-DPB10501 DPA10201-DPB110601 DPA10201-DPB11501 DPA10201-DPB11601 DPA10201-DPB11901 DPA10201-DPB13401 DPA10201-DPB15501 DPA10202-DPB10101 DPA10202-DPB10201 DPA10202-DPB10202 DPA10202-DPB10401 DPA10202-DPB10501 DPA10202-DPB110601 DPA10202-DPB11101 DPA10202-DPB11301 DPA10202-DPB11801 DPA10202-DPB11901; note = HLAs: DPA10202-DPB13101 DPA10202-DPB13801 DPA10202-DPB15501 DPA10202-DPB16501 DPA10301-DPB10101 DPA10301-DPB10201 DPA10301-DPB10202 DPA10301-DPB10401 DPA10301-DPB10402 DPA10301-DPB110501 DPA10301-DPB110601 DPA10301-DPB11101 DPA10301-DPB11301 DPA10301-DPB11801 DPA10301-DPB12301 DPA10301-DPB13901 DPA10301-DPB14001 DPA10301-DPB14901 DPA10301-DPB15501 DPA10301-DPB16501 DPA10301-DPB17501 DPA10301-DPB18001 DPA10401-DPB10101 DPA10401-DPB10201 DPA10401-DPB10202 DPA10401-DPB10402 DPA10401-DPB10501 DPA10401-DPB110501 DPA10401-DPB14901
KEPPFLWAGFELIPDKWTVQ

SEQ ID NO: 80 - protein, 20 aa, synthetic construct
  source 1..20: note = Seed: KEPPFLWMGYELHPDKWTVQ; note = HLAs: DRB1_1602 DQA10101-DQB10501 DQA10101-DQB10503 DQA10102-DQB10501 DQA10102-DQB10502 DQA10102-DQB10503 DQA10103-DQB10501 DQA10104-DQB10501 DQA10104-DQB10503 DQA10105-DQB10501 DQA10107-DQB10503 DQA10505-DQB10402
KEPPFLFMGFEAHPMKWTVQ

SEQ ID NO: 81 - protein, 20 aa, synthetic construct
  source 1..20: note = Seed: KEPPFLWMGYELHPDKWTVQ; note = HLAs: DRB1_1602 DQA10101-DQB10501 DQA10101-DQB10503 DQA10102-DQB10501 DQA10102-DQB10502 DQA10102-DQB10503 DQA10103-DQB10501 DQA10104-DQB10501 DQA10104-DQB10503 DQA10105-DQB10501 DQA10107-DQB10503 DQA10505-DQB10402
KEPPFLFMGFEAHPIKWTVQ

SEQ ID NO: 82 - protein, 20 aa, synthetic construct
  source 1..20: note = Seed: KEPPFLWMGYELHPDKWTVQ; note = HLAs: DRB1_0101 DRB1_1001 DPA10103-DPB10101 DPA10103-DPB10201 DPA10103-DPB10202 DPA10103-DPB10401 DPA10103-DPB10402 DPA10103-DPB10501 DPA10103-DPB110501 DPA10103-DPB112601 DPA10103-DPB11501 DPA10103-DPB11601 DPA10103-DPB11801 DPA10103-DPB11901 DPA10103-DPB12301 DPA10103-DPB13101 DPA10103-DPB13401 DPA10103-DPB13901 DPA10103-DPB14001 DPA10103-DPB14101 DPA10103-DPB14801 DPA10103-DPB14901 DPA10103-DPB15001 DPA10103-DPB15101 DPA10103-DPB15501 DPA10103-DPB15901 DPA10103-DPB18001 DPA10104-DPB10101 DPA10104-DPB11501 DPA10105-DPB10101 DPA10105-DPB10401 DPA10105-DPB11801 DPA10105-DPB15001 DPA10106-DPB10101 DPA10201-DPB10101 DPA10201-DPB10201 DPA10201-DPB10202 DPA10201-DPB10401 DPA10201-DPB10501 DPA10201-DPB110601 DPA10201-DPB11501 DPA10201-DPB11601 DPA10201-DPB11901 DPA10201-DPB13401 DPA10201-DPB15501 DPA10202-DPB10101 DPA10202-DPB10201 DPA10202-DPB10202 DPA10202-DPB10401 DPA10202-DPB10501 DPA10202-DPB110601 DPA10202-DPB11101 DPA10202-DPB11301 DPA10202-DPB11801 DPA10202-DPB11901; note = HLAs: DPA10202-DPB13101 DPA10202-DPB13801 DPA10202-DPB15501 DPA10202-DPB16501 DPA10301-DPB10101 DPA10301-DPB10201 DPA10301-DPB10202 DPA10301-DPB10401 DPA10301-DPB10402 DPA10301-DPB110501 DPA10301-DPB110601 DPA10301-DPB11101 DPA10301-DPB11301 DPA10301-DPB11801 DPA10301-DPB12301 DPA10301-DPB13901 DPA10301-DPB14001 DPA10301-DPB14901 DPA10301-DPB15501 DPA10301-DPB16501 DPA10301-DPB17501 DPA10301-DPB18001 DPA10401-DPB10101 DPA10401-DPB10201 DPA10401-DPB10202 DPA10401-DPB10402 DPA10401-DPB10501 DPA10401-DPB110501 DPA10401-DPB14901
KEPPFLWAGFELVPDKWTVQ

SEQ ID NO: 83 - protein, 20 aa, synthetic construct
  source 1..20: note = Seed: KEPPFLWMGYELHPDKWTVQ; note = HLAs: DRB1_0405 DRB1_1001 DPA10103-DPB10101 DPA10103-DPB10201 DPA10103-DPB10202 DPA10103-DPB10401 DPA10103-DPB112601 DPA10103-DPB11501 DPA10103-DPB11601 DPA10103-DPB11901 DPA10103-DPB12301 DPA10103-DPB13101 DPA10103-DPB13401 DPA10103-DPB13901 DPA10103-DPB14001 DPA10103-DPB14101 DPA10103-DPB14801 DPA10103-DPB15001 DPA10103-DPB15501 DPA10104-DPB10101 DPA10104-DPB11501 DPA10105-DPB10101 DPA10105-DPB10401 DPA10105-DPB15001 DPA10106-DPB10101 DPA10201-DPB10101 DPA10201-DPB110601 DPA10201-DPB11501 DPA10201-DPB11901 DPA10201-DPB15501 DPA10202-DPB10101 DPA10202-DPB10202 DPA10202-DPB110601 DPA10202-DPB11101 DPA10202-DPB11301 DPA10202-DPB11901 DPA10202-DPB13101 DPA10202-DPB15501 DPA10202-DPB16501 DPA10301-DPB10101 DPA10301-DPB10201 DPA10301-DPB10202 DPA10301-DPB10401 DPA10301-DPB10402 DPA10301-DPB110501 DPA10301-DPB110601 DPA10301-DPB11101 DPA10301-DPB11301 DPA10301-DPB11801 DPA10301-DPB12301 DPA10301-DPB13901 DPA10301-DPB14001 DPA10301-DPB14901 DPA10301-DPB15501 DPA10301-DPB16501; note = HLAs: DPA10301-DPB17501 DPA10301-DPB18001 DPA10401-DPB10101 DPA10401-DPB10201 DPA10401-DPB10202 DPA10401-DPB10501
KEPPFLWFGVELDPDKWTVQ

SEQ ID NO: 84 - protein, 20 aa, synthetic construct
  source 1..20: note = Seed: KEPPFLWMGYELHPDKWTVQ; note = HLAs: DRB1_0101 DRB1_0405 DRB1_1001 DPA10103-DPB11501 DPA10104-DPB11501 DPA10201-DPB11501 DPA10202-DPB10101 DPA10202-DPB110601 DPA10202-DPB11101 DPA10202-DPB11901 DPA10202-DPB13101 DPA10301-DPB11801 DPA10301-DPB14001
KEPPFLWIGTELEPDKWTVQ

SEQ ID NO: 85 - protein, 20 aa, synthetic construct
  source 1..20: note = Seed: KEPPFLWMGYELHPDKWTVQ; note = HLAs: DRB1_1602 DQA10101-DQB10501 DQA10101-DQB10503 DQA10102-DQB10501 DQA10102-DQB10502 DQA10102-DQB10503 DQA10103-DQB10501 DQA10104-DQB10501 DQA10104-DQB10503 DQA10105-DQB10501 DQA10107-DQB10503 DQA10505-DQB10402
KEPPFLFMGYEAHPVKWTVQ

SEQ ID NO: 86 - protein, 20 aa, synthetic construct
  source 1..20: note = Seed: KEPPFLWMGYELHPDKWTVQ; note = HLAs: DRB1_1602 DQA10101-DQB10501 DQA10101-DQB10503 DQA10102-DQB10501 DQA10102-DQB10502 DQA10102-DQB10503 DQA10103-DQB10501 DQA10104-DQB10501 DQA10104-DQB10503 DQA10105-DQB10501 DQA10107-DQB10503 DQA10505-DQB10402
KEPPFLFMGFEAHPLKWTVQ

SEQ ID NO: 87 - protein, 14 aa, synthetic construct
  source 1..14: note = Seed: PPFLWMGYELHPDK; note = HLAs: DRB1_1001 DPA10103-DPB10101 DPA10103-DPB10201 DPA10103-DPB10202 DPA10103-DPB10401 DPA10103-DPB112601 DPA10103-DPB11501 DPA10103-DPB11601 DPA10103-DPB11901 DPA10103-DPB12301 DPA10103-DPB13101 DPA10103-DPB13401 DPA10103-DPB13901 DPA10103-DPB14001 DPA10103-DPB14101 DPA10103-DPB14801 DPA10103-DPB15001 DPA10103-DPB15901 DPA10104-DPB10101 DPA10104-DPB11501 DPA10105-DPB10101 DPA10105-DPB10401 DPA10105-DPB15001 DPA10106-DPB10101 DPA10201-DPB10101 DPA10201-DPB110601 DPA10201-DPB11501 DPA10201-DPB11601 DPA10201-DPB11901 DPA10202-DPB10101 DPA10202-DPB10201 DPA10202-DPB10202 DPA10202-DPB10401 DPA10202-DPB110601 DPA10202-DPB11901 DPA10202-DPB13101 DPA10202-DPB16501 DPA10301-DPB10101 DPA10301-DPB10201 DPA10301-DPB10202 DPA10301-DPB10401 DPA10301-DPB10402 DPA10301-DPB110501 DPA10301-DPB110601 DPA10301-DPB11801 DPA10301-DPB12301 DPA10301-DPB13901 DPA10301-DPB14001 DPA10301-DPB14901 DPA10301-DPB15501 DPA10301-DPB16501 DPA10301-DPB17501 DPA10301-DPB18001 DPA10401-DPB10101 DPA10401-DPB10201; note = HLAs: DPA10401-DPB10202 DPA10401-DPB10402 DPA10401-DPB10501 DPA10401-DPB110501 DPA10401-DPB14901
PPFLWAGFELLPDK

SEQ ID NO: 88 - protein, 10 aa, Human immunodeficiency virus 1
  source 1..10: note = HLAs: A0201 A0203 A0205 A0206 A0211 A0214 A02264 A0230 B4002 B40114 B4016 B4101 B4102 B4501 B4507
AAEWDRLHPV

SEQ ID NO: 89 - protein, 10 aa, Human immunodeficiency virus 1
  source 1..10: note = HLAs: B1302
AAMQMLKDTI

SEQ ID NO: 90 - protein, 11 aa, Human immunodeficiency virus 1
  source 1..11: note = HLAs: A0302 A3402 A3601 A7404 C0303 C1202 C1602 C1646
ACQGVGGPGHK

SEQ ID NO: 91 - protein, 8 aa, Human immunodeficiency virus 1
  source 1..8: note = HLAs: B4002 B4006 B4101 B4102 B5001
AEAMSQVT

SEQ ID NO: 92 - protein, 9 aa, Human immunodeficiency virus 1
  source 1..9: note = HLAs: B4006 B4101
AEAMSQVTN

SEQ ID NO: 93 - protein, 8 aa, Human immunodeficiency virus 1
  source 1..8: note = HLAs: B1801 B1802 B1803 B3701 B4001 B4002 B4006 B40114 B4016 B4101 B4102 B4415 B4427 B4501 B4507 B4901 B5001 B5201 C0704
AEHLKTAV

SEQ ID NO: 94 - protein, 9 aa, Human immunodeficiency virus 1
  source 1..9: note = HLAs: B3701 B4002 B4006 B4101 B4102 B4427 B4501 B4507 B4901 B5001
AEHLKTAVQ

SEQ ID NO: 95 - protein, 10 aa, Human immunodeficiency virus 1
  source 1..10: note = HLAs: B1802 B3701 B4001 B4002 B4006 B40114 B4016 B4101 B4102 B4402 B4403 B4404 B4405 B4407 B4415 B4427 B4501 B4507 B4703 B4901 B5001
AEHLKTAVQM

SEQ ID NO: 96 - protein, 11 aa, Human immunodeficiency virus 1
  source 1..11: note = HLAs: B4002 B4006 B40114 B4101 B4102 B4415 B4501 B4507 B4901 B5001
AEHLKTAVQMA

SEQ ID NO: 97 - protein, 9 aa, Human immunodeficiency virus 1
  source 1..9: note = HLAs: A3303 A7404 B3701 B4002 B4006 B40114 B4101 B4102 B4402 B4403 B4407 B4427 B4701 B4703 B4901 B5001 C0303
AELELAENR

SEQ ID NO: 98 - protein, 11 aa, Human immunodeficiency virus 1
  source 1..11: note = HLAs: B1301 B1302 B1303 B3701 B4001 B4002 B4006 B40114 B4016 B4101 B4102 B4402 B4403 B4404 B4405 B4407 B4415 B4427 B4501 B4507 B4701 B4703 B4901 B5001
AELELAENREI

SEQ ID NO: 99 - protein, 9 aa, Human immunodeficiency virus 1
  source 1..9: note = HLAs: B4006 B4101 B4102 B4427
AENREILKE

SEQ ID NO: 100 - protein, 10 aa, Human immunodeficiency virus 1
  source 1..10: note = HLAs: B4006 B4101 B4102 B4415 B4501 B4507 B5001
AENREILKEP

SEQ ID NO: 101 - protein, 11 aa, Human immunodeficiency virus 1
  source 1..11: note = HLAs: B4002 B4006 B40114 B4101 B4102 B4415 B4501 B4507 B4901 B5001
AENREILKEPV

SEQ ID NO: 102 - protein, 9 aa, Human immunodeficiency virus 1
  source 1..9: note = HLAs: B4002 B4006 B40114 B4101 B4102 B4415 B4501 B4507 B4901 B5001
AETFYVDGA

SEQ ID NO: 103 - protein, 10 aa, Human immunodeficiency virus 1
  source 1..10: note = HLAs: B4006 B40114 B4101 B4102 B4415 B4501 B4507 B5001
AETFYVDGAA

SEQ ID NO: 104 - protein, 8 aa, Human immunodeficiency virus 1
  source 1..8: note = HLAs: B4006 B4101 B4102 B4501 B4507 B5001
AETGQETA

SEQ ID NO: 105 - protein, 9 aa, Human immunodeficiency virus 1
  source 1..9: note = HLAs: A2901 A2902 A2911 B1501 B1502 B1503 B1512 B1518 B1521 B15220 B1525 B1531 B1532 B1801 B1802 B1803 B3701 B4002 B4006 B40114 B4101 B4102 B4402 B4403 B4404 B4405 B4407 B4427 B4701 B4703 B4901 B5001 C1202
AETGQETAY

SEQ ID NO: 106 - protein, 10 aa, Human immunodeficiency virus 1
  source 1..10: note = HLAs: B1503 B15220 B1802 B3701 B4001 B4002 B4006 B40114 B4101 B4102 B4402 B4403 B4404 B4405 B4407 B4410 B4427 B4701 B4703 B4901 B5001
AETGQETAYF

SEQ ID NO: 107 - protein, 8 aa, Human immunodeficiency virus 1
  source 1..8: note = HLAs: B4002 B4006 B40114 B4101 B4102 B4415 B4501 B4507 B4901 B5001
AEVIPAET

SEQ ID NO: 108 - protein, 9 aa, Human immunodeficiency virus 1
  source 1..9: note = HLAs: B4002 B4006 B40114 B4101 B4102 B4415 B4501 B4507 B4901 B5001
AEVIPAETG

SEQ ID NO: 109 - protein, 8 aa, Human immunodeficiency virus 1
  source 1..8: note = HLAs: B4006 B4101 B5001
AEWDRLHP

SEQ ID NO: 110 - protein, 9 aa, Human immunodeficiency virus 1
  source 1..9: note = HLAs: A0201 A0202 A0203 A0204 A0205 A0206 A0207 A0211 A0214 A02264 A0230 B1301 B1302 B1303 B1401 B1402 B1503 B15220 B1801 B1802 B1803 B2707 B3701 B3906 B4001 B4002 B4006 B40114 B4012 B4016 B4101 B4102 B4402 B4403 B4404 B4405 B4407 B4410 B4415 B4427 B4501 B4507 B4701 B4703 B4803 B4901 B5001 B5107 B5201 B7301 C0704
AEWDRLHPV

SEQ ID NO: 111 - protein, 9 aa, Human immunodeficiency virus 1
  source 1..9: note = HLAs: A2407 B1502 B1525 B1531 C0102 C0103 C0144 C0202 C0210 C0214 C0229 C0302 C0303 C0304 C0305 C0317 C0401 C0403 C0404 C0407 C0501 C0509 C0602 C0701 C0702 C0704 C0705 C0706 C0718 C0801 C0803 C0812 C1202 C1203 C1402 C1403 C1504 C1509 C1601 C1602 C1604 C16112 C1646 C17 C1701 C1702 C1703 C1704 C1705 C1706 C18 C1801 C1802
AFSPEVIPM

SEQ ID NO: 112 - protein, 10 aa, Human immunodeficiency virus 1
  source 1..10: note = HLAs: A2301 A2402 A2403 A2407 A2410 A2464 A2901 A2902 A2911 B1525 B5703 C0702 C0705 C1402 C1403 C1602
AFSPEVIPMF

SEQ ID NO: 113 - protein, 9 aa, Human immunodeficiency virus 1
  source 1..9: note = HLAs: A3401 A3402 A3601 A6602 A6801 A7404 A7405 C0202 C0210 C0214 C0229 C0302 C0303 C0602 C1202 C1504 C1509 C1601 C1602 C16112 C1646
AGDDCVAGR

SEQ ID NO: 114 - protein, 10 aa, Human immunodeficiency virus 1
  source 1..10: note = HLAs: B4101 B4501 B4507
AGERIIDIIA

SEQ ID NO: 115 - protein, 9 aa, Human immunodeficiency virus 1
  source 1..9: note = HLAs: B0801
AGLKKKKSV

SEQ ID NO: 116 - protein, 11 aa, Human immunodeficiency virus 1
  source 1..11: note = HLAs: B1510 B3801 B3802 B3901 B3905 B3906 B3924 C0704
AHKGIGGNEQV

SEQ ID NO: 117 - protein, 9 aa, Human immunodeficiency virus 1
  source 1..9: note = HLAs: B1401 B1402 B1403 B1510 B1518 B1537 B3801 B3802 B3901 B3905 B3906 B3909 B3924 C0602 C0701 C0702 C0704 C0705 C0706 C0718
AHTNDVKQL

SEQ ID NO: 118 - protein, 9 aa, Human immunodeficiency virus 1
  source 1..9: note = HLAs: A0301 A0302 A0305 A1101 A1102 A3001 A3104 A3402 A7401 A7402 A7403 A7404 A7405 A7408 A7409 A7411 A7413
AIKKKDSTK

SEQ ID NO: 119 - protein, 10 aa, Human immunodeficiency virus 1
  source 1..10: note = HLAs: A3201 B5701 B5703 B5704 B5802
AIKKKDSTKW

SEQ ID NO: 120 - protein, 11 aa, Human immunodeficiency virus 1
  source 1..11: note = HLAs: A3101 A3104 A7401 A7402 A7403 A7405 A7408 A7409 A7411
AIKKKDSTKWR

SEQ ID NO: 121 - protein, 11 aa, Human immunodeficiency virus 1
  source 1..11: note = HLAs: A0211
AKLLWKGEGAV

SEQ ID NO: 122 - protein, 11 aa, Human immunodeficiency virus 1
  source 1..11: note = HLAs: A0201 A0202 A0203 A0204 A0205 A0206 A0207 A0211 A0214 A02264 A0230 B1301 B1302 B1303
ALLDTGADDTV

SEQ ID NO: 123 - protein, 11 aa, Human immunodeficiency virus 1
  source 1..11: note = HLAs: A0201 A0202 A0203 A0204 A0205 A0207 A0211 A0214 A02264 A0230 B1301 B1302 C0102 C0144 C0403 C0501 C0509 C1701 C1702 C1703 C1704 C1705
ALSEGATPQDL

SEQ ID NO: 124 - protein, 8 aa, Human immunodeficiency virus 1
  source 1..8: note = HLAs: A0202
AMASDFNL

SEQ ID NO: 125 - protein, 10 aa, Human immunodeficiency virus 1
  source 1..10: note = HLAs: A0202
AMASDFNLPP

SEQ ID NO: 126 - protein, 11 aa, Human immunodeficiency virus 1
  source 1..11: note = HLAs: A0201 A0202 A0203 A0204 A0205 A0206 A0207 A0211 A0214 A02264 A0230
AMASDFNLPPV

SEQ ID NO: 127 - protein, 9 aa, Human immunodeficiency virus 1
  source 1..9: note = HLAs: A0202 A0203 A0204 A0205 A0211 A02264 B1301 B1302 B1303 B5201
AMQMLKDTI

SEQ ID NO: 128 - protein, 9 aa, Human immunodeficiency virus 1
  source 1..9: note = HLAs: C0102 C0103 C0144 C0202 C0210 C0214 C0229 C0303 C0304 C0305 C0317 C0403 C0501 C0509 C0602 C0701 C0702 C0704 C0705 C0706 C0718 C0801 C0803 C0812 C1202 C1502 C1504 C1505 C1509 C1601 C1602 C16112 C1646 C17 C1701 C1702 C1703 C1704 C1705 C1706 C1707
ANPDCKTIL

SEQ ID NO: 129 - protein, 10 aa, Human immunodeficiency virus 1
  source 1..10: note = HLAs: A0302 A1101 A1102 A3402 A3601 C0303 C1602 C1646
ANPDCKTILK

SEQ ID NO: 130 - protein, 10 aa, Human immunodeficiency virus 1
  source 1..10: note = HLAs: B0702 B4201
APRKKGCWKC

SEQ ID NO: 131 - protein, 8 aa, Human immunodeficiency virus 1
  source 1..8: note = HLAs: A3601 B1501 B1502 B1503 B1512 B15220 B1525 B1531 B1532 B4427 B4703 C0702 C1202
AQEEHEKY

SEQ ID NO: 132 - protein, 9 aa, Human immunodeficiency virus 1
  source 1..9: note = HLAs: C1202
AQEEHEKYH

SEQ ID NO: 133 - protein, 10 aa, Human immunodeficiency virus 1
  source 1..10: note = HLAs: A0205 A0207 B1301 B1302 B1303 B1401 B1402 B1403 B1501 B1502 B1503 B1510 B15220 B1525 B1537 B2706 B3701 B3801 B3802 B3905 B3909 B4002 B40114 B4016 B4101 B4102 B4701 B5201 C0102 C0103 C0144 C0202 C0210 C0214 C0229 C0302 C0303 C0304 C0305 C0401 C0403 C0404 C0407 C0501 C0509 C0602 C0701 C0702 C0704 C0705 C0706 C0718 C0801 C0802 C0803 C0804 C0812 C1202 C1203 C1402 C1403 C1502 C1504 C1505 C1509 C1601 C1602 C1604 C16112 C1646 C17 C1701 C1702 C1703 C1704 C1705 C1706 C1707 C1801 C1802
AQPDKSESEL

SEQ ID NO: 134 - protein, 11 aa, Human immunodeficiency virus 1
  source 1..11: note = HLAs: A0202 A0205 A0207 A0214 B1301 B1302 B1303
AQPDKSESELV

SEQ ID NO: 135 - protein, 9 aa, Human immunodeficiency virus 1
  source 1..9: note = HLAs: B7301
ARASVLSGG

SEQ ID NO: 136 - protein, 9 aa, Human immunodeficiency virus 1
  source 1..9: note = HLAs: B2702 B2703 B2704 B2705
ARNCRAPRK

SEQ ID NO: 137 - protein, 10 aa, Human immunodeficiency virus 1
  source 1..10: note = HLAs: B2704 B2705
ARNCRAPRKK

SEQ ID NO: 138 - protein, 8 aa, Human immunodeficiency virus 1
  source 1..8: note = HLAs: B1401 B1402 B2706 B2707 C0701 C0702 C0705 C0706 C0718
ARVLAEAM

SEQ ID NO: 139 - protein, 10 aa, Human immunodeficiency virus 1
  source 1..10: note = HLAs: B2705
ARVLAEAMSQ

SEQ ID NO: 140 - protein, 11 aa, Human immunodeficiency virus 1
  source 1..11: note = HLAs: A0201 A0202 A0203 A0205 A0206 A0211 A0214 A02264 A0230 B2702 B2705 B2706 B2707
ARVLAEAMSQV

SEQ ID NO: 141 - protein, 8 aa, Human immunodeficiency virus 1
  source 1..8: note = HLAs: C1505 C1601 C1602 C16112 C1646
ASCDKCQL

SEQ ID NO: 142 - protein, 9 aa, Human immunodeficiency virus 1
  source 1..9: note = HLAs: A0301 A0302 A0305 A1101 A1102 A3001 A3104 A3401 A3402 A3601 A6602 A6801 A7401 A7402 A7403 A7404 A7405 A7408 A7409 A7411 A7413 C0303 C1602 C1646
ASCDKCQLK

SEQ ID NO: 143 - protein, 9 aa, Human immunodeficiency virus 1
  source 1..9: note = HLAs: A0201 A0202 A0204 A0205 A0206 A0207 A0211 A0214 A0230 A6901 C0102 C0103 C0144 C0303 C0304 C0305 C0401 C0403 C0407 C0501 C0509 C0704 C0801 C0802 C0803 C0804 C0812 C1502 C1504 C1505 C1509 C1601 C1602 C16112 C1646 C17 C1701 C1702 C1703 C1704 C1705 C1706 C1707
ASDFNLPPV

SEQ ID NO: 144 - protein, 10 aa, Human immunodeficiency virus 1
  source 1..10: note = HLAs: C0403 C0501 C0509 C0801 C0802 C0803 C1505
ASDFNLPPVV

SEQ ID NO: 145 - protein, 9 aa, Human immunodeficiency virus 1
  source 1..9: note = HLAs: A0205 C1502 C1505 C1602 C1646
ASGYIEAEV

SEQ ID NO: 146 - protein, 9 aa, Human immunodeficiency virus 1
  source 1..9: note = HLAs: A0301 A0302 A0305 A1101 A1102 A3001 A3402 A3601 A7401 A7402 A7403 A7405 A7408 A7409 A7411 A7413 C0303 C1602
ASQIYPGIK

SEQ ID NO: 147 - protein, 8 aa, Human immunodeficiency virus 1
  source 1..8: note = HLAs: B5701 B5702 B5703 B5802 C0202 C0210 C0229 C1202 C1601 C1602 C16112 C1646
ASRELERF

SEQ ID NO: 148 - protein, 9 aa, Human immunodeficiency virus 1
  source 1..9: note = HLAs: A3001
ASRELERFA

SEQ ID NO: 149 - protein, 10 aa, Human immunodeficiency virus 1
  source 1..10: note = HLAs: A3001 B2707
ASRELERFAL

SEQ ID NO: 150 - protein, 9 aa, Human immunodeficiency virus 1
  source 1..9: note = HLAs: A0101 A0103 A0109 A0123 A0207 A3601 B1301 B3701 B5702 B5703 B5704 B5802 C0102 C0103 C0144 C0202 C0210 C0214 C0217 C0229 C0302 C0303 C0304 C0305 C0317 C0401 C0403 C0404 C0407 C0501 C0509 C0602 C0702 C0704 C0705 C0801 C0802 C0803 C0804 C0812 C1202 C1203 C1502 C1504 C1505 C1509 C1601 C1602 C1604 C16112 C1646 C17 C1701 C1702 C1703 C1704 C1705 C1706 C1707 C18 C1801 C1802
ATDIQTKEL

SEQ ID NO: 151 - protein, 10 aa, Human immunodeficiency virus 1
  source 1..10: note = HLAs: A3601
ATDIQTKELQ

SEQ ID NO: 152 - protein, 11 aa, Human immunodeficiency virus 1
  source 1..11: note = HLAs: A0301 A0302 A0305 A1101 A1102 A3402 A3601 A7404 C0303 C1602 C1646
ATDIQTKELQK

SEQ ID NO: 153 - protein, 9 aa, Human immunodeficiency virus 1
  source 1..9: note = HLAs: A0201 A0202 A0203 A0204 A0205 A0206 A0207 A0211 A0214 A02264 A0230 A6802 A6827 C1502 C1504 C1505 C1509
ATLEEMMTA

SEQ ID NO: 154 - protein, 9 aa, Human immunodeficiency virus 1
  source 1..9: note = HLAs: A0207 A3004 A3401 A7404 B1301 B1502 B1517 B1525 B4601 B5702 B5703 B5802 C0102 C0103 C0144 C0202 C0210 C0214 C0217 C0229 C0302 C0303 C0304 C0305 C0317 C0401 C0403 C0404 C0407 C0501 C0509 C0602 C0701 C0702 C0704 C0705 C0706 C0718 C0801 C0802 C0803 C0804 C0812 C1202 C1203 C1402 C1403 C1502 C1504 C1505 C1509 C1601 C1602 C1604 C16112 C1646 C17 C1701 C1702 C1703 C1704 C1705 C1706 C1707
ATPQDLNTM

SEQ ID NO: 155 - protein, 10 aa, Human immunodeficiency virus 1
  source 1..10: note = HLAs: B0705 B4201 B5702 B5703 B5802 C0102 C0103 C0144 C0202 C0210 C0229 C0303 C0304 C0317 C0403 C0501 C0509 C0801 C0802 C0803 C0812 C1202 C1502 C1504 C1505 C1509 C1601 C1602 C16112 C1646 C17 C1701 C1702 C1703 C1704 C1705 C1706 C1707
ATPQDLNTML

SEQ ID NO: 156 - protein, 9 aa, Human immunodeficiency virus 1
  source 1..9: note = HLAs: A2901 A2902 A2911 A3004 A3009 A3201 B1301 B1502 B1516 B1517 B1525 B1531 B5701 B5702 B5703 B5704 B5801 B5802 C0202 C0210 C0229 C0302 C1202 C1502 C1504 C1505 C1509 C1601 C1602 C1604 C16112 C1646
ATWIPEWEF

SEQ ID NO: 157 - protein, 10 aa, Human immunodeficiency virus 1
  source 1..10: note = HLAs: A0205 A0206 A0211 A0214 A6802 A6827 A6901
ATWIPEWEFV

SEQ ID NO: 158 - protein, 8 aa, Human immunodeficiency virus 1
  source 1..8: note = HLAs: A0301 A0302 A0305 A1101 A1102 A3001 A3104 A3402
AVFIHNFK

SEQ ID NO: 159 - protein, 9 aa, Human immunodeficiency virus 1
  source 1..9: note = HLAs: A0301 A0302 A0305 A1101 A1102 A3001 A3101 A3104 A3301 A3303 A3305 A3401 A3402 A6601 A6602 A6603 A6801 A74 A7401 A7402 A7403 A7404 A7405 A7406 A7407 A7408 A7409 A7410 A7411 A7413
AVFIHNFKR

SEQ ID NO: 160 - protein, 10 aa, Human immunodeficiency virus 1
  source 1..10: note = HLAs: A0301 A0302 A0305 A1101 A1102 A3001 A3101 A3104 A3402 A6801 A7401 A7402 A7403 A7404 A7405 A7408 A7409 A7411 A7413
AVFIHNFKRK

SEQ ID NO: 161 - protein, 8 aa, Human immunodeficiency virus 1
  source 1..8: note = HLAs: B1502 B1525 C1202
AVHVASGY

SEQ ID NO: 162 - protein, 9 aa, Human immunodeficiency virus 1
  source 1..9: note = HLAs: A0205 A3001 B5201 C1505
AVHVASGYI

SEQ ID NO: 163 - protein, 9 aa, Human immunodeficiency virus 1
  source 1..9: note = HLAs: A3104 A3601 A7404 C0303 C1602 C1646
AWVKVVEEK

SEQ ID NO: 164 - protein, 11 aa, Human immunodeficiency virus 1
  source 1..11: note = HLAs: A2301 A2402 A2403 A2407 A2410
AWVKVVEEKAF

SEQ ID NO: 165 - protein, 10 aa, Human immunodeficiency virus 1
  source 1..10: note = HLAs: A3101 A3104 A3301 A3303 A3305 A7401 A7402 A7403 A7404 A7405 A7408 A7409 A7411
AYFILKLAGR

SEQ ID NO: 166 - protein, 11 aa, Human immunodeficiency virus 1
  source 1..11: note = HLAs: A2301 A2403
AYFILKLAGRW

SEQ ID NO: 167 - protein, 9 aa, Human immunodeficiency virus 1
  source 1..9: note = HLAs: A0301 A0302 A0305 A1101 A1102 A3001 A3101 A3104 A3303 A3402 A7401 A7402 A7403 A7404 A7405 A7408 A7409 A7411
AYFSVPLDK

SEQ ID NO: 168 - protein, 8 aa, Human immunodeficiency virus 1
  source 1..8: note = HLAs: C1202 C1601 C16112
CGKEGHQM

SEQ ID NO: 169 - protein, 9 aa, Human immunodeficiency virus 1
  source 1..9: note = HLAs: A3001 A3402
CGKEGHQMK

SEQ ID NO: 170 - protein, 10 aa, Human immunodeficiency virus 1
  source 1..10: note = HLAs: A0302 A1101 A1102 A3402 A3601 C0303 C1202 C1602 C1646
CQGVGGPGHK

SEQ ID NO: 171 - protein, 11 aa, Human immunodeficiency virus 1
  source 1..11: note = HLAs: B3906 B4101
CQGVGGPGHKA

SEQ ID NO: 172 - protein, 8 aa, Human immunodeficiency virus 1
  source 1..8: note = HLAs: B1502 B1503 B15220 B1525 B5201
CQLKGEAM

SEQ ID NO: 173 - protein, 9 aa, Human immunodeficiency virus 1
  source 1..9: note = HLAs: B1503 B15220
CQLKGEAMH

SEQ ID NO: 174 - protein, 8 aa, Human immunodeficiency virus 1
  source 1..8: note = HLAs: C0102 C0144 C1505 C1646
CSPGIWQL

SEQ ID NO: 175 - protein, 9 aa, Human immunodeficiency virus 1
  source 1..9: note = HLAs: A3601
CTEMEKEGK

SEQ ID NO: 176 - protein, 9 aa, Human immunodeficiency virus 1
  source 1..9: note = HLAs: A0101 A0102 A0109 A3601 B5702 B5703 B5704 B5802
CTERQANFF

SEQ ID NO: 177 - protein, 10 aa, Human immunodeficiency virus 1
  source 1..10: note = HLAs: A3101 A3104 A3301 A3303 A3305 A3401 A3402 A6801 A7404 A7405
CTERQANFFR

SEQ ID NO: 178 - protein, 9 aa, Human immunodeficiency virus 1
  source 1..9: note = HLAs: C1505
CTHLEGKII

SEQ ID NO: 179 - protein, 10 aa, Human immunodeficiency virus 1
  source 1..10: note = HLAs: A0202 A0203 A0204 A0205 A0206 A0211 A0214 A02264 A6802 A6827 A6901 B1517
CTLNFPISPI

SEQ ID NO: 180 - protein, 8 aa, Human immunodeficiency virus 1
  source 1..8: note = HLAs: B5101 B5102 B5107 B5108 B5109 B5201
DAYFSVPL

SEQ ID NO: 181 - protein, 10 aa, Human immunodeficiency virus 1
  source 1..10: note = HLAs: A3303 A3401 A3402 A6601 A6602 A6603 A6801 C0303
DAYFSVPLDK

SEQ ID NO: 182 - protein, 9 aa, Human immunodeficiency virus 1
  source 1..9: note = HLAs: B0801
DCKTILKAL

SEQ ID NO: 183 - protein, 9 aa, Human immunodeficiency virus 1
  source 1..9: note = HLAs: A6802 A6827 B5108 B5109
DCSPGIWQL

SEQ ID NO: 184 - protein, 11 aa, Human immunodeficiency virus 1
  source 1..11: note = HLAs: A3303
DCTERQANFFR

SEQ ID NO: 185 - protein, 10 aa, Human immunodeficiency virus 1
  source 1..10: note = HLAs: A3301 A3303 A3305 A3401 A3402 A6801
DFNLPPVVAK

SEQ ID NO: 186 - protein, 8 aa, Human immunodeficiency virus 1
  source 1..8: note = HLAs: A3301 A3303 A3305
DFRELNKR

SEQ ID NO: 187 - protein, 8 aa, Human immunodeficiency virus 1
  source 1..8: note = HLAs: C1402 C1403
DFRKYTAF

SEQ ID NO: 188 - protein, 9 aa, Human immunodeficiency virus 1
  source 1..9: note = HLAs: A3401 A3402 A6602 A6801 C0303
DGAANRETK

SEQ ID NO: 189 - protein, 10 aa, Human immunodeficiency virus 1
  source 1..10: note = HLAs: B0801
DGPKVKQWPL

SEQ ID NO: 190 - protein, 9 aa, Human immunodeficiency virus 1
  source 1..9: note = HLAs: A0205 A2501 A2601 A2608 A2612 A3401 A6601 A6602 A6603 A6802 A6827 A6901 B1401 B1402 B1502 B1521 B1531 B3503 B5101 B5107 B5108 B5109 B5201 B5604 B5610 C0102 C0103 C0144 C0202 C0210 C0229 C0303 C0304 C0704 C0801 C0803 C1202 C1203 C1602 C1604 C1646 C17 C1701 C1702 C1703 C1704 C1705 C1706 C1707
DIAGTTSTL

SEQ ID NO: 191 - protein, 10 aa, Human immunodeficiency virus 1
  source 1..10: note = HLAs: A3401
DIAGTTSTLQ

SEQ ID NO: 192 - protein, 10 aa, Human immunodeficiency virus 1
  source 1..10: note = HLAs: A3303 A3401 A3402 A3601 A6601 A6602 A6603 A6801 A7404 C0303 C1202
DIIATDIQTK

SEQ ID NO: 193 - protein, 8 aa, Human immunodeficiency virus 1
  source 1..8: note = HLAs: A3401 A3402 A6801 C0303
DIQKLVGK

SEQ ID NO: 194 - protein, 9 aa, Human immunodeficiency virus 1
  source 1..9: note = HLAs: A2501 A2601 A3401 A6601 A6602 A6603 A6802 A6827 B0801
DIQKLVGKL

SEQ ID NO: 195 - protein, 11 aa, Human immunodeficiency virus 1
  source 1..11: note = HLAs: B5701 B5703 B5704
DIQKLVGKLNW

SEQ ID NO: 196 - protein, 9 aa, Human immunodeficiency virus 1
  source 1..9: note = HLAs: A3301 A3303 A3305 A3401 A3402 A3601 A6601 A6602 A6603 A6801 A7401 A7402 A7403 A7404 A7405 A7408 A7409 A7411 C0303 C1602 C1646
DIQTKELQK

SEQ ID NO: 197 - protein, 10 aa, Human immunodeficiency virus 1
  source 1..10: note = HLAs: B1502
DIRQGPKEPF

SEQ ID NO: 198 - protein, 11 aa, Human immunodeficiency virus 1
  source 1..11: note = HLAs: A3301 A3303 A3305 A3401 A3402 A6601 A6602 A6603 A6801
DIRQGPKEPFR

SEQ ID NO: 199 - protein, 10 aa, Human immunodeficiency virus 1
  source 1..10: note = HLAs: A0301 A0305 A3402
DKLVSSGIRK

SEQ ID NO: 200 - protein, 8 aa, Human immunodeficiency virus 1
  source 1..8: note = HLAs: A3401
DLEIGQHR

SEQ ID NO: 201 - protein, 8 aa, Human immunodeficiency virus 1
  source 1..8: note = HLAs: A3402 C0303 C1202 C1602
DLIAEIQK

SEQ ID NO: 202 - protein, 9 aa, Human immunodeficiency virus 1
  source 1..9: note = HLAs: A0202 A0203 A0204 A0205 A0211 A02264 A6802 A6827 B1302 B5101 B5107 B5108 B5109 B5201
DLNTMLNTV

SEQ ID NO: 203 - protein, 10 aa, Human immunodeficiency virus 1
  source 1..10: note = HLAs: B5108
DPSKDLIAEI

SEQ ID NO: 204 - protein, 9 aa, Human immunodeficiency virus 1
  source 1..9: note = HLAs: B1401 B1402 B1403 B1510 B1537 B3901 B3906 B3909 B3924 B4002 B4006 B4101 B4102 B4501 B4507 B5001 B5107 B5201 B5502 B7301
DQAEHLKTA

SEQ ID NO: 205 - protein, 10 aa, Human immunodeficiency virus 1
  source 1..10: note = HLAs: B3906 B5107 B5201
DQAEHLKTAV

SEQ ID NO: 206 - protein, 8 aa, Human immunodeficiency virus 1
  source 1..8: note = HLAs: B5101 B5107 B5108 B5109
DSWTVNDI

SEQ ID NO: 207 - protein, 10 aa, Human immunodeficiency virus 1
  source 1..10: note = HLAs: A3303 A3401 A3402 A3601 A6601 A6602 A6603 A6801 C0303
DSWTVNDIQK

SEQ ID NO: 208 - protein, 10 aa, Human immunodeficiency virus 1
  source 1..10: note = HLAs: A2501 A2612 B5301 B5701 B5702 B5703 B5704 B5801 B5802
DTINEEAAEW

SEQ ID NO: 209 - protein, 8 aa, Human immunodeficiency virus 1
  source 1..8: note = HLAs: A3401 A3402 A6801
DTKEALDK

SEQ ID NO: 210 - protein, 9 aa, Human immunodeficiency virus 1
  source 1..9: note = HLAs: A0205 A0211 A2501 A3401 A6603 A6802 A6827 A6901 B5108 B5109
DVGDAYFSV

SEQ ID NO: 211 - protein, 11 aa, Human immunodeficiency virus 1
  source 1..11: note = HLAs: A6802 A6827 A6901
DVGDAYFSVPL

SEQ ID NO: 212 - protein, 8 aa, Human immunodeficiency virus 1
  source 1..8: note = HLAs: A3301 A3303 A3305
DYVDRFFK

SEQ ID NO: 213 - protein, 9 aa, Human immunodeficiency virus 1
  source 1..9: note = HLAs: A3401 A3402 A6601 A6603 C1202
EAAEWDRLH

SEQ ID NO: 214 - protein, 11 aa, Human immunodeficiency virus 1
  source 1..11: note = HLAs: A6802 A6827 A6901
EAAEWDRLHPV

SEQ ID NO: 215 - protein, 10 aa, Human immunodeficiency virus 1
  source 1..10: note = HLAs: A3401 A6801
EAELELAENR

SEQ ID NO: 216 - protein, 9 aa, Human immunodeficiency virus 1
  source 1..9: note = HLAs: B3701 B4001 B4002 B4006 B40114 B4101 B4102 B4402 B4403 B4404 B4405 B4407 B4415 B4427 B4501 B4507 B4901 B5001
EEAAEWDRL

SEQ ID NO: 217 - protein, 9 aa, Human immunodeficiency virus 1
  source 1..9: note = HLAs: B1801 B1802 B1803 B3701 B4001 B4002 B4006 B40114 B4016 B4101 B4102 B4402 B4403 B4404 B4405 B4407 B4415 B4427 B4501 B4507 B4901 B5001 B5107 B5201
EEKAFSPEV

SEQ ID NO: 218 - protein, 10 aa, Human immunodeficiency virus 1
  source 1..10: note = HLAs: B3701 B4002 B4006 B40114 B4101 B4102 B4402 B4404 B4405 B4415 B4427 B4501 B4507 B4901 B5001
EEKAFSPEVI

SEQ ID NO: 219 - protein, 11 aa, Human immunodeficiency virus 1
  source 1..11: note = HLAs: B4101
EEKAFSPEVIP

SEQ ID NO: 220 - protein, 9 aa, Human immunodeficiency virus 1
  source 1..9: note = HLAs: B4101
EEKIKALTE

SEQ ID NO: 221 - protein, 10 aa, Human immunodeficiency virus 1
  source 1..10: note = HLAs: B3701 B4002 B4006 B4101 B4102 B4901
EEKIKALTEI

SEQ ID NO: 222 - protein, 8 aa, Human immunodeficiency virus 1
  source 1..8: note = HLAs: B1801 B1802 B1803 B3701 B4001 B4002 B4006 B40114 B4016 B4101 B4102 B4402 B4403 B4404 B4405 B4407 B4415 B4427 B4501 B4507 B4901 B5001
EELREHLL

SEQ ID NO: 223 - protein, 9 aa, Human immunodeficiency virus 1
  source 1..9: note = HLAs: B4006 B4101 B4415 B4501 B4507
EEMMTACQG

SEQ ID NO: 224 - protein, 10 aa, Human immunodeficiency virus 1
  source 1..10: note = HLAs: A0202 A0203 A02264 A6802 A6827 B4002 B4006 B40114 B4101 B4102 B4402 B4403 B4407 B4415 B4427 B4501 B4507 B4901 B5001
EEMMTACQGV

SEQ ID NO: 225 - protein, 9 aa, Human immunodeficiency virus 1
  source 1..9: note = HLAs: C1402 C1403
EFVNTPPLV

SEQ ID NO: 226 - protein, 10 aa, Human immunodeficiency virus 1
  source 1..10: note = HLAs: A1101 A1102 A3104 A3303 A3401 A3402 A3601 A6801 A7404 A7405 C0303 C1602
EFVNTPPLVK

SEQ ID NO: 227 - protein, 11 aa, Human immunodeficiency virus 1
  source 1..11: note = HLAs: A2407
EFVNTPPLVKL

SEQ ID NO: 228 - protein, 11 aa, Human immunodeficiency virus 1
  source 1..11: note = HLAs: A3301 A3303 A3305 A3401 A6801
EGHQMKDCTER

SEQ ID NO: 229 - protein, 9 aa, Human immunodeficiency virus 1
  source 1..9: note = HLAs: B0801 B5101 B5102 B5107 B5108 B5109 B5201
EGKIILVAV

SEQ ID NO: 230 - protein, 9 aa, Human immunodeficiency virus 1
  source 1..9: note = HLAs: B1401 B1402 B1403 B1510 B1518 B1537 B3801 B3802 B3901 B3905 B3906 B3909 B3924 C0704
EHLKTAVQM

SEQ ID NO: 231 - protein, 10 aa, Human immunodeficiency virus 1
  source 1..10: note = HLAs: B3906
EHLKTAVQMA

SEQ ID NO: 232 - protein, 11 aa, Human immunodeficiency virus 1
  source 1..11: note = HLAs: B3802 B3906
EHLKTAVQMAV

SEQ ID NO: 233 - protein, 8 aa, Human immunodeficiency virus 1
  source 1..8: note = HLAs: A3401 A3402 C0303 C1202
EICTEMEK

SEQ ID NO: 234 - protein, 11 aa, Human immunodeficiency virus 1
  source 1..11: note = HLAs: A3401 A3402 A3601 A6601 A6602 A6603 A6801 C0303
EICTEMEKEGK

SEQ ID NO: 235 - protein, 8 aa, Human immunodeficiency virus 1
  source 1..8: note = HLAs: A3303 A3401
EIKVVPRR

SEQ ID NO: 236 - protein, 9 aa, Human immunodeficiency virus 1
  source 1..9: note = HLAs: A0302 A3104 A3303 A3401 A3402 A6601 A6602 A6603 A6801 A7401 A7402 A7403 A7404 A7405 A7408 A7409 A7411 A7413
EIKVVPRRK

SEQ ID NO: 237 - protein, 10 aa, Human immunodeficiency virus 1
  source 1..10: note = HLAs: A0203 A0205 A0211 A02264 A6802 A6827 A6901
EILKEPVHGV

SEQ ID NO: 238 - protein, 11 aa, Human immunodeficiency virus 1
  source 1..11: note = HLAs: A3004 A3009 B1502
EILKEPVHGVY

SEQ ID NO: 239 - protein, 8 aa, Human immunodeficiency virus 1
  source 1..8: note = HLAs: B0801
EIYKRWII

SEQ ID NO: 240 - protein, 9 aa, Human immunodeficiency virus 1
  source 1..9: note = HLAs: A2501 A6603 B0801 B1401 B1402
EIYKRWIIL

SEQ ID NO: 241 - protein, 9 aa, Human immunodeficiency virus 1
  source 1..9: note = HLAs: B3802
EKAFSPEVI

SEQ ID NO: 242 - protein, 9 aa, Human immunodeficiency virus 1
  source 1..9: note = HLAs: B1401 B1402 B3802 B3906 B5201
EKIKALTEI

SEQ ID NO: 243 - protein, 10 aa, Human immunodeficiency virus 1
  source 1..10: note = HLAs: C1402 C1403
EKYHSNWRAM

SEQ ID NO: 244 - protein, 9 aa, Human immunodeficiency virus 1
  source 1..9: note = HLAs: A0205 A6802 A6827 B0801 B1301 B1302 B1401 B1402 B4002 C0102 C0144 C0704 C1701 C1702 C1703 C1704 C1705
ELAENREIL

SEQ ID NO: 245 - protein, 10 aa, Human immunodeficiency virus 1
  source 1..10: note = HLAs: A0302 A1101 A1102 A3401 A3402 A3601 A6601 A6602 A6603 A6801 A7401 A7402 A7403 A7404 A7405 A7408 A7409 A7411 A7413 C0303 C1202 C1602 C1646
ELAENREILK

SEQ ID NO: 246 - protein, 9 aa, Human immunodeficiency virus 1
  source 1..9: note = HLAs: A0201 A0202 A0203 A0204 A0205 A0206 A0207 A0211 A0214 A02264 A0230 A6802 A6827 A6901 B1301 B1302 B1303 B5107 B5108 B5201 C1505
ELHPDKWTV

SEQ ID NO: 247 - protein, 9 aa, Human immunodeficiency virus 1
  source 1..9: note = HLAs: A0202 A0203 A0204 A0205 A0211 A02264 A6603 A6802 A6827 B0801 B1302 B1303 B5201
ELKKIIGQV

SEQ ID NO: 248 - protein, 10 aa, Human immunodeficiency virus 1
  source 1..10: note = HLAs: A3101 A3301 A3303 A3305 A3401 A3402 A6601 A6602 A6603 A6801 A7404 A7405
ELKKIIGQVR

SEQ ID NO: 249 - protein, 9 aa, Human immunodeficiency virus 1
  source 1..9: note = HLAs: B0801 B1502 B1521 B1525 B1531 C1202
ELNKRTQDF

SEQ ID NO: 250 - protein, 10 aa, Human immunodeficiency virus 1
  source 1..10: note = HLAs: B5701 B5704
ELNKRTQDFW

SEQ ID NO: 251 - protein, 8 aa, Human immunodeficiency virus 1
  source 1..8: note = HLAs: A3402 C0303
ELQKQITK

SEQ ID NO: 252 - protein, 9 aa, Human immunodeficiency virus 1
  source 1..9: note = HLAs: A0202 A0203 A0204 A0205 A0207 A02264 B0801 B1301 B1302 B1303 B2705 B5107 B5201
ELQKQITKI

SEQ ID NO: 253 - protein, 8 aa, Human immunodeficiency virus 1
  source 1..8: note = HLAs: A3402
ELREHLLK

SEQ ID NO: 254 - protein, 9 aa, Human immunodeficiency virus 1
  source 1..9: note = HLAs: A2501 A3004 A3009 A3201 B1301 B1502 B1516 B1517 B1524 B1525 B4427 B5301 B5701 B5702 B5703 B5704 B5801 B5802
ELREHLLKW

SEQ ID NO: 255 - protein, 10 aa, Human immunodeficiency virus 1
  source 1..10: note = HLAs: A3401 A3402 A3601 A7404 C0303
EMEKEGKISK

SEQ ID NO: 256 - protein, 9 aa, Human immunodeficiency virus 1
  source 1..9: note = HLAs: A0201 A0202 A0203 A0204 A0205 A0206 A0207 A0211 A0214 A02264 A0230 A6802 A6827 A6901 B1302 B1303
EMMTACQGV

SEQ ID NO: 257 - protein, 10 aa, Human immunodeficiency virus 1
  source 1..10: note = HLAs: B5401
ENPYNTPVFA

SEQ ID NO: 258 - protein, 9 aa, Human immunodeficiency virus 1
  source 1..9: note = HLAs: B5502
EPFKNLKTG

SEQ ID NO: 259 - protein, 11 aa, Human immunodeficiency virus 1
  source 1..11: note = HLAs: B3501 B3505 B3508 B3532 B3541
EPFKNLKTGKY

SEQ ID NO: 260 - protein, 9 aa, Human immunodeficiency virus 1
  source 1..9: note = HLAs: A3301 A3303 A3305 A3401 A6601 A6602 A6801
EPFRDYVDR

SEQ ID NO: 261 - protein, 10 aa, Human immunodeficiency virus 1
  source 1..10: note = HLAs: B3501 B3508 B3532 B3541 B5301
EPFRDYVDRF

SEQ ID NO: 262 - protein, 11 aa, Human immunodeficiency virus 1
  source 1..11: note = HLAs: B5301
EPFRDYVDRFF

SEQ ID NO: 263 - protein, 9 aa, Human immunodeficiency virus 1
  source 1..9: note = HLAs: B3501 B3505 B3508 B3532 B3541
EPPFLWMGY

SEQ ID NO: 264 - protein, 11 aa, Human immunodeficiency virus 1
  source 1..11: note = HLAs: B5501 B5502
EPRGSDIAGTT

SEQ ID NO: 265 - protein, 8 aa, Human immunodeficiency virus 1
  source 1..8: note = HLAs: B3501 B3505 B3508 B3532 B3541
EPVHGVYY

SEQ ID NO: 266 - protein, 9 aa, Human immunodeficiency virus 1
  source 1..9: note = HLAs: B3906 B4006 B4101
EQVDKLVSS

SEQ ID NO: 267 - protein, 8 aa, Human immunodeficiency virus 1
  source 1..8: note = HLAs: B3906
ERIIDIIA

SEQ ID NO: 268 - protein, 8 aa, Human immunodeficiency virus 1
  source 1..8: note = HLAs: A3401 A3402 A6801
ESIVIWGK

SEQ ID NO: 269 - protein, 9 aa, Human immunodeficiency virus 1
  source 1..9: note = HLAs: A0301 A0302 A0305 A1101 A1102 A3001 A3101 A3104 A3303 A3401 A3402 A3601 A6601 A6602 A6603 A6801 A7401 A7402 A7403 A7404 A7405 A7408 A7409 A7411 A7413 C1602 C1646
ESMNKELKK

SEQ ID NO: 270 - protein, 9 aa, Human immunodeficiency virus 1
  source 1..9: note = HLAs: A3401 A6601 A6602 A6802 A6827 A6901
ETFYVDGAA

SEQ ID NO: 271 - protein, 10 aa, Human immunodeficiency virus 1
  source 1..10: note = HLAs: A3401
ETFYVDGAAN

SEQ ID NO: 272 - protein, 11 aa, Human immunodeficiency virus 1
  source 1..11: note = HLAs: A3101 A3104 A3301 A3303 A3305 A3401 A3402 A6601 A6602 A6603 A6801 A7401 A7402 A7403 A7404 A7405 A7408 A7409 A7411 A7413
ETFYVDGAANR

SEQ ID NO: 273 - protein, 9 aa, Human immunodeficiency virus 1
  source 1..9: note = HLAs: A2501 A2601 A2608 A2612 A3401 A6601 A6602 A6603 B5702 B5703
ETGQETAYF

SEQ ID NO: 274 - protein, 9 aa, Human immunodeficiency virus 1
  source 1..9: note = HLAs: A0101 A0102 A0103 A0109 A0123 A2501 A2601 A2603 A2608 A2612 A2630 A2901 A2902 A2911 A3002 A3004 A3009 A3010 A3401 A3402 A3601 A4301 A6601 A6602 A6603 A6801 A7410 B1502 B1531 B5704 C0202 C0210 C0229 C1202 C1203 C1504 C1509 C1601 C1602 C1604 C16112 C1646
ETPGIRYQY

SEQ ID NO: 275 - protein, 11 aa, Human immunodeficiency virus 1
  source 1..11: note = HLAs: A6802 A6827 A6901
ETPGIRYQYNV

SEQ ID NO: 276 - protein, 8 aa, Human immunodeficiency virus 1
  source 1..8: note = HLAs: A3401 A3402 A6602 A6801
ETVPVKLK

SEQ ID NO: 277 - protein, 9 aa, Human immunodeficiency virus 1
  source 1..9: note = HLAs: A3401 A3402 A6601 A6602 A6603
EVIPAETGQ

SEQ ID NO: 278 - protein, 10 aa, Human immunodeficiency virus 1
  source 1..10: note = HLAs: A3401
EVIPAETGQE

SEQ ID NO: 279 - protein, 11 aa, Human immunodeficiency virus 1
  source 1..11: note = HLAs: A3401
EVIPAETGQET

SEQ ID NO: 280 - protein, 9 aa, Human immunodeficiency virus 1
  source 1..9: note = HLAs: A0202 A0204 A0205 A0206 A0214 A2501 A2601 A2603 A2608 A2612 A2630 A3401 A3402 A4301 A6601 A6602 A6603 A6801 A6802 A6827 A6901 B1401 B1402 B1502 B1521 B1525 B1531 B3501 B3503 B3541 B3910 B4201 B5107 B5108 B5109 B5201 B5610 C0102 C0144 C0202 C0210 C0229 C0302 C0303 C0304 C0305 C0317 C0704 C0801 C0803 C1202 C1203 C1502 C1505 C1601 C1602 C1604 C16112 C1646 C17 C1701 C1702 C1703 C1704 C1705 C1706 C1707
EVIPMFSAL

SEQ ID NO: 281 - protein, 10 aa, Human immunodeficiency virus 1
  source 1..10: note = HLAs: A3401 A6802 A6827
EVIPMFSALS

SEQ ID NO: 282 - protein, 10 aa, Human immunodeficiency virus 1
  source 1..10: note = HLAs: A0101 A0102 A0103 A0109 A0123 A2501 A2601 A2608 A2612 A2901 A2902 A2911 A3002 A3004 A3009 A3010 A3401 A3402 A3601 A6601 A6602 A6603 B1502 B1531 C1202
EVNIVTDSQY

SEQ ID NO: 283 - protein, 10 aa, Human immunodeficiency virus 1
  source 1..10: note = HLAs: A6802 A6827 A6901
EVQLGIPHPA

SEQ ID NO: 284 - protein, 10 aa, Human immunodeficiency virus 1
  source 1..10: note = HLAs: B4001 B4002 B40114 B4016 B4102
EWEFVNTPPL

SEQ ID NO: 285 - protein, 10 aa, Human immunodeficiency virus 1
  source 1..10: note = HLAs: A3401 A3402
FAIKKKDSTK

SEQ ID NO: 286 - protein, 11 aa, Human immunodeficiency virus 1
  source 1..11: note = HLAs: A3201 B1516 B1517 B5301 B5701 B5702 B5703 B5704 B5801 B5802 C1601 C1602 C16112 C1646
FAIKKKDSTKW

SEQ ID NO: 287 - protein, 8 aa, Human immunodeficiency virus 1
  source 1..8: note = HLAs: B1502 B1503 B15220 B1525 C0214 C0302 C0702 C0705 C1402 C1403 C1601 C1602 C16112 C1646
FFRENLAF

SEQ ID NO: 288 - protein, 9 aa, Human immunodeficiency virus 1
  source 1..9: note = HLAs: A2501 A3201 B1516 B1517 B5701 B5702 B5703 B5704 B5801 B5802
FILKLAGRW

SEQ ID NO: 289 - protein, 11 aa, Human immunodeficiency virus 1
  source 1..11: note = HLAs: A0201 A0202 A0203 A0204 A0205 A0206 A0211 A0214 A02264 A0230
FILKLAGRWPV

SEQ ID NO: 290 - protein, 9 aa, Human immunodeficiency virus 1
  source 1..9: note = HLAs: B1502 B1503 B1518 B15220 B1525 C0702 C0705
FKNLKTGKY

SEQ ID NO: 291 - protein, 10 aa, Human immunodeficiency virus 1
  source 1..10: note = HLAs: B1503 B15220 B1525
FKRKGGIGGY

SEQ ID NO: 292 - protein, 8 aa, Human immunodeficiency virus 1
  source 1..8: note = HLAs: A0202
FLDGIDKA

SEQ ID NO: 293 - protein, 8 aa, Human immunodeficiency virus 1
  source 1..8: note = HLAs: A0201 A0202 A0203 A0204 A0206 A0211 A0214 A02264 A0230 C0302 C0303 C0304 C0305 C0704 C1601 C1602 C16112 C1646
FLWMGYEL

SEQ ID NO: 294 - protein, 9 aa, Human immunodeficiency virus 1
  source 1..9: note = HLAs: A2901 A2902 A2911
FLWMGYELH

SEQ ID NO: 295 - protein, 10 aa, Human immunodeficiency virus 1
  source 1..10: note = HLAs: A0201 A0202 A0203 A0211 A02264 A0230
FLWMGYELHP

SEQ ID NO: 296 - protein, 9 aa, Human immunodeficiency virus 1
  source 1..9: note = HLAs: A0301 A0302 A0305 A1101 A1102 A3001 A3104 A3303 A3401 A3402 A3601 A6601 A6602 A6603 A6801 A7401 A7402 A7403 A7404 A7405 A7408 A7409 A7411 A7413 C0302 C0303 C0602 C0705 C1202 C1504 C1509 C1601 C1602 C1604 C16112 C1646
FNLPPVVAK

SEQ ID NO: 297 - protein, 8 aa, Human immunodeficiency virus 1
  source 1..8: note = HLAs: B3503 B5109 B5401 B5501 B5502 B5601 B5604 B5610
FPISPIET

SEQ ID NO: 298 - protein, 9 aa, Human immunodeficiency virus 1
  source 1..9: note = HLAs: A0205 A6802 A6827 A6901 B0702 B0705 B0801 B1401 B1402 B1403 B1502 B1508 B1510 B1511 B1521 B1531 B1537 B3501 B3502 B3503 B3505 B3508 B3512 B3532 B3541 B3543 B3901 B3905 B3906 B3909 B3910 B3924 B4008 B4201 B4202 B5101 B5102 B5105 B5107 B5108 B5109 B5201 B5301 B5401 B5501 B5502 B5601 B5604 B5610 B6701 B7801 B8101 B8103 B8201 B8202 C0102 C0144 C0302 C0303 C0304 C0305 C0317 C0404 C0602 C0704 C0801 C0803 C0804 C0812 C1202 C1203 C1502 C1505 C1601 C1602 C1604 C16112 C1646 C17 C1701 C1702 C1703 C1704 C1705 C1706 C1707
FPISPIETV

SEQ ID NO: 299 - protein, 10 aa, Human immunodeficiency virus 1
  source 1..10: note = HLAs: B3501 B3503 B5401 B5501 B5502 B5601 B5604 B5610
FPISPIETVP

SEQ ID NO: 300 - protein, 11 aa, Human immunodeficiency virus 1
  source 1..11: note = HLAs: B0702 B0705 B3501 B3502 B3503 B3505 B3512 B3532 B3541 B3910 B4201 B5101 B5102 B5105 B5108 B5109 B5301 B5401 B5501 B5502 B5601 B5604 B5610 B6701 B7801 C0801 C0803
FPISPIETVPV

SEQ ID NO: 301 - protein, 9 aa, Human immunodeficiency virus 1
  source 1..9: note = HLAs: A3301 A3303 A3305 A3401 A6801
FPQITLWQR

SEQ ID NO: 302 - protein, 10 aa, Human immunodeficiency virus 1
  source 1..10: note = HLAs: B5401
FPQITLWQRP

SEQ ID NO: 303 - protein, 11 aa, Human immunodeficiency virus 1
  source 1..11: note = HLAs: B0702 B0705 B3505 B3541 B3910 B4201 B4202 B5501 B5502 B5604 B5610 B6701 B8101 B8103
FPQITLWQRPL

SEQ ID NO: 304 - protein, 8 aa, Human immunodeficiency virus 1
  source 1..8: note = HLAs: C0701 C0702 C0704 C0705 C0706 C0718
FRDYVDRF

SEQ ID NO: 305 - protein, 9 aa, Human immunodeficiency virus 1
  source 1..9: note = HLAs: B1503 B1518 B15220 B2702 B2704 B2705 B2706 B2707 B3801 B3802 C0214 C0401 C0404 C0407 C0602 C0701 C0702 C0704 C0705 C0706 C0718 C1801 C1802
FRDYVDRFF

SEQ ID NO: 306 - protein, 10 aa, Human immunodeficiency virus 1
  source 1..10: note = HLAs: B2705
FRDYVDRFFK

SEQ ID NO: 307 - protein, 9 aa, Human immunodeficiency virus 1
  source 1..9: note = HLAs: B1401 B1402 B1403 B2702 B2703 B2704 B2705 B2706 B2707 B3901 B3906 B3924 B7301 C0602 C0701 C0702 C0704 C0705 C0706 C0718
FRKYTAFTI

SEQ ID NO: 308 - protein, 9 aa, Human immunodeficiency virus 1
  source 1..9: note = HLAs: B2702 B2704 B2705 B2706 B2707 B3906 B7301 C0602 C0701 C0702 C0705 C0706 C0718
FRLPIQKET

SEQ ID NO: 309 - protein, 10 aa, Human immunodeficiency virus 1
  source 1..10: note = HLAs: B2702 B2703 B2704 B2705 B2706 B2707 B5701 B5704 C0602 C0701 C0702 C0705 C0706 C0718
FRLPIQKETW

SEQ ID NO: 310 - protein, 9 aa, Human immunodeficiency virus 1
  source 1..9: note = HLAs: B2702 B2704 B2705
FRVYYRDSR

SEQ ID NO: 311 - protein, 8 aa, Human immunodeficiency virus 1
  source 1..8: note = HLAs: B5201 C0102 C0103 C0144 C0202 C0210 C0217 C0229 C0302 C0303 C0304 C0305 C0317 C0403 C0404 C0501 C0509 C0602 C0702 C0704 C0705 C0801 C0802 C0803 C0804 C0812 C1202 C1203 C1402 C1403 C1502 C1504 C1505 C1509 C1601 C1602 C1604 C16112 C1646 C17 C1701 C1702 C1703 C1704 C1705 C1706 C1707
FSPEVIPM

SEQ ID NO: 312 - protein, 9 aa, Human immunodeficiency virus 1
  source 1..9: note = HLAs: A0204 A0205 A0206 A0207 A0214 A2301 A2402 A2403 A2407 A2410 A2464 A2501 A2612 A3004 A3009 A3201 A3601 A4301 A7404 B1301 B1501 B1502 B1503 B1508 B1511 B1516 B1517 B1521 B15220 B1524 B1525 B1531 B1532 B3501 B3505 B3508 B3532 B3541 B4601 B5201 B5301 B5701 B5702 B5703 B5704 B5801 B5802 C0102 C0103 C0144 C0202 C0210 C0214 C0217 C0229 C0302 C0303 C0304 C0305 C0317 C0401 C0403 C0404 C0407 C0501 C0509 C0602 C0701 C0702 C0704 C0705 C0706 C0718 C0801 C0802 C0803 C0804 C0812 C1202 C1203 C1402 C1403 C1502 C1504 C1505 C1509 C1601 C1602 C1604 C16112 C1646 C17 C1701 C1702 C1703 C1704 C1705 C1706 C1707 C1801 C1802
FSPEVIPMF

SEQ ID NO: 313 - protein, 10 aa, Human immunodeficiency virus 1
  source 1..10: note = HLAs: A0205 A0206 A6802 A6827
FTIPSINNET

SEQ ID NO: 314 - protein, 10 aa, Human immunodeficiency virus 1
  source 1..10: note = HLAs: A0302 A1101 A1102 A3401 A3402 A3601 A6602 A6801 A7401 A7402 A7403 A7404 A7405 A7408 A7409 A7411 A7413 C1602
FTTPDKKHQK

SEQ ID NO: 315 - protein, 8 aa, Human immunodeficiency virus 1
  source 1..8: note = HLAs: B5201 C0202 C0210 C0229 C0302 C0303 C0304 C0305 C0317 C0501 C0509 C0704 C0801 C0803 C0804 C1202 C1203 C1502 C1504 C1505 C1509 C1601 C1602 C1604 C16112 C1646 C17 C1701 C1702 C1703 C1704 C1705 C1706 C1707
FVNTPPLV

SEQ ID NO: 316 - protein, 9 aa, Human immunodeficiency virus 1
  source 1..9: note = HLAs: A0301 A0302 A0305 A1101 A1102 A3001 A3101 A3104 A3303 A3401 A3402 A3601 A6601 A6602 A6603 A6801 A74 A7401 A7402 A7403 A7404 A7405 A7407 A7408 A7409 A7411 A7413 C0202 C0210 C0214 C0229 C0302 C0303 C0602 C1202 C1203 C1504 C1509 C1601 C1602 C1604 C16112 C1646
FVNTPPLVK

SEQ ID NO: 317 - protein, 10 aa, Human immunodeficiency virus 1
  source 1..10: note = HLAs: A0202 A0203 A0204 A0205 A0206 A0207 A0211 A0214 A02264 A3401 A6802 A6827 A7404 B1525 B5201 C0102 C0103 C0144 C0202 C0210 C0214 C0217 C0229 C0302 C0303 C0304 C0305 C0317 C0403 C0501 C0509 C0602 C0704 C0705 C0801 C0802 C0803 C0804 C0812 C1202 C1203 C1502 C1504 C1505 C1509 C1601 C1602 C1604 C16112 C1646 C17 C1701 C1702 C1703 C1704 C1705 C1706 C1707
FVNTPPLVKL

SEQ ID NO: 318 - protein, 11 aa, Human immunodeficiency virus 1
  source 1..11: note = HLAs: A3201 B1517 B5701 B5702 B5703 B5704 B5801 B5802 C1602
FVNTPPLVKLW

SEQ ID NO: 319 - protein, 9 aa, Human immunodeficiency virus 1
  source 1..9: note = HLAs: A3101 A3104 A3301 A3303 A3305 A3401 A3402 A6801 A7401 A7402 A7403 A7404 A7405 A7408 A7409 A7411 C0303 C0602 C1402 C1403 C1602 C1646
FYVDGAANR

SEQ ID NO: 320 - protein, 9 aa, Human immunodeficiency virus 1
  source 1..9: note = HLAs: C0403 C0501 C0509 C0802
GADDTVLEE

SEQ ID NO: 321 - protein, 9 aa, Human immunodeficiency virus 1
  source 1..9: note = HLAs: A3001
GARASVLSG

SEQ ID NO: 322 - protein, 10 aa, Human immunodeficiency virus 1
  source 1..10: note = HLAs: A0206
GATLEEMMTA

SEQ ID NO: 323 - protein, 10 aa, Human immunodeficiency virus 1
  source 1..10: note = HLAs: C0102 C0144 C0202 C0210 C0229 C0302 C0303 C0304 C0305 C0317 C0704 C0801 C0803 C1202 C1203 C1502 C1504 C1505 C1509 C1601 C1602 C1604 C16112 C1646 C17 C1701 C1702 C1703 C1704 C1705 C1706 C1707
GATPQDLNTM

SEQ ID NO: 324 - protein, 11 aa, Human immunodeficiency virus 1
  source 1..11: note = HLAs: B5703 C0102 C0144 C0202 C0210 C0229 C0302 C0303 C0304 C0305 C0317 C0704 C0801 C0803 C0804 C1202 C1203 C1502 C1504 C1505 C1509 C1601 C1602 C1604 C16112 C1646 C17 C1701 C1702 C1703 C1704 C1705 C1706 C1707
GATPQDLNTML

SEQ ID NO: 325 - protein, 11 aa, Human immunodeficiency virus 1
  source 1..11: note = HLAs: A0203 A0211 A02264
GCTLNFPISPI

SEQ ID NO: 326 - protein, 9 aa, Human immunodeficiency virus 1
  source 1..9: note = HLAs: B3701 B4002 B4006 B40114 B4016 B4101 B4102
GDAYFSVPL

SEQ ID NO: 327 - protein, 8 aa, Human immunodeficiency virus 1
  source 1..8: note = HLAs: B3701 B4002 B4006 B40114 B4016 B4101 B4102 B4901 B5001
GEAMHGQV

SEQ ID NO: 328 - protein, 9 aa, Human immunodeficiency virus 1
  source 1..9: note = HLAs: B4006 B4101
GEAMHGQVD

SEQ ID NO: 329 - protein, 10 aa, Human immunodeficiency virus 1
  source 1..10: note = HLAs: B4002 B4006 B40114 B4101 B4102 B4415 B4501 B4507 B4901 B5001
GEAMHGQVDC

SEQ ID NO: 330 - protein, 11 aa, Human immunodeficiency virus 1
  source 1..11: note = HLAs: B4006 B4101 B4501 B4507
GEAMHGQVDCS

SEQ ID NO: 331 - protein, 9 aa, Human immunodeficiency virus 1
  source 1..9: note = HLAs: B4101
GEGAVVIQD

SEQ ID NO: 332 - protein, 8 aa, Human immunodeficiency virus 1
  source 1..8: note = HLAs: B4002 B4006 B4102 B4901
GEIYKRWI

SEQ ID NO: 333 - protein, 9 aa, Human immunodeficiency virus 1
  source 1..9: note = HLAs: B1302 B1303 B3701 B4001 B4002 B4006 B40114 B4016 B4101 B4102 B4402 B4403 B4404 B4405 B4407 B4415 B4427 B4501 B4507 B4901 B5001 B5201
GEIYKRWII

SEQ ID NO: 334 - protein, 10 aa, Human immunodeficiency virus 1
  source 1..10: note = HLAs: B3701 B4001 B4002 B4006 B40114 B4016 B4101 B4102 B4427 B4901 B5001
GEIYKRWIIL

SEQ ID NO: 335 - protein, 8 aa, Human immunodeficiency virus 1
  source 1..8: note = HLAs: B3701 B4002 B4006 B40114 B4016 B4101 B4102 B4901 B5001
GERIIDII

SEQ ID NO: 336 - protein, 9 aa, Human immunodeficiency virus 1
  source 1..9: note = HLAs: B3701 B4001 B4002 B4006 B40114 B4016 B4101 B4102 B4415 B4501 B4507 B4901 B5001
GERIIDIIA

SEQ ID NO: 337 - protein, 8 aa, Human immunodeficiency virus 1
  source 1..8: note = HLAs: B1525 C1402 C1403
GFIKVRQY

SEQ ID NO: 338 - protein, 9 aa, Human immunodeficiency virus 1
  source 1..9: note = HLAs: A2901 A2902 A2911 A3002 A3009 A3010 B1501 B1502 B1503 B15220 B1525 C0202 C0210 C0214 C0229 C0302 C0602 C0702 C0705 C1202 C1203 C1504 C1509 C1601 C1602 C1604 C16112 C1646
GGFIKVRQY

SEQ ID NO: 339 - protein, 9 aa, Human immunodeficiency virus 1
  source 1..9: note = HLAs: B1525 C0202 C0210 C0229 C0302 C0304 C0704 C1202 C1203 C1504 C1505 C1509 C1601 C1602 C1604 C16112 C1646 C1701 C1702 C1703 C1704 C1705
GGHQAAMQM

SEQ ID NO: 340 - protein, 11 aa, Human immunodeficiency virus 1
  source 1..11: note = HLAs: A1101 A1102
GGHQAAMQMLK

SEQ ID NO: 341 - protein, 8 aa, Human immunodeficiency virus 1
  source 1..8: note = HLAs: C0303
GGIGGFIK

SEQ ID NO: 342 - protein, 9 aa, Human immunodeficiency virus 1
  source 1..9: note = HLAs: A0204 A0205 A0206 A0207 A0214 B1302 B1303 B5201 C0303 C0704 C0801 C0803 C1203 C1502 C1504 C1505 C1509 C1602 C1646 C17 C1701 C1702 C1703 C1704 C1705 C1706
GGIGGFIKV

SEQ ID NO: 343 - protein, 10 aa, Human immunodeficiency virus 1
  source 1..10: note = HLAs: A3104 A3303 A3401 A3402 A7404 A7405 C0303 C1602
GGIGGFIKVR

SEQ ID NO: 344 - protein, 11 aa, Human immunodeficiency virus 1
  source 1..11: note = HLAs: A3401 A3402 A3601 A7404 B2705 C0202 C0210 C0214 C0229 C0302 C0303 C0602 C1202 C1504 C1509 C1601 C1602 C16112 C1646
GGIGGYSAGER

SEQ ID NO: 345 - protein, 9 aa, Human immunodeficiency virus 1
  source 1..9: note = HLAs: B1301 C0501 C0509 C0704 C1502 C1505 C1602 C1646 C17 C1701 C1702 C1703 C1704 C1705 C1706
GGNEQVDKL

SEQ ID NO: 346 - protein, 9 aa, Human immunodeficiency virus 1
  source 1..9: note = HLAs: B1302 B5201
GGYSAGERI

SEQ ID NO: 347 - protein, 9 aa, Human immunodeficiency virus 1
  source 1..9: note = HLAs: B1401 B1402 B1403 B1510 B1537 B3801 B3802 B3901 B3905 B3906 B3909 B3924 C0704
GHQAAMQML

SEQ ID NO: 348 - protein, 10 aa, Human immunodeficiency virus 1
  source 1..10: note = HLAs: A0301 A0302 A0305 A1101 A1102
GHQAAMQMLK

SEQ ID NO: 349 - protein, 9 aa, Human immunodeficiency virus 1
  source 1..9: note = HLAs: A3601
GIDKAQEEH

SEQ ID NO: 350 - protein, 11 aa, Human immunodeficiency virus 1
  source 1..11: note = HLAs: A0302 A3402 A3601 A7404 C0202 C0210 C0214 C0229 C0303 C1202 C1504 C1509 C1601 C1602 C16112 C1646
GIDKAQEEHEK

SEQ ID NO: 351 - protein, 9 aa, Human immunodeficiency virus 1
  source 1..9: note = HLAs: A0302 A3101 A3104 A3303 A3401 A3402 A6601 A6602 A6603 A6801 A7401 A7402 A7403 A7404 A7405 A7408 A7409 A7411 A7413 C0303 C1602
GIGGFIKVR

SEQ ID NO: 352 - protein, 10 aa, Human immunodeficiency virus 1
  source 1..10: note = HLAs: A0302 A1101 A1102 A3402 A3601 A7404 C0202 C0210 C0229 C0303 C1202 C1602
GIGGNEQVDK

SEQ ID NO: 353 - protein, 11 aa, Human immunodeficiency virus 1
  source 1..11: note = HLAs: B1301
GIGGNEQVDKL

SEQ ID NO: 354 - protein, 10 aa, Human immunodeficiency virus 1
  source 1..10: note = HLAs: A3401 A3402 A6601 A6602 A6603 A6801 A7401 A7402 A7403 A7404 A7405 A7408 A7409 A7411 A7413 C0303
GIGGYSAGER

SEQ ID NO: 355 - protein, 9 aa, Human immunodeficiency virus 1
  source 1..9: note = HLAs: A0301 A0302 A0305 A1101 A1102 A3402 C0303
GIIQAQPDK

SEQ ID NO: 356 - protein, 8 aa, Human immunodeficiency virus 1
  source 1..8: note = HLAs: C0102 C0144
GIPHPAGL

SEQ ID NO: 357 - protein, 9 aa, Human immunodeficiency virus 1
  source 1..9: note = HLAs: A0301 A0302 A0305 A1101 A1102 A3001 A3401 A3402 A3601 A7401 A7402 A7403 A7404 A7405 A7408 A7409 A7411 A7413 C0303 C1602 C1646
GIPHPAGLK

SEQ ID NO: 358 - protein, 10 aa, Human immunodeficiency virus 1
  source 1..10: note = HLAs: A0301 A0302 A0305 A1101 A1102 A3001 A3402 A3601 A7401 A7402 A7403 A7404 A7405 A7408 A7409 A7411 A7413 C0303 C1602
GIPHPAGLKK

SEQ ID NO: 359 - protein, 11 aa, Human immunodeficiency virus 1
  source 1..11: note = HLAs: A0301 A0302 A0305 A1101 A1102 A3402 A7401 A7402 A7403 A7404 A7405 A7408 A7409 A7411 A7413
GIPHPAGLKKK

SEQ ID NO: 360 - protein, 9 aa, Human immunodeficiency virus 1
  source 1..9: note = HLAs: A3001 B0705 B0801
GIRYQYNVL

SEQ ID NO: 361 - protein, 10 aa, Human immunodeficiency virus 1
  source 1..10: note = HLAs: A0201 A0202 A0203 A0204 A0205 A0206 A0207 A0211 A0214 A02264 A0230
GIWQLDCTHL

SEQ ID NO: 362 - protein, 10 aa, Human immunodeficiency virus 1
  source 1..10: note = HLAs: A3002 B1501 B1503 B15220 B1525 B1527
GKLNWASQIY

SEQ ID NO: 363 - protein, 10 aa, Human immunodeficiency virus 1
  source 1..10: note = HLAs: A0203 A02264
GLKKKKSVTV

SEQ ID NO: 364 - protein, 9 aa, Human immunodeficiency virus 1
  source 1..9: note = HLAs: A2901 A2902 A2911 A3002 A3004 A3009 A3010 A3201 A3601 A7404 A7410 A8001 B1501 B1502 B1503 B1512 B15220 B1524 B1525 B1527 B1531 B1532 C0202 C0210 C0229 C0302 C1202 C1504 C1509 C1601 C1602 C16112
GLNKIVRMY

SEQ ID NO: 365 - protein, 10 aa, Human immunodeficiency virus 1
  source 1..10: note = HLAs: A3201 A3601 B1301 B1524 B1525 B4427 B5701 B5702 B5703 B5704 B5801 B5802 C1602 C1646
GMDGPKVKQW

SEQ ID NO: 366 - protein, 9 aa, Human immunodeficiency virus 1
  source 1..9: note = HLAs: B5502
GPAKLLWKG

SEQ ID NO: 367 - protein, 9 aa, Human immunodeficiency virus 1
  source 1..9: note = HLAs: B5501 B5502 B5601
GPENPYNTP

SEQ ID NO: 368 - protein, 10 aa, Human immunodeficiency virus 1
  source 1..10: note = HLAs: B0702 B0705 B4002 B40114 B4016 B4101 B4102 B4201 B5501 B5502 B5601 B5610
GPENPYNTPV

SEQ ID NO: 369 - protein, 11 aa, Human immunodeficiency virus 1
  source 1..11: note = HLAs: B0702 B3501 B3508 B4201 B5604 B5610
GPENPYNTPVF

SEQ ID NO: 370 - protein, 9 aa, Human immunodeficiency virus 1
  source 1..9: note = HLAs: B0702 B1502 B1508 B1511 B1521 B1525 B1531 B3501 B3505 B3508 B3532 B3541 B3543 B4201 B5501 B5604 B5610 C1202
GPKEPFRDY

SEQ ID NO: 371 - protein, 10 aa, Human immunodeficiency virus 1
  source 1..10: note = HLAs: B0702 B4201 B5501 B5502 B5601 B5610
GPKEPFRDYV

SEQ ID NO: 372 - protein, 9 aa, Human immunodeficiency virus 1
  source 1..9: note = HLAs: B0702 B0705 B0801 B4201 B4202 B5501 B5502 B5601 B5604 B5610 B6701 B8101 B8103
GPKVKQWPL

SEQ ID NO: 373 - protein, 8 aa, Human immunodeficiency virus 1
  source 1..8: note = HLAs: B0702 B4201 B5108 B5501 B5502 B5601 B5610
GPTPVNII

SEQ ID NO: 374 - protein, 9 aa, Human immunodeficiency virus 1
  source 1..9: note = HLAs: B5501 B5502 B5601 B5610
GPTPVNIIG

SEQ ID NO: 375 - protein, 10 aa, Human immunodeficiency virus 1
  source 1..10: note = HLAs: A3401
GPTPVNIIGR

SEQ ID NO: 376 - protein, 11 aa, Human immunodeficiency virus 1
  source 1..11: note = HLAs: B1301 B1302
GQMREPRGSDI

SEQ ID NO: 377 - protein, 9 aa, Human immunodeficiency virus 1
  source 1..9: note = HLAs: A0201 A0202 A0203 A0204 A0205 A0206 A0207 A0211 A0214 A02264 A0230 B1301 B1302 B1303 B1503 B15220 B1525 B3701 B3801 B3802 B3906 B4002 B4701 B4901 B5201
GQVDCSPGI

SEQ ID NO: 378 - protein, 10 aa, Human immunodeficiency virus 1
  source 1..10: note = HLAs: A3201 B1301 B1302 B1303 B1501 B1502 B1503 B15220 B1524 B1525 B1531 B4402 B4403 B4404 B4407 B4427 B4701 B5701 B5702 B5703 B5704 B5802
GQVDCSPGIW

SEQ ID NO: 379 - protein, 9 aa, Human immunodeficiency virus 1
  source 1..9: note = HLAs: B1501 B1503 B15220 B1525
GQVRDQAEH

SEQ ID NO: 380 - protein, 10 aa, Human immunodeficiency virus 1
  source 1..10: note = HLAs: B1301 B1302 B1303 B3802 B4002 B4701
GQVRDQAEHL

SEQ ID NO: 381 - protein, 11 aa, Human immunodeficiency virus 1
  source 1..11: note = HLAs: B2705
GQVRDQAEHLK

SEQ ID NO: 382 - protein, 11 aa, Human immunodeficiency virus 1
  source 1..11: note = HLAs: A3601 B5702 B5703 C0102 C0103 C0144 C0202 C0210 C0229 C0303 C0304 C0305 C0401 C0403 C0404 C0407 C0501 C0509 C0704 C0801 C0802 C0803 C0804 C0812 C1202 C1502 C1504 C1505 C1509 C1601 C1602 C16112 C1646 C17 C1701 C1702 C1703 C1704 C1705 C1706 C1707 C1801 C1802
GSDIAGTTSTL

SEQ ID NO: 383 - protein, 9 aa, Human immunodeficiency virus 1
  source 1..9: note = HLAs: A0101 A0109 A3601
GSDLEIGQH

SEQ ID NO: 384 - protein, 10 aa, Human immunodeficiency virus 1
  source 1..10: note = HLAs: A3601 A6801 A7404 C0202 C0210 C0229 C0303 C1602 C1646
GSDLEIGQHR

SEQ ID NO: 385 - protein, 10 aa, Human immunodeficiency virus 1
  source 1..10: note = HLAs: B0702 B0705 B1517 B4201 B5610 B6701 C0102 C0144 C1601 C16112
GSPAIFQSSM

SEQ ID NO: 386 - protein, 10 aa, Human immunodeficiency virus 1
  source 1..10: note = HLAs: A0203 A0205 A0206 A02264 A6802 A6827
GTVLVGPTPV

SEQ ID NO: 387 - protein, 8 aa, Human immunodeficiency virus 1
  source 1..8: note = HLAs: A3402 A3601 C0303
GVGGPGHK

SEQ ID NO: 388 - protein, 9 aa, Human immunodeficiency virus 1
  source 1..9: note = HLAs: A0205 C1202
GVGGPGHKA

SEQ ID NO: 389 - protein, 10 aa, Human immunodeficiency virus 1
  source 1..10: note = HLAs: A0302 A1101 A1102 A3101 A3104 A3303 A3401 A3402 A6601 A6602 A6603 A6801 A7401 A7402 A7403 A7404 A7405 A7408 A7409 A7411 A7413 C0303 C1202 C1602
GVGGPGHKAR

SEQ ID NO: 390 - protein, 8 aa, Human immunodeficiency virus 1
  source 1..8: note = HLAs: A3402 C0303
GVVESMNK

SEQ ID NO: 391 - protein, 10 aa, Human immunodeficiency virus 1
  source 1..10: note = HLAs: A0205 B1301 C0202 C0210 C0229 C1202 C1505 C1701 C1702 C1703 C1704 C1705 C1706
GVVESMNKEL

SEQ ID NO: 392 - protein, 11 aa, Human immunodeficiency virus 1
  source 1..11: note = HLAs: A0301 A0302 A0305 A1101 A1102 A3402 A3601 A7401 A7402 A7403 A7404 A7405 A7408 A7409 A7411 A7413 C0303 C1602 C1646
GVVESMNKELK

SEQ ID NO: 393 - protein, 9 aa, Human immunodeficiency virus 1
  source 1..9: note = HLAs: A2301 A2402 A2403 A2407 A2410 A2464 B1525 C0702 C0705 C1402 C1403
GWKGSPAIF

SEQ ID NO: 394 - protein, 9 aa, Human immunodeficiency virus 1
  source 1..9: note = HLAs: A2301 A2402 A2403 A2407 A2464 B5701 B5704
GYELHPDKW

SEQ ID NO: 395 - protein, 11 aa, Human immunodeficiency virus 1
  source 1..11: note = HLAs: A0202 A0211
GYELHPDKWTV

SEQ ID NO: 396 - protein, 9 aa, Human immunodeficiency virus 1
  source 1..9: note = HLAs: A2402 A2407 C1402 C1403
GYSAGERII

SEQ ID NO: 397 - protein, 8 aa, Human immunodeficiency virus 1
  source 1..8: note = HLAs: B1802 B4402 B4403 B4404 B4407 B4427
HEKYHSNW

SEQ ID NO: 398 - protein, 9 aa, Human immunodeficiency virus 1
  source 1..9: note = HLAs: A3301 A3303 A3305
HEKYHSNWR

SEQ ID NO: 399 - protein, 10 aa, Human immunodeficiency virus 1
  source 1..10: note = HLAs: B4006 B4101 B4501 B4507 B5001
HEKYHSNWRA

SEQ ID NO: 400 - protein, 11 aa, Human immunodeficiency virus 1
  source 1..11: note = HLAs: B4002 B4006 B4102 C1402 C1403
HEKYHSNWRAM

SEQ ID NO: 401 - protein, 10 aa, Human immunodeficiency virus 1
  source 1..10: note = HLAs: A0206
HGQVDCSPGI

SEQ ID NO: 402 - protein, 11 aa, Human immunodeficiency virus 1
  source 1..11: note = HLAs: B5701 B5702 B5703 B5704 B5801 B5802
HGQVDCSPGIW

SEQ ID NO: 403 - protein, 9 aa, Human immunodeficiency virus 1
  source 1..9: note = HLAs: A3402 C0303 C1602
HGVYYDPSK

SEQ ID NO: 404 - protein, 11 aa, Human immunodeficiency virus 1
  source 1..11: note = HLAs: C1402 C1403
HGVYYDPSKDL

SEQ ID NO: 405 - protein, 9 aa, Human immunodeficiency virus 1
  source 1..9: note = HLAs: B3906 B7301
HKARVLAEA

SEQ ID NO: 406 - protein, 10 aa, Human immunodeficiency virus 1
  source 1..10: note = HLAs: B1503 B15220
HKARVLAEAM

SEQ ID NO: 407 - protein, 8 aa, Human immunodeficiency virus 1
  source 1..8: note = HLAs: B0801 C0704
HLEGKIIL

SEQ ID NO: 408 - protein, 9 aa, Human immunodeficiency virus 1
  source 1..9: note = HLAs: A0201 A0202 A0203 A0204 A0205 A0206 A0207 A0211 A0214 A02264 A0230 A7404 B0801 B1301 B1302 B1303 B5201 C0102 C0144 C0401 C0403 C0404 C0407 C0501 C0509 C0704 C0801 C0802 C0803 C0812 C1502 C1505 C1602 C1646 C17 C1701 C1702 C1703 C1704 C1705 C1706 C1707 C1801 C1802
HLEGKIILV

SEQ ID NO: 409 - protein, 10 aa, Human immunodeficiency virus 1
  source 1..10: note = HLAs: B4101
HLEGKIILVA

SEQ ID NO: 410 - protein, 11 aa, Human immunodeficiency virus 1
  source 1..11: note = HLAs: A0211
HLEGKIILVAV

SEQ ID NO: 411 - protein, 8 aa, Human immunodeficiency virus 1
  source 1..8: note = HLAs: B0801 B1525
HLKTAVQM

SEQ ID NO: 412 - protein, 9 aa, Human immunodeficiency virus 1
  source 1..9: note = HLAs: A0203 A02264 A3001
HLKTAVQMA

SEQ ID NO: 413 - protein, 10 aa, Human immunodeficiency virus 1
  source 1..10: note = HLAs: A0201 A0202 A0203 A0204 A0205 A0211 A02264 A0230
HLKTAVQMAV

SEQ ID NO: 414 - protein, 11 aa, Human immunodeficiency virus 1
  source 1..11: note = HLAs: B1501 B1502 B1517 B1525 B1527
HLKTAVQMAVF

SEQ ID NO: 415 - protein, 9 aa, Human immunodeficiency virus 1
  source 1..9: note = HLAs: A0201 A0202 A0203 A0204 A0205 A0206 A0207 A0211 A0214 A02264 A0230 B1301 B1302 B1303 B1502 B1503 B15220 B1525 B1531 B5201 C0102 C0144 C0202 C0210 C0229 C0302 C0303 C0304 C0305 C0317 C0602 C0704 C0801 C0803 C0804 C1202 C1203 C1402 C1403 C1502 C1504 C1505 C1509 C1601 C1602 C1604 C16112 C1646 C17 C1701 C1702 C1703 C1704 C1705 C1706 C1707
HLVWASREL

SEQ ID NO: 416 - protein, 9 aa, Human immunodeficiency virus 1
  source 1..9: note = HLAs: B1401 B1402
HNFKRKGGI

SEQ ID NO: 417 - protein, 9 aa, Human immunodeficiency virus 1
  source 1..9: note = HLAs: A3401 A3402
HPAGLKKKK

SEQ ID NO: 418 - protein, 10 aa, Human immunodeficiency virus 1
  source 1..10: note = HLAs: B5501 B5502 B5601
HPAGLKKKKS

SEQ ID NO: 419 - protein, 11 aa, Human immunodeficiency virus 1
  source 1..11: note = HLAs: B0702 B0705 B4201 B4202 B5501 B5502 B5601 B5604 B5610
HPAGLKKKKSV

SEQ ID NO: 420 - protein, 9 aa, Human immunodeficiency virus 1
  source 1..9: note = HLAs: B5501 B5502 B5601 B5610
HPDKWTVQP

SEQ ID NO: 421 - protein, 10 aa, Human immunodeficiency virus 1
  source 1..10: note = HLAs: B0702 B0705 B3503 B3508 B3910 B4201 B4202 B5105 B5108 B5109 B5501 B5502 B5601 B5604 B5610 B6701
HPDKWTVQPI

SEQ ID NO: 422 - protein, 8 aa, Human immunodeficiency virus 1
  source 1..8: note = HLAs: B0702 B0705 B3503 B3910 B4201 B5101 B5102 B5108 B5109 B5501 B5502 B5601 B5604 B5610 B6701
HPVHAGPI

SEQ ID NO: 423 - protein, 8 aa, Human immunodeficiency virus 1
  source 1..8: note = HLAs: B1301 B1302 B1303 B1401 B1402 B1510 B1537 B3701 B3801 B3802 B3906 B3924 B4102 B5107 B5201 C0704
HQAAMQML

SEQ ID NO: 424 - protein, 9 aa, Human immunodeficiency virus 1
  source 1..9: note = HLAs: A0301 A0302 A0305 A1101 A1102 A3001 A3009 A3101 A3104 A3401 A3402 A3601 A6801 A74 A7401 A7402 A7403 A7404 A7405 A7408 A7409 A7411 A7413 B2705 B4701
HQAAMQMLK

SEQ ID NO: 425 - protein, 8 aa, Human immunodeficiency virus 1
  source 1..8: note = HLAs: B1301 B1302 B1303 B1401 B1402 B1403 B1502 B1503 B1510 B15220 B1525 B1537 B3701 B3801 B3802 B3901 B3906 B3924 B4102 B5107 B5201 C0702 C0704 C0705 C1202
HQKEPPFL

SEQ ID NO: 426 - protein, 9 aa, Human immunodeficiency virus 1
  source 1..9: note = HLAs: A3004 A3009 A3201 B1301 B1302 B1303 B1501 B1502 B1503 B1516 B1517 B1518 B15220 B1524 B1525 B1531 B2702 B3801 B3802 B4402 B4403 B4404 B4407 B4427 B4701 B4703 B5301 B5701 B5702 B5703 B5704 B5801 B5802 C0701 C0702 C0705 C0706 C0718 C1202
HQKEPPFLW

SEQ ID NO: 427 - protein, 10 aa, Human immunodeficiency virus 1
  source 1..10: note = HLAs: B1301 B1501 B1503 B15220 B1525
HQKEPPFLWM

SEQ ID NO: 428 - protein, 9 aa, Human immunodeficiency virus 1
  source 1..9: note = HLAs: A3101 A3104 A3301 A3303 A3305 A3401 A3402 A6601 A6602 A6603 A6801 A7401 A7402 A7403 A7404 A7405 A7408 A7409 A7411 A7413 B2705 B4701 C0303
HQMKDCTER

SEQ ID NO: 429 - protein, 11 aa, Human immunodeficiency virus 1
  source 1..11: note = HLAs: B1302
HQMKDCTERQA

SEQ ID NO: 430 - protein, 9 aa, Human immunodeficiency virus 1
  source 1..9: note = HLAs: A3001
HSNWRAMAS

SEQ ID NO: 431 - protein, 8 aa, Human immunodeficiency virus 1
  source 1..8: note = HLAs: A3601 C0202 C0210 C0229 C0401 C0403 C0407 C0501 C0509 C0801 C0802 C0803 C0804 C0812 C1504 C1505 C1509 C1601 C1602 C16112 C1646 C17 C1701 C1702 C1703 C1704 C1705 C1706
HTDNGSNF

SEQ ID NO: 432 - protein, 9 aa, Human immunodeficiency virus 1
  source 1..9: note = HLAs: A0101 A0109 A3601 C0403 C0501 C0509
HTDNGSNFT

SEQ ID NO: 433 - protein, 10 aa, Human immunodeficiency virus 1
  source 1..10: note = HLAs: A0101 A0109 A3601
HTDNGSNFTS

SEQ ID NO: 434 - protein, 8 aa, Human immunodeficiency virus 1
  source 1..8: note = HLAs: C0102 C0144 C0202 C0210 C0214 C0217 C0229 C0302 C0303 C0304 C0305 C0317 C0403 C0501 C0509 C0602 C0704 C0801 C0803 C0804 C0812 C1202 C1203 C1502 C1504 C1505 C1509 C1601 C1602 C1604 C16112 C1646 C17 C1701 C1702 C1703 C1704 C1705 C1706 C1707
HTNDVKQL

SEQ ID NO: 435 - protein, 9 aa, Human immunodeficiency virus 1
  source 1..9: note = HLAs: A0202 A0203 A0205 A0206 A0214 A02264 A6802 A6827 A6901 B5401 B5501 B5502 B5601 B5610 C0801 C0803 C1202
HVASGYIEA

SEQ ID NO: 436 - protein, 11 aa, Human immunodeficiency virus 1
  source 1..11: note = HLAs: A6802 A6827
HVASGYIEAEV

SEQ ID NO: 437 - protein, 8 aa, Human immunodeficiency virus 1
  source 1..8: note = HLAs: B4601 B5101 B5107 B5108 B5109 B5201 C0102 C0103 C0144 C0202 C0210 C0214 C0217 C0229 C0302 C0303 C0304 C0305 C0317 C0403 C0501 C0509 C0602 C0702 C0704 C0705 C0801 C0802 C0803 C0804 C0812 C1202 C1203 C1502 C1504 C1505 C1509 C1601 C1602 C1604 C16112 C1646 C17 C1701 C1702 C1703 C1704 C1705 C1706 C1707
IAGTTSTL

SEQ ID NO: 438 - protein, 8 aa, Human immunodeficiency virus 1
  source 1..8: note = HLAs: A3402 A3601 C0303 C1202 C1601 C1602 C16112 C1646
IATDIQTK

SEQ ID NO: 439 - protein, 10 aa, Human immunodeficiency virus 1
  source 1..10: note = HLAs: B5703 C0102 C0103 C0144 C0202 C0210 C0214 C0217 C0229 C0302 C0303 C0304 C0305 C0317 C0403 C0501 C0509 C0704 C0801 C0802 C0803 C0804 C0812 C1202 C1203 C1502 C1504 C1505 C1509 C1601 C1602 C1604 C16112 C1646 C17 C1701 C1702 C1703 C1704 C1705 C1706 C1707
IATDIQTKEL

SEQ ID NO: 440 - protein, 8 aa, Human immunodeficiency virus 1
  source 1..8: note = HLAs: B3701 B4002 B4102
IDIIATDI

SEQ ID NO: 441 - protein, 11 aa, Human immunodeficiency virus 1
  source 1..11: note = HLAs: A0101 A0102 A0109 A3601
IDKAQEEHEKY

SEQ ID NO: 442 - protein, 8 aa, Human immunodeficiency virus 1
  source 1..8: note = HLAs: B4002 B4006 B40114 B4101 B4102 B4415 B4501 B4507 B4901 B5001
IEAEVIPA

SEQ ID NO: 443 - protein, 9 aa, Human immunodeficiency virus 1
  source 1..9: note = HLAs: B4002 B4006 B40114 B4101 B4102 B4501 B4507 B4901 B5001
IEAEVIPAE

SEQ ID NO: 444 - protein, 10 aa, Human immunodeficiency virus 1
  source 1..10: note = HLAs: B4002 B4006 B40114 B4101 B4102 B4415 B4501 B4507 B4901 B5001
IEAEVIPAET

SEQ ID NO: 445 - protein, 11 aa, Human immunodeficiency virus 1
  source 1..11: note = HLAs: B4006 B4101 B4501 B4507 B5001
IEAEVIPAETG

SEQ ID NO: 446 - protein, 8 aa, Human immunodeficiency virus 1
  source 1..8: note = HLAs: B1802 B3701 B4002 B4006 B40114 B4016 B4101 B4102 B4901 B5001 C0704
IEELREHL

SEQ ID NO: 447 - protein, 9 aa, Human immunodeficiency virus 1
  source 1..9: note = HLAs: B1401 B1402 B1403 B1801 B1802 B1803 B3701 B3801 B3802 B4001 B4002 B4006 B40114 B4016 B4101 B4102 B4402 B4403 B4404 B4405 B4407 B4415 B4427 B4501 B4507 B4701 B4901 B5001 C0704
IEELREHLL

SEQ ID NO: 448 - protein, 8 aa, Human immunodeficiency virus 1
  source 1..8: note = HLAs: B1801 B1802 B1803 B3701 B4001 B4002 B4006 B40114 B4016 B4101 B4102 B4402 B4403 B4405 B4407 B4415 B4427 B4901 B5001 B5107 B5201 C0704
IETVPVKL

SEQ ID NO: 449 - protein, 9 aa, Human immunodeficiency virus 1
  source 1..9: note = HLAs: A3402 B4701 C0303
IETVPVKLK

SEQ ID NO: 450 - protein, 9 aa, Human immunodeficiency virus 1
  source 1..9: note = HLAs: A0302 A1101 A1102 A3402 A3601 C0303 C1202 C1601 C1602 C16112 C1646
IGGIGGFIK

SEQ ID NO: 451 - protein, 9 aa, Human immunodeficiency virus 1
  source 1..9: note = HLAs: A3601 C0303 C1202 C1602
IGGNEQVDK

SEQ ID NO: 452 - protein, 9 aa, Human immunodeficiency virus 1
  source 1..9: note = HLAs: A3401 C0303
IGGYSAGER

SEQ ID NO: 453 - protein, 9 aa, Human immunodeficiency virus 1
  source 1..9: note = HLAs: B1401 B1402 B1503 B1510 B1518 B1521 B15220 B1537 B3801 B3802 B3901 B3905 B3909 B3924 C0702 C0704 C0705 C1402 C1403
IHTDNGSNF

SEQ ID NO: 454 - protein, 9 aa, Human immunodeficiency virus 1
  source 1..9: note = HLAs: A0301 A0302 A0305 A1101 A1102 A3401 A3402 A3601 A6601 A6602 A6603 A6801 A7401 A7402 A7403 A7404 A7405 A7408 A7409 A7411 A7413 C0202 C0210 C0214 C0229 C0302 C0303 C0602 C1202 C1504 C1509 C1601 C1602 C16112 C1646
IIATDIQTK

SEQ ID NO: 455 - protein, 8 aa, Human immunodeficiency virus 1
  source 1..8: note = HLAs: A3402 A3601 C0303 C1602 C1646
IIEQLIKK

SEQ ID NO: 456 - protein, 8 aa, Human immunodeficiency virus 1
  source 1..8: note = HLAs: B5201
IILGLNKI

SEQ ID NO: 457 - protein, 9 aa, Human immunodeficiency virus 1
  source 1..9: note = HLAs: A0202 A0203 A0204 A0205 A0211 A02264 B1302 B5201
IILGLNKIV

SEQ ID NO: 458 - protein, 10 aa, Human immunodeficiency virus 1
  source 1..10: note = HLAs: A3101 A3104 A3301 A3303 A3305 A3401 A3402 A6602 A6603 A6801 A7401 A7402 A7403 A7404 A7405 A7408 A7409 A7411
IILGLNKIVR

SEQ ID NO: 459 - protein, 9 aa, Human immunodeficiency virus 1
  source 1..9: note = HLAs: A0205 A0206 A0211
IILVAVHVA

SEQ ID NO: 460 - protein, 8 aa, Human immunodeficiency virus 1
  source 1..8: note = HLAs: C0303
IIQAQPDK

SEQ ID NO: 461 - protein, 9 aa, Human immunodeficiency virus 1
  source 1..9: note = HLAs: B0702 B0801 B1501 B1502 B1525 B1531 B4201 B4601 C0102 C0103 C0144 C0202 C0210 C0214 C0217 C0229 C0302 C0303 C0304 C0305 C0317 C0602 C0702 C0704 C0705 C0801 C0803 C0812 C1202 C1203 C1402 C1403 C1502 C1504 C1505 C1509 C1601 C1602 C1604 C16112 C1646 C17 C1701 C1702 C1703 C1704 C1705 C1706 C1707
IIRDYGKQM

SEQ ID NO: 462 - protein, 8 aa, Human immunodeficiency virus 1
  source 1..8: note = HLAs: B0801
IKKEKVYL

SEQ ID NO: 463 - protein, 9 aa, Human immunodeficiency virus 1
  source 1..9: note = HLAs: B5701
IKKKDSTKW

SEQ ID NO: 464 - protein, 9 aa, Human immunodeficiency virus 1
  source 1..9: note = HLAs: A0301 A0302 A0305 A1101 A1102 A3402 A3601 A7404 C0303 C1602
ILDIRQGPK

SEQ ID NO: 465 - protein, 9 aa, Human immunodeficiency virus 1
  source 1..9: note = HLAs: A3101 A3104 A3303 A7401 A7402 A7403 A7404 A7405 A7408 A7409 A7411 A7413
ILGLNKIVR

SEQ ID NO: 466 - protein, 10 aa, Human immunodeficiency virus 1
  source 1..10: note = HLAs: A0211
ILGLNKIVRM

SEQ ID NO: 467 - protein, 9 aa, Human immunodeficiency virus 1
  source 1..9: note = HLAs: A0201 A0202 A0203 A0204 A0205 A0206 A0207 A0211 A0214 A02264 A0230 A6802 A6827 A7404 B0801 B1302 B1303 B1525 B5201 C0102 C0144 C0202 C0210 C0214 C0229 C0305 C0602 C0704 C0801 C0803 C1202 C1203 C1502 C1504 C1505 C1509 C1601 C1602 C1604 C16112 C1646 C17 C1701 C1702 C1703 C1704 C1705 C1706
ILKEPVHGV

SEQ ID NO: 468 - protein, 10 aa, Human immunodeficiency virus 1
  source 1..10: note = HLAs: A0203 A0211 A02264 A2901 A2902 A2911 A3002 A3004 A3009 A3010 A3601 A7410 A8001 B1501 B1502 B1503 B1511 B1512 B1521 B15220 B1524 B1525 B1527 B1531 B1532 B4601 C0202 C0210 C0214 C0229 C0302 C1202 C1203 C1504 C1509 C1601 C1602 C1604 C16112 C1646
ILKEPVHGVY

SEQ ID NO: 469 - protein, 11 aa, Human immunodeficiency virus 1
  source 1..11: note = HLAs: A2901 A2902 A2911 A3002 A3004 A3009 A3010 A3601 A7410 B1501 B1502 B1503 B1512 B15220 B1525 B1527 B1531 B1532 C0202 C0210 C0229 C0302 C1202 C1602
ILKEPVHGVYY

SEQ ID NO: 470 - protein, 8 aa, Human immunodeficiency virus 1
  source 1..8: note = HLAs: B5701
ILKLAGRW

SEQ ID NO: 471 - protein, 10 aa, Human immunodeficiency virus 1
  source 1..10: note = HLAs: A0201 A0202 A0203 A0204 A0205 A0206 A0211 A0214 A02264 A0230
ILKLAGRWPV

SEQ ID NO: 472 - protein, 11 aa, Human immunodeficiency virus 1
  source 1..11: note = HLAs: B1501 B1502 B1525
ILVAVHVASGY

SEQ ID NO: 473 - protein, 8 aa, Human immunodeficiency virus 1
  source 1..8: note = HLAs: B5701 B5704
INEEAAEW

SEQ ID NO: 474 - protein, 10 aa, Human immunodeficiency virus 1
  source 1..10: note = HLAs: A3104
INLPGKWKPK

SEQ ID NO: 475 - protein, 9 aa, Human immunodeficiency virus 1
  source 1..9: note = HLAs: A3101 A3303 A3401 A3601 A6602 C0303 C0602 C1202 C1602 C1646
INNETPGIR

SEQ ID NO: 476 - protein, 10 aa, Human immunodeficiency virus 1
  source 1..10: note = HLAs: A0101 A0102 A0109 A2901 A2902 A2911 A3002 A3004 A3009 A3010 A3601 B1502 B1525 C1202 C1504 C1509 C1602
INNETPGIRY

SEQ ID NO: 477 - protein, 9 aa, Human immunodeficiency virus 1
  source 1..9: note = HLAs: B0702 B3501 B3503 B3505 B3508 B3532 B3541 B4201 B5105 B5108 B5109 B5401 B5501 B5502 B5601 B5604 B5610 B6701
IPAETGQET

SEQ ID NO: 478 - protein, 10 aa, Human immunodeficiency virus 1
  source 1..10: note = HLAs: B0702 B3501 B3503 B3508 B4201 B5108 B5401 B5501 B5502 B5601 B5604 B5610 B6701
IPAETGQETA

SEQ ID NO: 479 - protein, 11 aa, Human immunodeficiency virus 1
  source 1..11: note = HLAs: B1502 B1508 B1511 B1518 B1521 B1525 B1531 B3501 B3502 B3503 B3505 B3508 B3512 B3532 B3541 B3543 B4201 B5301 B5501 B5502 B5601 B5604 B5610 C1202
IPAETGQETAY

SEQ ID NO: 480 - protein, 10 aa, Human immunodeficiency virus 1
  source 1..10: note = HLAs: B4101
IPEWEFVNTP

SEQ ID NO: 481 - protein, 9 aa, Human immunodeficiency virus 1
  source 1..9: note = HLAs: A3401 A3402 A6602 A6801 B0702 B3501 B3505 B4201 B5501 B5502 B5601 B5604 B5610 C0303 C1602
IPHPAGLKK

SEQ ID NO: 482 - protein, 10 aa, Human immunodeficiency virus 1
  source 1..10: note = HLAs: B5502 B5601
IPHPAGLKKK

SEQ ID NO: 483 - protein, 9 aa, Human immunodeficiency virus 1
  source 1..9: note = HLAs: B3541 B5501 B5502 B5601 B5610
IPMFSALSE

SEQ ID NO: 484 - protein, 10 aa, Human immunodeficiency virus 1
  source 1..10: note = HLAs: B5502 B5601
IPMFSALSEG

SEQ ID NO: 485 - protein, 11 aa, Human immunodeficiency virus 1
  source 1..11: note = HLAs: B0705 B5401 B5501 B5502 B5601 B5610
IPMFSALSEGA

SEQ ID NO: 486 - protein, 9 aa, Human immunodeficiency virus 1
  source 1..9: note = HLAs: B5501 B5502 B5601
IPSINNETP

SEQ ID NO: 487 - protein, 11 aa, Human immunodeficiency virus 1
  source 1..11: note = HLAs: B0702 B3503 B4201 B5105 B5108 B5501 B5502 B5601 B5604 B5610
IPSINNETPGI

SEQ ID NO: 488 - protein, 9 aa, Human immunodeficiency virus 1
  source 1..9: note = HLAs: A3301 A3303 A3305 A3401 A3402 A6601 A6602 A6603 A6801
IPVGEIYKR

SEQ ID NO: 489 - protein, 10 aa, Human immunodeficiency virus 1
  source 1..10: note = HLAs: B5301 B5701 B5703 B5704 B5802
IPVGEIYKRW

SEQ ID NO: 490 - protein, 9 aa, Human immunodeficiency virus 1
  source 1..9: note = HLAs: B5401 B5501 B5502 B5601 B5610
IPYNPQSQG

SEQ ID NO: 491 - protein, 10 aa, Human immunodeficiency virus 1
  source 1..10: note = HLAs: B0702 B0705 B3503 B4201 B5101 B5102 B5105 B5108 B5109 B5401 B5501 B5502 B5601 B5604 B5610 B6701 B7801
IPYNPQSQGV

SEQ ID NO: 492 - protein, 11 aa, Human immunodeficiency virus 1
  source 1..11: note = HLAs: B0702 B0705 B3503 B4201 B5101 B5102 B5105 B5108 B5109 B5401 B5501 B5502 B5601 B5604 B5610 B6701
IPYNPQSQGVV

SEQ ID NO: 493 - protein, 8 aa, Human immunodeficiency virus 1
  source 1..8: note = HLAs: B1302 B1303 B1401 B1402 B1501 B1502 B1503 B15220 B1525 B5107 B5201 C0704
IQKLVGKL

SEQ ID NO: 494 - protein, 10 aa, Human immunodeficiency virus 1
  source 1..10: note = HLAs: A3201 B1524 B4427 B5701 B5703 B5704 B5802
IQKLVGKLNW

SEQ ID NO: 495 - protein, 11 aa, Human immunodeficiency virus 1
  source 1..11: note = HLAs: A0203 A02264
IQKLVGKLNWA

SEQ ID NO: 496 - protein, 8 aa, Human immunodeficiency virus 1
  source 1..8: note = HLAs: A2902 A2911 A3002 B1501 B1502 B1503 B15220 B1525
IQNFRVYY

SEQ ID NO: 497 - protein, 9 aa, Human immunodeficiency virus 1
  source 1..9: note = HLAs: A0302 A1101 A1102 A3101 A3104 A3301 A3303 A3305 A3401 A3402 A6801 A74 A7401 A7402 A7403 A7404 A7405 A7406 A7407 A7408 A7409 A7411 A7413
IQNFRVYYR

SEQ ID NO: 498 - protein, 10 aa, Human immunodeficiency virus 1
  source 1..10: note = HLAs: A3101 A3104
IQNFRVYYRD

SEQ ID NO: 499 - protein, 11 aa, Human immunodeficiency virus 1
  source 1..11: note = HLAs: A3104
IQNFRVYYRDS

SEQ ID NO: 500 - protein, 8 aa, Human immunodeficiency virus 1
  source 1..8: note = HLAs: C0303
IQTKELQK

SEQ ID NO: 501 - protein, 10 aa, Human immunodeficiency virus 1
  source 1..10: note = HLAs: B1301 B1302 B1303
IQTKELQKQI

SEQ ID NO: 502 - protein, 8 aa, Human immunodeficiency virus 1
  source 1..8: note = HLAs: C0701 C0702 C0704 C0705 C0706 C0718
IRDYGKQM

SEQ ID NO: 503 - protein, 9 aa, Human immunodeficiency virus 1
  source 1..9: note = HLAs: B3906 B7301
IRDYGKQMA

SEQ ID NO: 504 - protein, 10 aa, Human immunodeficiency virus 1
  source 1..10: note = HLAs: B2707
IRKVLFLDGI

SEQ ID NO: 505 - protein, 9 aa, Human immunodeficiency virus 1
  source 1..9: note = HLAs: B2702 B2703 B2704 B2705
IRLRPGGKK

SEQ ID NO: 506 - protein, 10 aa, Human immunodeficiency virus 1
  source 1..10: note = HLAs: B2702 B2703 B2704 B2705
IRLRPGGKKK

SEQ ID NO: 507 - protein, 11 aa, Human immunodeficiency virus 1
  source 1..11: note = HLAs: B2702 B2703 B2704 B2705 B2707 C0701 C0702 C0705 C0706 C0718
IRLRPGGKKKY

SEQ ID NO: 508 - protein, 9 aa, Human immunodeficiency virus 1
  source 1..9: note = HLAs: B1401 B1402 B1403 B1503 B1518 B15220 B2702 B2703 B2704 B2705 B2706 B2707 B3802 B3924 C0214 C0602 C0701 C0702 C0704 C0705 C0706 C0718
IRQGPKEPF

SEQ ID NO: 509 - protein, 10 aa, Human immunodeficiency virus 1
  source 1..10: note = HLAs: A3104 B2702 B2704 B2705
IRQGPKEPFR

SEQ ID NO: 510 - protein, 8 aa, Human immunodeficiency virus 1
  source 1..8: note = HLAs: B1401 B1402 B1403 B2706 B2707 B3924 C0602 C0701 C0702 C0704 C0705 C0706 C0718
IRYQYNVL

SEQ ID NO: 511 - protein, 9 aa, Human immunodeficiency virus 1
  source 1..9: note = HLAs: B3906 B7301
IRYQYNVLP

SEQ ID NO: 512 - protein, 10 aa, Human immunodeficiency virus 1
  source 1..10: note = HLAs: A3002 A3009 A3010 A3601 B1501 B1502 B1503 B1517 B15220 B1525 B1531 B1532 C0202 C0210 C0229 C0302 C1202 C1203 C1504 C1509 C1601 C1602 C1604 C16112 C1646
ISKIGPENPY

SEQ ID NO: 513 - protein, 9 aa, Human immunodeficiency virus 1
  source 1..9: note = HLAs: A0204 A0205 A0206 A0207 A0211 A0214 A6802 A6827 B5101 B5107 B5108 B5109 B5201 C0102 C0103 C0144 C0202 C0210 C0229 C0302 C0303 C0304 C0305 C0317 C0403 C0501 C0509 C0704 C0801 C0802 C0803 C0804 C0812 C1202 C1203 C1502 C1504 C1505 C1509 C1601 C1602 C1604 C16112 C1646 C17 C1701 C1702 C1703 C1704 C1705 C1706 C1707
ISPIETVPV

SEQ ID NO: 514 - protein, 10 aa, Human immunodeficiency virus 1
  source 1..10: note = HLAs: A1101 A1102 A3402 A3601 C0303 C1602 C1646
ISPIETVPVK

SEQ ID NO: 515 - protein, 11 aa, Human immunodeficiency virus 1
  source 1..11: note = HLAs: B5702 B5703 C0102 C0144 C1505 C1602 C1646 C17 C1701 C1702 C1703 C1704 C1705 C1706
ISPIETVPVKL

SEQ ID NO: 516 - protein, 8 aa, Human immunodeficiency virus 1
  source 1..8: note = HLAs: A3101 A3104 A3303
ITKIQNFR

SEQ ID NO: 517 - protein, 9 aa, Human immunodeficiency virus 1
  source 1..9: note = HLAs: A3001 B5802
ITKIQNFRV

SEQ ID NO: 518 - protein, 10 aa, Human immunodeficiency virus 1
  source 1..10: note = HLAs: A3002 A3009 A3010 A3601 B1501 B1503 B1517 B15220 B1525 B5701 C0302 C1504 C1509
ITKIQNFRVY

SEQ ID NO: 519 - protein, 11 aa, Human immunodeficiency virus 1
  source 1..11: note = HLAs: A2901 A2902 A2911 A3002 A3009 A3601
ITKIQNFRVYY

SEQ ID NO: 520 - protein, 9 aa, Human immunodeficiency virus 1
  source 1..9: note = HLAs: A0204 A0205 A0206 A0211 A0214 A3001 A6802 A6827 B1517 B5703 B5802 C1502 C1505 C1602 C1646
ITLWQRPLV

SEQ ID NO: 521 - protein, 10 aa, Human immunodeficiency virus 1
  source 1..10: note = HLAs: A0205
IVASCDKCQL

SEQ ID NO: 522 - protein, 11 aa, Human immunodeficiency virus 1
  source 1..11: note = HLAs: A0301 A0302 A0305 A1101 A1102 A3303 A3401 A3402 A3601 A6601 A6602 A6603 A6801 A7401 A7402 A7403 A7404 A7405 A7408 A7409 A7411 A7413 C0303 C1202 C1602 C1646
IVASCDKCQLK

SEQ ID NO: 523 - protein, 9 aa, Human immunodeficiency virus 1
  source 1..9: note = HLAs: A0301 A0302 A0305 A1101 A1102 A3001 A3101 A3104 A3303 A3401 A3402 A3601 A6601 A6602 A6603 A6801 A74 A7401 A7402 A7403 A7404 A7405 A7407 A7408 A7409 A7411 A7413 C0303
IVIWGKTPK

SEQ ID NO: 524 - protein, 10 aa, Human immunodeficiency virus 1
  source 1..10: note = HLAs: A3201 B1501 B1502 B1517 B1525 B1531 B5703 C1202
IVIWGKTPKF

SEQ ID NO: 525 - protein, 11 aa, Human immunodeficiency virus 1
  source 1..11: note = HLAs: A2901 A2902 A2911
IVIYQYMDDLY

SEQ ID NO: 526 - protein, 9 aa, Human immunodeficiency virus 1
  source 1..9: note = HLAs: A3001
IVRMYSPVS

SEQ ID NO: 527 - protein, 10 aa, Human immunodeficiency virus 1
  source 1..10: note = HLAs: A0203 A0211 A02264 A3001 B2705 B2707
IVRMYSPVSI

SEQ ID NO: 528 - protein, 11 aa, Human immunodeficiency virus 1
  source 1..11: note = HLAs: A0211
IVRMYSPVSIL

SEQ ID NO: 529 - protein, 9 aa, Human immunodeficiency virus 1
  source 1..9: note = HLAs: A0201 A0202 A0203 A0204 A0205 A0206 A0207 A0211 A0214 A02264 A0230 A6802 A6827 B1301 B1302 B1303 B1502 B1525 B1531 B3910 B5703 C0102 C0103 C0144 C0202 C0210 C0217 C0229 C0302 C0303 C0304 C0305 C0317 C0403 C0501 C0509 C0704 C0801 C0803 C0804 C0812 C1202 C1203 C1502 C1504 C1505 C1509 C1601 C1602 C1604 C16112 C1646 C17 C1701 C1702 C1703 C1704 C1705 C1706 C1707
IVTDSQYAL

SEQ ID NO: 530 - protein, 8 aa, Human immunodeficiency virus 1
  source 1..8: note = HLAs: A2301 A2402 A2403 A2407 C0702 C0705 C1402 C1403
IWGKTPKF

SEQ ID NO: 531 - protein, 8 aa, Human immunodeficiency virus 1
  source 1..8: note = HLAs: C1402 C1403
IWKGPAKL

SEQ ID NO: 532 - protein, 9 aa, Human immunodeficiency virus 1
  source 1..9: note = HLAs: A2301 A2402 A2403 A2407 A2410 A2464 C0401 C0404 C0407 C0704 C0705 C1402 C1403 C1801 C1802
IWQLDCTHL

SEQ ID NO: 533 - protein, 8 aa, Human immunodeficiency virus 1
  source 1..8: note = HLAs: A2403 C1402 C1403
IYKRWIIL

SEQ ID NO: 534 - protein, 10 aa, Human immunodeficiency virus 1
  source 1..10: note = HLAs: A2301 A2402 A2403 A2407 A2410
IYKRWIILGL

SEQ ID NO: 535 - protein, 9 aa, Human immunodeficiency virus 1
  source 1..9: note = HLAs: A2301 A2402 A2403 A2407 A2410 A2464 A3009 B0801 B2705 C0102 C0103 C0144 C0214 C0302 C0303 C0304 C0305 C0317 C0401 C0403 C0404 C0407 C0602 C0701 C0702 C0704 C0705 C0706 C0718 C0801 C0803 C0812 C1402 C1403 C1601 C1602 C16112 C1646 C1701 C1702 C1703 C1704 C1705 C18 C1801 C1802 C1803
IYQEPFKNL

SEQ ID NO: 536 - protein, 10 aa, Human immunodeficiency virus 1
  source 1..10: note = HLAs: A3101 A3104 A3303
IYQEPFKNLK

SEQ ID NO: 537 - protein, 8 aa, Human immunodeficiency virus 1
  source 1..8: note = HLAs: C1402 C1403
IYQYMDDL

SEQ ID NO: 538 - protein, 9 aa, Human immunodeficiency virus 1
  source 1..9: note = HLAs: A0102 A2301 A2402 A2403 A2407 A2410 A2464 A2901 A2902 A2911 A3002 A3004 A3009 A3010 C0702 C0705 C1402 C1403
IYQYMDDLY

SEQ ID NO: 539 - protein, 10 aa, Human immunodeficiency virus 1
  source 1..10: note = HLAs: A0201 A0202 A0203 A0205 A0206 A0211 A0214 A02264 A0230 A2301 A2403 A2410
IYQYMDDLYV

SEQ ID NO: 540 - protein, 8 aa, Human immunodeficiency virus 1
  source 1..8: note = HLAs: B5201 B5802 C0202 C0210 C0229 C0302 C0303 C0304 C0305 C0317 C0801 C0803 C1202 C1203 C1502 C1504 C1505 C1509 C1601 C1602 C1604 C16112 C1646 C17 C1701 C1702 C1703 C1704 C1705 C1706
KAFSPEVI

SEQ ID NO: 541 - protein, 9 aa, Human immunodeficiency virus 1
  source 1..9: note = HLAs: C1202
KAFSPEVIP

SEQ ID NO: 542 - protein, 10 aa, Human immunodeficiency virus 1
  source 1..10: note = HLAs: B1502 B1503 B1517 B15220 B1525 B4601 B5703 B5801 B5802 C0102 C0103 C0144 C0202 C0210 C0214 C0217 C0229 C0302 C0303 C0304 C0305 C0317 C0602 C0701 C0702 C0704 C0705 C0706 C0718 C0801 C0803 C0804 C0812 C1202 C1203 C1502 C1504 C1505 C1509 C1601 C1602 C1604 C16112 C1646 C17 C1701 C1702 C1703 C1704 C1705 C1706 C1707
KAFSPEVIPM

SEQ ID NO: 543 - protein, 11 aa, Human immunodeficiency virus 1
  source 1..11: note = HLAs: A3009 A3201 B1301 B1502 B1503 B1516 B1517 B15220 B1525 B1531 B4601 B5701 B5702 B5703 B5704 B5801 B5802 C0202 C0210 C0214 C0217 C0229 C0302 C0303 C0304 C0305 C0317 C0702 C0705 C0801 C0803 C1202 C1203 C1502 C1504 C1505 C1509 C1601 C1602 C1604 C16112 C1646 C17 C1701 C1702 C1703 C1704 C1705 C1706
KAFSPEVIPMF

SEQ ID NO: 544 - protein, 8 aa, Human immunodeficiency virus 1
  source 1..8: note = HLAs: B5201
KAIGTVLV

SEQ ID NO: 545 - protein, 9 aa, Human immunodeficiency virus 1
  source 1..9: note = HLAs: B5801 C1202
KAIGTVLVG

SEQ ID NO: 546 - protein, 8 aa, Human immunodeficiency virus 1
  source 1..8: note = HLAs: B1525 C0202 C0210 C0229 C0302 C1202 C1203 C1504 C1509 C1601 C1602 C1604 C16112 C1646
KAKIIRDY

SEQ ID NO: 547 - protein, 9 aa, Human immunodeficiency virus 1
  source 1..9: note = HLAs: A3001
KAKIIRDYG

SEQ ID NO: 548 - protein, 10 aa, Human immunodeficiency virus 1
  source 1..10: note = HLAs: A0302 A3001 A3101 A3104 A7401 A7402 A7403 A7405 A7408 A7409 A7411 A7413
KAKIIRDYGK

SEQ ID NO: 549 - protein, 8 aa, Human immunodeficiency virus 1
  source 1..8: note = HLAs: C0303 C1602 C1646
KAQEEHEK

SEQ ID NO: 550 - protein, 9 aa, Human immunodeficiency virus 1
  source 1..9: note = HLAs: A0101 A0102 A0103 A0109 A0123 A2901 A2902 A2911 A3002 A3004 A3009 A3010 A3201 A3601 A7404 A7410 B1301 B1501 B1502 B1503 B1508 B1511 B1512 B1516 B1517 B1518 B1521 B15220 B1524 B1525 B1527 B1531 B1532 B3501 B3505 B3508 B3532 B3541 B3543 B4601 B4701 B5301 B5701 B5702 B5703 B5704 B5801 B5802 C0202 C0210 C0214 C0217 C0229 C0302 C0303 C0304 C0602 C0701 C0702 C0705 C0706 C0718 C0801 C0803 C1202 C1203 C1402 C1403 C1502 C1504 C1505 C1509 C1601 C1602 C1604 C16112 C1646 C17 C1701 C1702 C1703 C1704 C1705 C1706
KAQEEHEKY

SEQ ID NO: 551 - protein, 10 aa, Human immunodeficiency virus 1
  source 1..10: note = HLAs: C1202
KAQEEHEKYH

SEQ ID NO: 552 - protein, 9 aa, Human immunodeficiency virus 1
  source 1..9: note = HLAs: A3001 A3009 B0702 B0705 B0801 B1501 B1502 B1503 B1517 B15220 B1525 B1531 B3505 B4201 B4202 B4601 B5501 B5604 B5610 B5703 B5802 C0102 C0144 C0202 C0210 C0214 C0217 C0229 C0302 C0303 C0304 C0305 C0317 C0602 C0701 C0702 C0704 C0705 C0706 C0718 C0801 C0803 C1202 C1203 C1402 C1403 C1502 C1504 C1505 C1509 C1601 C1602 C1604 C16112 C1646 C1701 C1702 C1703 C1704 C1705
KARVLAEAM

SEQ ID NO: 553 - protein, 10 aa, Human immunodeficiency virus 1
  source 1..10: note = HLAs: A3001
KCGKEGHQMK

SEQ ID NO: 554 - protein, 9 aa, Human immunodeficiency virus 1
  source 1..9: note = HLAs: C0102 C0144 C1601 C16112
KCQLKGEAM

SEQ ID NO: 555 - protein, 10 aa, Human immunodeficiency virus 1
  source 1..10: note = HLAs: B3701
KDCTERQANF

SEQ ID NO: 556 - protein, 11 aa, Human immunodeficiency virus 1
  source 1..11: note = HLAs: B5703
KDCTERQANFF

SEQ ID NO: 557 - protein, 9 aa, Human immunodeficiency virus 1
  source 1..9: note = HLAs: A3402 B4701
KDLIAEIQK

SEQ ID NO: 558 - protein, 9 aa, Human immunodeficiency virus 1
  source 1..9: note = HLAs: B3701 B4002 B4102 C0704
KDSTKWRKL

SEQ ID NO: 559 - protein, 9 aa, Human immunodeficiency virus 1
  source 1..9: note = HLAs: B3701
KDSWTVNDI

SEQ ID NO: 560 - protein, 9 aa, Human immunodeficiency virus 1
  source 1..9: note = HLAs: B4006 B4101 B4102
KDTINEEAA

SEQ ID NO: 561 - protein, 11 aa, Human immunodeficiency virus 1
  source 1..11: note = HLAs: B4402 B4404 B4427 B5701 B5702 B5703 B5704
KDTINEEAAEW

SEQ ID NO: 562 - protein, 8 aa, Human immunodeficiency virus 1
  source 1..8: note = HLAs: B4101
KEALLDTG

SEQ ID NO: 563 - protein, 9 aa, Human immunodeficiency virus 1
  source 1..9: note = HLAs: B3701 B4002 B4006 B40114 B4101 B4102 B4415 B4501 B4507 B4901 B5001
KEALLDTGA

SEQ ID NO: 564 - protein, 9 aa, Human immunodeficiency virus 1
  source 1..9: note = HLAs: B4101 B4102
KEGHQMKDC

SEQ ID NO: 565 - protein, 8 aa, Human immunodeficiency virus 1
  source 1..8: note = HLAs: B3701 B4001 B4002 B4006 B40114 B4016 B4101 B4102 B4402 B4403 B4404 B4405 B4407 B4415 B4427 B4501 B4507 B4901 B5001 B5201
KEGKISKI

SEQ ID NO: 566 - protein, 9 aa, Human immunodeficiency virus 1
  source 1..9: note = HLAs: B4006 B4101
KEGKISKIG

SEQ ID NO: 567 - protein, 10 aa, Human immunodeficiency virus 1
  source 1..10: note = HLAs: B4006 B4101 B4501 B4507 B5001
KEGKISKIGP

SEQ ID NO: 568 - protein, 10 aa, Human immunodeficiency virus 1
  source 1..10: note = HLAs: B4006 B40114 B4101 B4102 B4415 B4501 B4507 B4901 B5001
KEIVASCDKC

SEQ ID NO: 569 - protein, 9 aa, Human immunodeficiency virus 1
  source 1..9: note = HLAs: B4002 B4006 B4101 B4102
KELKKIIGQ

SEQ ID NO: 570 - protein, 10 aa, Human immunodeficiency virus 1
  source 1..10: note = HLAs: A0203 A02264 B1302 B1303 B3701 B4001 B4002 B4006 B40114 B4016 B4101 B4102 B4402 B4415 B4427 B4501 B4507 B4901 B5001 B5201
KELKKIIGQV

SEQ ID NO: 571 - protein, 11 aa, Human immunodeficiency virus 1
  source 1..11: note = HLAs: B3701 B4402 B4404 B4427
KEPFRDYVDRF

SEQ ID NO: 572 - protein, 9 aa, Human immunodeficiency virus 1
  source 1..9: note = HLAs: B4101
KEPPFLWMG

SEQ ID NO: 573 - protein, 10 aa, Human immunodeficiency virus 1
  source 1..10: note = HLAs: A2901 A2902 A2911 A3002 A3004 A3009 A3010 B1502 B1503 B15220 B1525 B1531 B1802 B4402 B4403 B4404 B4407 B4427 B4701 B4703
KEPPFLWMGY

SEQ ID NO: 574 - protein, 8 aa, Human immunodeficiency virus 1
  source 1..8: note = HLAs: B1503 B15220 B1802 B4427
KEPVHGVY

SEQ ID NO: 575 - protein, 9 aa, Human immunodeficiency virus 1
  source 1..9: note = HLAs: A2901 A2902 A2911 A3002 A3009 A3601 B1501 B1502 B1503 B1512 B1518 B15220 B1525 B1531 B1532 B1801 B1802 B1803 B3701 B4102 B4402 B4403 B4404 B4407 B4427 B4701 B4703 C0202 C0210 C0229 C0702 C0705 C1202 C1504 C1509 C1601 C1602 C16112 C1646
KEPVHGVYY

SEQ ID NO: 576 - protein, 8 aa, Human immunodeficiency virus 1
  source 1..8: note = HLAs: A3001
KFRLPIQK

SEQ ID NO: 577 - protein, 9 aa, Human immunodeficiency virus 1
  source 1..9: note = HLAs: A3001
KFRLPIQKE

SEQ ID NO: 578 - protein, 11 aa, Human immunodeficiency virus 1
  source 1..11: note = HLAs: B5701
KFRLPIQKETW

SEQ ID NO: 579 - protein, 9 aa, Human immunodeficiency virus 1
  source 1..9: note = HLAs: A0205 B1301 B1302 B1303 B5201 C0704 C0801 C0803 C1202 C1203 C1502 C1504 C1505 C1509 C1602 C1646 C17 C1701 C1702 C1703 C1704 C1705 C1706
KGIGGNEQV

SEQ ID NO: 580 - protein, 11 aa, Human immunodeficiency virus 1
  source 1..11: note = HLAs: A3402 A3601 A7404 B2705 C0202 C0210 C0214 C0229 C0302 C0303 C0602 C0705 C1202 C1502 C1504 C1509 C1601 C1602 C16112 C1646
KGIGGNEQVDK

SEQ ID NO: 581 - protein, 8 aa, Human immunodeficiency virus 1
  source 1..8: note = HLAs: B5701
KGPAKLLW

SEQ ID NO: 582 - protein, 9 aa, Human immunodeficiency virus 1
  source 1..9: note = HLAs: A0301 A0302 A0305 A1101 A1102 A3001 A3104 A3402 A7401 A7402 A7403 A7405 A7409 A7411 A7413
KGPAKLLWK

SEQ ID NO: 583 - protein, 11 aa, Human immunodeficiency virus 1
  source 1..11: note = HLAs: B0702 B0705 B4201 B5703 B5802 C1602 C1646
KGSPAIFQSSM

SEQ ID NO: 584 - protein, 8 aa, Human immunodeficiency virus 1
  source 1..8: note = HLAs: A3101
KHLVWASR

SEQ ID NO: 585 - protein, 10 aa, Human immunodeficiency virus 1
  source 1..10: note = HLAs: A0202 B3802
KHLVWASREL

SEQ ID NO: 586 - protein, 9 aa, Human immunodeficiency virus 1
  source 1..9: note = HLAs: B1401 B1402 B1510 B1537 B2706 B3801 B3802 B3901 B3905 B3906 B3909 B3924 C0701 C0702 C0704 C0705 C0706 C0718
KHQKEPPFL

SEQ ID NO: 587 - protein, 10 aa, Human immunodeficiency virus 1
  source 1..10: note = HLAs: B3801
KHQKEPPFLW

SEQ ID NO: 588 - protein, 11 aa, Human immunodeficiency virus 1
  source 1..11: note = HLAs: B3801 B3802
KHQKEPPFLWM

SEQ ID NO: 589 - protein, 9 aa, Human immunodeficiency virus 1
  source 1..9: note = HLAs: A0201 A0202 A0204 A0205 A0206 A0207 A0211 A0214 A0230 A3201 A7404 B1301 B1302 B1303 B5702 B5703 B5802 C0102 C0103 C0144 C0202 C0210 C0214 C0229 C0303 C0304 C0305 C0401 C0403 C0404 C0407 C0501 C0509 C0704 C0705 C0801 C0802 C0803 C0804 C0812 C1202 C1203 C1502 C1504 C1505 C1509 C1601 C1602 C16112 C1646 C17 C1701 C1702 C1703 C1704 C1705 C1706 C1707 C1801 C1802
KIEELREHL

SEQ ID NO: 590 - protein, 10 aa, Human immunodeficiency virus 1
  source 1..10: note = HLAs: A0207 B1301 B1302 C0403 C0501 C0509 C0704 C1505
KIEELREHLL

SEQ ID NO: 591 - protein, 8 aa, Human immunodeficiency virus 1
  source 1..8: note = HLAs: B1525 C1202
KIGPENPY

SEQ ID NO: 592 - protein, 10 aa, Human immunodeficiency virus 1
  source 1..10: note = HLAs: A0205
KIIGQVRDQA

SEQ ID NO: 593 - protein, 9 aa, Human immunodeficiency virus 1
  source 1..9: note = HLAs: A0201 A0202 A0203 A0204 A0205 A0206 A0207 A0211 A0214 A02264 A0230 A3201 A7404 B1301 B1302 B1303 B5201 C1502 C1505 C1701 C1702 C1703 C1704 C1705
KIILVAVHV

SEQ ID NO: 594 - protein, 8 aa, Human immunodeficiency virus 1
  source 1..8: note = HLAs: B5201
KIKALTEI

SEQ ID NO: 595 - protein, 8 aa, Human immunodeficiency virus 1
  source 1..8: note = HLAs: B1503 B15220 B1525
KIQNFRVY

SEQ ID NO: 596 - protein, 9 aa, Human immunodeficiency virus 1
  source 1..9: note = HLAs: A0102 A0301 A0302 A0305 A1101 A1102 A2901 A2902 A2911 A3001 A3002 A3004 A3009 A3010 A3101 A3104 A3201 A3402 A3601 A7401 A7402 A7403 A7404 A7405 A7408 A7409 A7410 A7411 A7413 A8001 B1501 B1502 B1503 B1512 B1517 B15220 B1525 B1527 B1531 B1532 B5704 B5802 C0202 C0210 C0214 C0229 C0302 C0705 C1202 C1203 C1504 C1509 C1601 C1602 C1604 C16112 C1646
KIQNFRVYY

SEQ ID NO: 597 - protein, 10 aa, Human immunodeficiency virus 1
  source 1..10: note = HLAs: A0301 A0302 A0305 A1101 A1102 A3001 A3002 A3101 A3104 A3301 A3303 A3305 A3402 A6801 A74 A7401 A7402 A7403 A7404 A7405 A7406 A7407 A7408 A7409 A7411 A7413
KIQNFRVYYR

SEQ ID NO: 598 - protein, 11 aa, Human immunodeficiency virus 1
  source 1..11: note = HLAs: A3101 A3104
KIQNFRVYYRD

SEQ ID NO: 599 - protein, 9 aa, Human immunodeficiency virus 1
  source 1..9: note = HLAs: A0301 A0302 A0305 A3001 A3101 A3104 A3402 A7401 A7402 A7403 A7404 A7405 A7408 A7409 A7411 A7413
KIRLRPGGK

SEQ ID NO: 600 - protein, 10 aa, Human immunodeficiency virus 1
  source 1..10: note = HLAs: A0301 A0302 A0305 A3001 A7401 A7402 A7403 A7405 A7408 A7409 A7411 A7413 B2705
KIRLRPGGKK

SEQ ID NO: 601 - protein, 11 aa, Human immunodeficiency virus 1
  source 1..11: note = HLAs: A3002 A3004 A3009 A3010 A3601 B1501 B1502 B1503 B15220 B1525 B1527 B1531 B1532 C0202 C0210 C0229 C1202
KISKIGPENPY

SEQ ID NO: 602 - protein, 9 aa, Human immunodeficiency virus 1
  source 1..9: note = HLAs: A0201 A0202 A0203 A0204 A0205 A0206 A0207 A0211 A0214 A02264 A0230 A3001 A3201 B1302
KIVRMYSPV

SEQ ID NO: 603 - protein, 10 aa, Human immunodeficiency virus 1
  source 1..10: note = HLAs: A3001
KIVRMYSPVS

SEQ ID NO: 604 - protein, 11 aa, Human immunodeficiency virus 1
  source 1..11: note = HLAs: A0211 A3201 B2707
KIVRMYSPVSI

SEQ ID NO: 605 - protein, 9 aa, Human immunodeficiency virus 1
  source 1..9: note = HLAs: B1503 B15220 B1525 B2706 C0701 C0702 C0705 C0706 C0718
KKHQKEPPF

SEQ ID NO: 606 - protein, 9 aa, Human immunodeficiency virus 1
  source 1..9: note = HLAs: B1503 B15220 B2705 B2706 B2707 C0602 C0701 C0702 C0704 C0705 C0706 C0718
KKKKSVTVL

SEQ ID NO: 607 - protein, 8 aa, Human immunodeficiency virus 1
  source 1..8: note = HLAs: A0201 A0202 A0203 A0206 A0211 A02264 A0230
KLAGRWPV

SEQ ID NO: 608 - protein, 9 aa, Human immunodeficiency virus 1
  source 1..9: note = HLAs: A0301 A0302 A0305 A1101 A1102 A3001 A3101 A3104 A3402 A74 A7401 A7402 A7403 A7404 A7405 A7407 A7408 A7409 A7411 A7413
KLAGRWPVK

SEQ ID NO: 609 - protein, 10 aa, Human immunodeficiency virus 1
  source 1..10: note = HLAs: A0301 A0302 A0305 A1101 A1102 A3001 A3104 A3402 A7401 A7402 A7403 A7404 A7405 A7408 A7409 A7411 A7413
KLKPGMDGPK

SEQ ID NO: 610 - protein, 11 aa, Human immunodeficiency virus 1
  source 1..11: note = HLAs: A0201 A0202 A0203 A0204 A0207 A0211 A02264 A0230 B1301 B1302 B1303
KLKPGMDGPKV

SEQ ID NO: 611 - protein, 9 aa, Human immunodeficiency virus 1
  source 1..9: note = HLAs: A0201 A0202 A0203 A0204 A0205 A0206 A0211 A0214 A02264 A0230
KLLWKGEGA

SEQ ID NO: 612 - protein, 10 aa, Human immunodeficiency virus 1
  source 1..10: note = HLAs: A0201 A0202 A0203 A0204 A0205 A0206 A0211 A0214 A02264 A0230 B1302
KLLWKGEGAV

SEQ ID NO: 613 - protein, 11 aa, Human immunodeficiency virus 1
  source 1..11: note = HLAs: A0201 A0202 A0203 A0204 A0211 A02264 A0230 B1302
KLLWKGEGAVV

SEQ ID NO: 614 - protein, 9 aa, Human immunodeficiency virus 1
  source 1..9: note = HLAs: A0301 A0302 A0305 A2901 A2902 A2911 A3002 A3004 A3009 A3010 A3201 A3601 A7404 A7410 A8001 B1501 B1502 B1503 B1512 B1517 B1521 B15220 B1524 B1525 B1527 B1531 B1532 C0202 C0210 C0229 C0302 C1202 C1203 C1504 C1509 C1601 C1602 C1604 C16112 C1646
KLNWASQIY

SEQ ID NO: 615 - protein, 10 aa, Human immunodeficiency virus 1
  source 1..10: note = HLAs: B1525
KLNWASQIYP

SEQ ID NO: 616 - protein, 8 aa, Human immunodeficiency virus 1
  source 1..8: note = HLAs: B5201
KLVDFREL

SEQ ID NO: 617 - protein, 10 aa, Human immunodeficiency virus 1
  source 1..10: note = HLAs: A0301 A0302 A0305 A1101 A1102 A3001 A3101 A3104 A3402 A3601 A74 A7401 A7402 A7403 A7404 A7405 A7406 A7407 A7408 A7409 A7411 A7413
KLVDFRELNK

SEQ ID NO: 618 - protein, 11 aa, Human immunodeficiency virus 1
  source 1..11: note = HLAs: A0301 A0302 A0305 A1101 A1102 A3101 A3104 A3303 A3401 A3402 A74 A7401 A7402 A7403 A7404 A7405 A7407 A7408 A7409 A7411 A7413
KLVDFRELNKR

SEQ ID NO: 619 - protein, 8 aa, Human immunodeficiency virus 1
  source 1..8: note = HLAs: B5701
KLVGKLNW

SEQ ID NO: 620 - protein, 9 aa, Human immunodeficiency virus 1
  source 1..9: note = HLAs: A0201 A0202 A0203 A0204 A0205 A0206 A0207 A0211 A0214 A02264 A0230 A7404
KLVGKLNWA

SEQ ID NO: 621 - protein, 10 aa, Human immunodeficiency virus 1
  source 1..10: note = HLAs: A0201 A0202 A0203 A0206 A0211 A02264 A0230
KLVGKLNWAS

SEQ ID NO: 622 - protein, 9 aa, Human immunodeficiency virus 1
  source 1..9: note = HLAs: A0301 A0302 A0305 A1101 A1102 A3001 A3104 A3402 A74 A7401 A7402 A7403 A7404 A7405 A7408 A7409 A7411 A7413
KLVSSGIRK

SEQ ID NO: 623 - protein, 10 aa, Human immunodeficiency virus 1
  source 1..10: note = HLAs: A0201 A0202 A0203 A0204 A0205 A0206 A0207 A0211 A0214 A02264 A0230 A0301 A0305 A7404 B1301 B1302 B1303
KLVSSGIRKV

SEQ ID NO: 624 - protein, 11 aa, Human immunodeficiency virus 1
  source 1..11: note = HLAs: A3201 B1301
KLVSSGIRKVL

SEQ ID NO: 625 - protein, 11 aa, Human immunodeficiency virus 1
  source 1..11: note = HLAs: A0201 A0202 A0204 A0206 A0211 A0230 A2403 A2410
KLWYQLETEPI

SEQ ID NO: 626 - protein, 9 aa, Human immunodeficiency virus 1
  source 1..9: note = HLAs: A0201 A0202 A0203 A0204 A0205 A0206 A0211 A0214 A02264 A0230 A2301 A2402 A2403 A2407 A2410 A2464 A2901 A2902 A2911 A3002 A3004 A3009 A3010 A3201 A4301 A7404 A7410 B1301 B1302 B1501 B1502 B1503 B1511 B1512 B1516 B1517 B1518 B1521 B15220 B1524 B1525 B1527 B1531 B1532 B4601 B4701 B5702 B5703 B5802 C0202 C0210 C0214 C0229 C0302 C0702 C0705 C1202 C1203 C1402 C1403 C1504 C1509 C1601 C1602 C1604 C16112 C1646
KMIGGIGGF

SEQ ID NO: 627 - protein, 10 aa, Human immunodeficiency virus 1
  source 1..10: note = HLAs: A0201 A0202 A0203 A0204 A0205 A0206 A0207 A0211 A0214 A02264 A0230 A3004 A3009 A3201 A7404 B1301 B1302 B1303 B1501 B1525 C1505
KMIGGIGGFI

SEQ ID NO: 628 - protein, 11 aa, Human immunodeficiency virus 1
  source 1..11: note = HLAs: A0301 A0302 A0305 A1101 A1102 A3001 A3009 A3101 A3104 A3402 A3601 A74 A7401 A7402 A7403 A7404 A7405 A7406 A7407 A7408 A7409 A7410 A7411 A7413 C0303 C1602
KMIGGIGGFIK

SEQ ID NO: 629 - protein, 10 aa, Human immunodeficiency virus 1
  source 1..10: note = HLAs: A0301 A0305 A3001 A3104
KNLKTGKYAK

SEQ ID NO: 630 - protein, 9 aa, Human immunodeficiency virus 1
  source 1..9: note = HLAs: B0702 B0705 B4201 B5501 B5502 B5601 B5604 B5610
KPGMDGPKV

SEQ ID NO: 631 - protein, 8 aa, Human immunodeficiency virus 1
  source 1..8: note = HLAs: B0702 B0705 B4201 B5501
KPKMIGGI

SEQ ID NO: 632 - protein, 9 aa, Human immunodeficiency virus 1
  source 1..9: note = HLAs: B0702 B0705 B5501 B5502 B5601
KPKMIGGIG

SEQ ID NO: 633 - protein, 10 aa, Human immunodeficiency virus 1
  source 1..10: note = HLAs: B0702 B5501 B5502 B5601
KPKMIGGIGG

SEQ ID NO: 634 - protein, 11 aa, Human immunodeficiency virus 1
  source 1..11: note = HLAs: B0702 B0705 B1501 B1502 B1503 B15220 B1525 B1527 B1531 B3501 B3505 B3508 B4201 B4202 B5501 B5502 B5601 B5604 B5610 B6701
KPKMIGGIGGF

SEQ ID NO: 635 - protein, 9 aa, Human immunodeficiency virus 1
  source 1..9: note = HLAs: A2301 A2402 A2403 A2407 A2410 A2464 A3002 A3004 A3009 A3010 A3201 A7404 B1301 B1302 B1303 B1401 B1402 B1501 B1502 B1503 B1512 B1517 B1518 B1521 B15220 B1524 B1525 B1527 B1531 B1532 B2702 B2704 B2705 B2706 B2707 B3701 B3801 B3802 B4102 B4427 B4701 B4703 B5201 B5701 B5702 B5703 B5704 B5802 C0202 C0210 C0214 C0229 C0302 C0602 C0701 C0702 C0704 C0705 C0706 C0718 C1202 C1203 C1402 C1403 C1502 C1504 C1505 C1509 C1601 C1602 C1604 C16112 C1646
KQITKIQNF

SEQ ID NO: 636 - protein, 10 aa, Human immunodeficiency virus 1
  source 1..10: note = HLAs: A0302 A3101 A3104 A3303 A6801 A74 A7401 A7402 A7403 A7404 A7405 A7407 A7408 A7409 A7411 A7413
KQITKIQNFR

SEQ ID NO: 637 - protein, 11 aa, Human immunodeficiency virus 1
  source 1..11: note = HLAs: A0206 A0211 A3104 B1301 B1302
KQITKIQNFRV

SEQ ID NO: 638 - protein, 9 aa, Human immunodeficiency virus 1
  source 1..9: note = HLAs: A0201 A0202 A0204 A0205 A0206 A0211 A0214 A0230 B1301 B1302 B1303 B1503 B15220 B5201
KQMAGDDCV

SEQ ID NO: 639 - protein, 10 aa, Human immunodeficiency virus 1
  source 1..10: note = HLAs: A0205 B1302 B1303
KQMAGDDCVA

SEQ ID NO: 640 - protein, 9 aa, Human immunodeficiency virus 1
  source 1..9: note = HLAs: A0301 A0302 A0305 A1101 A1102 A3001 A3002 A3004 A3009 A3010 A3101 A3104 A3402 A3601 A74 A7401 A7402 A7403 A7404 A7405 A7407 A7408 A7409 A7411 A7413 B2702 B2705 B4701 C0705 C1602
KQWPLTEEK

SEQ ID NO: 641 - protein, 10 aa, Human immunodeficiency virus 1
  source 1..10: note = HLAs: A0204 A0205 A0206 A0211 A0214 B1301 B1302 B1303 B2706 B2707 B3801 B3802 B4701 B4901 B5201 C0704
KQWPLTEEKI

SEQ ID NO: 642 - protein, 11 aa, Human immunodeficiency virus 1
  source 1..11: note = HLAs: A0301 A0302 A0305 A7401 A7402 A7403 A7404 A7405 A7408 A7409 A7411 A7413 B2705
KQWPLTEEKIK

SEQ ID NO: 643 - protein, 9 aa, Human immunodeficiency virus 1
  source 1..9: note = HLAs: A3002 A3009 B1503 B1518 B15220 B1525 B2702 B2703 B2704 B2705 B2706 B2707 C0214 C0602 C0701 C0702 C0705 C0706 C0718
KRKGGIGGY

SEQ ID NO: 644 - protein, 11 aa, Human immunodeficiency virus 1
  source 1..11: note = HLAs: B2702 B2704 B2705 B2706 B2707 B7301 C0701 C0705 C0706 C0718
KRKGGIGGYSA

SEQ ID NO: 645 - protein, 9 aa, Human immunodeficiency virus 1
  source 1..9: note = HLAs: B2702 B2703 B2704 B2705 B2706 B2707 B3802 B3924 B7301 C0602 C0701 C0702 C0704 C0705 C0706 C0718
KRTQDFWEV

SEQ ID NO: 646 - protein, 11 aa, Human immunodeficiency virus 1
  source 1..11: note = HLAs: B2702 B2704 B2705 B2706 B2707 C0701 C0705 C0706 C0718
KRTQDFWEVQL

SEQ ID NO: 647 - protein, 8 aa, Human immunodeficiency virus 1
  source 1..8: note = HLAs: B1401 B1402 B2702 B2704 B2705 B2706 B2707 C0602 C0701 C0702 C0705 C0706 C0718
KRWIILGL

SEQ ID NO: 648 - protein, 9 aa, Human immunodeficiency virus 1
  source 1..9: note = HLAs: B2705
KRWIILGLN

SEQ ID NO: 649 - protein, 10 aa, Human immunodeficiency virus 1
  source 1..10: note = HLAs: A3104 B2702 B2703 B2704 B2705 B2707
KRWIILGLNK

SEQ ID NO: 650 - protein, 11 aa, Human immunodeficiency virus 1
  source 1..11: note = HLAs: B2702 B2703 B2704 B2705 B2706 B2707 C0701 C0705 C0706 C0718
KRWIILGLNKI

SEQ ID NO: 651 - protein, 8 aa, Human immunodeficiency virus 1
  source 1..8: note = HLAs: B5201
KSVTVLDV

SEQ ID NO: 652 - protein, 8 aa, Human immunodeficiency virus 1
  source 1..8: note = HLAs: C1502 C1505
KTAVQMAV

SEQ ID NO: 653 - protein, 9 aa, Human immunodeficiency virus 1
  source 1..9: note = HLAs: A3002 A3004 A3009 A3010 A3201 B1301 B1501 B1502 B1503 B1516 B1517 B15220 B1524 B1525 B1527 B1531 B1532 B5701 B5702 B5703 B5704 B5801 B5802 C0202 C0210 C0217 C0229 C0302 C1202 C1203 C1502 C1504 C1505 C1509 C1601 C1602 C1604 C16112 C1646
KTAVQMAVF

SEQ ID NO: 654 - protein, 10 aa, Human immunodeficiency virus 1
  source 1..10: note = HLAs: A3001 B1516 B1517 B5701 B5703 B5801
KTAVQMAVFI

SEQ ID NO: 655 - protein, 9 aa, Human immunodeficiency virus 1
  source 1..9: note = HLAs: A3001
KVKQWPLTE

SEQ ID NO: 656 - protein, 11 aa, Human immunodeficiency virus 1
  source 1..11: note = HLAs: A0301 A0302 A0305 A1101 A1102 A3001 A3104 A3402 A7401 A7402 A7403 A7404 A7405 A7408 A7409 A7411 A7413
KVKQWPLTEEK

SEQ ID NO: 657 - protein, 10 aa, Human immunodeficiency virus 1
  source 1..10: note = HLAs: A0301 A0302 A0305 A1101 A1102 A3001 A3104 A3402 A3601 A6801 A74 A7401 A7402 A7403 A7404 A7405 A7408 A7409 A7411 A7413
KVLFLDGIDK

SEQ ID NO: 658 - protein, 9 aa, Human immunodeficiency virus 1
  source 1..9: note = HLAs: A0301 A0302 A0305 A1101 A1102 A3001 A3101 A3104 A3402 A7401 A7402 A7403 A7404 A7405 A7407 A7408 A7409 A7411 A7413
KVVPRRKAK

SEQ ID NO: 659 - protein, 9 aa, Human immunodeficiency virus 1
  source 1..9: note = HLAs: A3001
KWKPKMIGG

SEQ ID NO: 660 - protein, 10 aa, Human immunodeficiency virus 1
  source 1..10: note = HLAs: A2403 A3001
KWKPKMIGGI

SEQ ID NO: 661 - protein, 9 aa, Human immunodeficiency virus 1
  source 1..9: note = HLAs: A3001 A3101 A3104 A3301 A3303 A3305 A7401 A7402 A7403 A7405 A7408 A7409 A7411
KWRKLVDFR

SEQ ID NO: 662 - protein, 9 aa, Human immunodeficiency virus 1
  source 1..9: note = HLAs: A2301 A2402 A2403 A2407 A2410 A2464 B2705 C0401 C0404 C0407 C0702 C0704 C0705 C1402 C1403 C1801 C1802
KWTVQPIQL

SEQ ID NO: 663 - protein, 9 aa, Human immunodeficiency virus 1
  source 1..9: note = HLAs: A2301 A2402 A2403 A2407 A2410 A2464 A3001 A3004 A3009 B1503 B15220 C0214 C0602 C0701 C0702 C0704 C0705 C0706 C0718 C1402 C1403
KYHSNWRAM

SEQ ID NO: 664 - protein, 10 aa, Human immunodeficiency virus 1
  source 1..10: note = HLAs: A3001
KYHSNWRAMA

SEQ ID NO: 665 - protein, 9 aa, Human immunodeficiency virus 1
  source 1..9: note = HLAs: A3001
KYTAFTIPS

SEQ ID NO: 666 - protein, 10 aa, Human immunodeficiency virus 1
  source 1..10: note = HLAs: A0203 A0206 A02264 A2301 A2402 A2403 A2407 A2410 A2464 A3001 A3201 A6802 A6827 B1516 B1517 B5703 C1402 C1403
KYTAFTIPSI

SEQ ID NO: 667 - protein, 8 aa, Human immunodeficiency virus 1
  source 1..8: note = HLAs: A0202 A0203 A0211 A02264
LAEAMSQV

SEQ ID NO: 668 - protein, 8 aa, Human immunodeficiency virus 1
  source 1..8: note = HLAs: C0102 C0144 C0403 C0501 C0509 C0704 C0801 C0802 C0803 C0812 C1505 C1601 C1602 C16112 C1646
LAENREIL

SEQ ID NO: 669 - protein, 9 aa, Human immunodeficiency virus 1
  source 1..9: note = HLAs: A0302 A1101 A1102 A3402 A3601 A7404 B2705 C0303 C1602 C1646
LAENREILK

SEQ ID NO: 670 - protein, 9 aa, Human immunodeficiency virus 1
  source 1..9: note = HLAs: A3402 A3601 C0303
LDCTHLEGK

SEQ ID NO: 671 - protein, 9 aa, Human immunodeficiency virus 1
  source 1..9: note = HLAs: B4101
LDTGADDTV

SEQ ID NO: 672 - protein, 10 aa, Human immunodeficiency virus 1
  source 1..10: note = HLAs: A0201 A0202 A0203 A0205 A0206 A0211 A0214 A02264 A0230
LDVGDAYFSV

SEQ ID NO: 673 - protein, 8 aa, Human immunodeficiency virus 1
  source 1..8: note = HLAs: B4006 B4101
LEEMMTAC

SEQ ID NO: 674 - protein, 11 aa, Human immunodeficiency virus 1
  source 1..11: note = HLAs: A0201 A0202 A0203 A0206 A0211 A02264 A0230 B4101
LEEMMTACQGV

SEQ ID NO: 675 - protein, 8 aa, Human immunodeficiency virus 1
  source 1..8: note = HLAs: B3701 B4002 B4006 B40114 B4016 B4101 B4102 B4415 B4901 B5001 B5107 B5201
LEGKIILV

SEQ ID NO: 676 - protein, 9 aa, Human immunodeficiency virus 1
  source 1..9: note = HLAs: B3701 B4001 B4002 B4006 B40114 B4016 B4101 B4102 B4415 B4501 B4507 B4901 B5001
LEGKIILVA

SEQ ID NO: 677 - protein, 10 aa, Human immunodeficiency virus 1
  source 1..10: note = HLAs: B3701 B4002 B4006 B40114 B4101 B4102 B4415 B4901 B5001
LEGKIILVAV

SEQ ID NO: 678 - protein, 8 aa, Human immunodeficiency virus 1
  source 1..8: note = HLAs: B4002 B4006 B4101 B4102 B4501 B4507 B4901 B5001
LEIGQHRA

SEQ ID NO: 679 - protein, 9 aa, Human immunodeficiency virus 1
  source 1..9: note = HLAs: B1301 B1302 B1303 B3701 B4001 B4002 B4006 B40114 B4016 B4101 B4102 B4402 B4403 B4404 B4405 B4407 B4415 B4427 B4501 B4507 B4901 B5001 B5107 B5201
LELAENREI

SEQ ID NO: 680 - protein, 10 aa, Human immunodeficiency virus 1
  source 1..10: note = HLAs: A0202 B3701 B4001 B4002 B4006 B40114 B4016 B4101 B4102 B4405 B4415 B4427 B4901 B5001
LELAENREIL

SEQ ID NO: 681 - protein, 8 aa, Human immunodeficiency virus 1
  source 1..8: note = HLAs: C0303
LFLDGIDK

SEQ ID NO: 682 - protein, 9 aa, Human immunodeficiency virus 1
  source 1..9: note = HLAs: A0204 B0801 B1401 B1402 B1403 B1502 B1521 B1525 B1531 B2705 B4201 B4701 B5107 B5108 B5201 B5610 B5703 B5802 C0102 C0103 C0144 C0202 C0210 C0214 C0217 C0229 C0302 C0303 C0304 C0305 C0317 C0401 C0403 C0404 C0407 C0501 C0509 C0602 C0701 C0702 C0704 C0705 C0706 C0718 C0801 C0802 C0803 C0804 C0812 C1202 C1203 C1402 C1403 C1502 C1504 C1505 C1509 C1601 C1602 C1604 C16112 C1646 C17 C1701 C1702 C1703 C1704 C1705 C1706 C1707
LGIPHPAGL

SEQ ID NO: 683 - protein, 10 aa, Human immunodeficiency virus 1
  source 1..10: note = HLAs: A0301 A0302 A0305 A1101 A1102 A3402 A3601 A7404 C0303 C1602 C1646
LGIPHPAGLK

SEQ ID NO: 684 - protein, 11 aa, Human immunodeficiency virus 1
  source 1..11: note = HLAs: A0301 A0302 A0305 A1101 A1102 A3001 A3402 A7401 A7402 A7403 A7404 A7405 A7408 A7409 A7411 A7413 C0303 C1602
LGIPHPAGLKK

SEQ ID NO: 685 - protein, 9 aa, Human immunodeficiency virus 1
  source 1..9: note = HLAs: B0801 B2705 C0704 C0705 C1202 C1203 C1502 C1504 C1505 C1509 C1601 C1602 C1604 C16112 C1646
LGLNKIVRM

SEQ ID NO: 686 - protein, 10 aa, Human immunodeficiency virus 1
  source 1..10: note = HLAs: B1525
LGLNKIVRMY

SEQ ID NO: 687 - protein, 8 aa, Human immunodeficiency virus 1
  source 1..8: note = HLAs: B3906
LHPDKWTV

SEQ ID NO: 688 - protein, 8 aa, Human immunodeficiency virus 1
  source 1..8: note = HLAs: B1525
LIKKEKVY

SEQ ID NO: 689 - protein, 9 aa, Human immunodeficiency virus 1
  source 1..9: note = HLAs: A0204 B0801 B1525 B2705 B4201 B4202 C0102 C0144 C0202 C0210 C0229 C1202 C1601 C1602 C16112 C1646 C1701 C1702 C1703 C1704 C1705
LIKKEKVYL

SEQ ID NO: 690 - protein, 9 aa, Human immunodeficiency virus 1
  source 1..9: note = HLAs: B1502 B1503 B1518 B1521 B15220 B1525 B1531 C0702
LKEPVHGVY

SEQ ID NO: 691 - protein, 10 aa, Human immunodeficiency virus 1
  source 1..10: note = HLAs: A2902 A2911 A3601 B1503 B15220 B1525
LKEPVHGVYY

SEQ ID NO: 692 - protein, 9 aa, Human immunodeficiency virus 1
  source 1..9: note = HLAs: B0801 B1401 B1402 B2705 C0704
LKKKKSVTV

SEQ ID NO: 693 - protein, 9 aa, Human immunodeficiency virus 1
  source 1..9: note = HLAs: B1503 B15220 B2707 B3906 B3924
LKLAGRWPV

SEQ ID NO: 694 - protein, 10 aa, Human immunodeficiency virus 1
  source 1..10: note = HLAs: A0301 A0305
LKLAGRWPVK

SEQ ID NO: 695 - protein, 9 aa, Human immunodeficiency virus 1
  source 1..9: note = HLAs: B1503 B15220
LKTAVQMAV

SEQ ID NO: 696 - protein, 10 aa, Human immunodeficiency virus 1
  source 1..10: note = HLAs: B1501 B1503 B1517 B15220 B1525 B5703
LKTAVQMAVF

SEQ ID NO: 697 - protein, 10 aa, Human immunodeficiency virus 1
  source 1..10: note = HLAs: A0201 A0202 A0204 A0205 A0206 A0207 A0211 A0214 A0230 C0403 C0501 C0509 C0802
LLDTGADDTV

SEQ ID NO: 698 - protein, 11 aa, Human immunodeficiency virus 1
  source 1..11: note = HLAs: A0201 A0204 A0207 A0230 B1301 C0401 C0403 C0407 C0501 C0509 C0801 C0802 C0803 C0812 C17 C1701 C1702 C1703 C1704 C1705 C1706
LLDTGADDTVL

SEQ ID NO: 699 - protein, 11 aa, Human immunodeficiency virus 1
  source 1..11: note = HLAs: A3601 C0303
LLVQNANPDCK

SEQ ID NO: 700 - protein, 9 aa, Human immunodeficiency virus 1
  source 1..9: note = HLAs: A0201 A0202 A0203 A0204 A0205 A0206 A0207 A0211 A0214 A02264 A0230 B1302 B1303 B5201
LLWKGEGAV

SEQ ID NO: 701 - protein, 10 aa, Human immunodeficiency virus 1
  source 1..10: note = HLAs: A0201 A0202 A0203 A0204 A0205 A0206 A0207 A0211 A0214 A02264 A0230 B1302
LLWKGEGAVV

SEQ ID NO: 702 - protein, 11 aa, Human immunodeficiency virus 1
  source 1..11: note = HLAs: A0201 A0202 A0204 A0207 A0211 A0214 A0230 B1301 B1302
LLWKGEGAVVI

SEQ ID NO: 703 - protein, 8 aa, Human immunodeficiency virus 1
  source 1..8: note = HLAs: B5201
LNFPISPI

SEQ ID NO: 704 - protein, 8 aa, Human immunodeficiency virus 1
  source 1..8: note = HLAs: B1525
LNKIVRMY

SEQ ID NO: 705 - protein, 9 aa, Human immunodeficiency virus 1
  source 1..9: note = HLAs: A3001
LNKIVRMYS

SEQ ID NO: 706 - protein, 9 aa, Human immunodeficiency virus 1
  source 1..9: note = HLAs: B5701 B5702 B5703 B5704 B5801 B5802
LNKRTQDFW

SEQ ID NO: 707 - protein, 9 aa, Human immunodeficiency virus 1
  source 1..9: note = HLAs: B0702 B0705 B3501 B3503 B3505 B3508 B3532 B3541 B4201 B4202 B5108 B5301 B5501 B5502 B5601 B5604 B5610 B6701 B8101 B8103
LPGKWKPKM

SEQ ID NO: 708 - protein, 10 aa, Human immunodeficiency virus 1
  source 1..10: note = HLAs: B0702 B4201 B5501 B5502
LPGKWKPKMI

SEQ ID NO: 709 - protein, 8 aa, Human immunodeficiency virus 1
  source 1..8: note = HLAs: B5301
LPIQKETW

SEQ ID NO: 710 - protein, 9 aa, Human immunodeficiency virus 1
  source 1..9: note = HLAs: B0702 B0705 B3501 B3502 B3503 B3505 B3508 B3512 B3910 B4201 B4202 B5101 B5102 B5105 B5107 B5108 B5109 B5201 B5301 B5401 B5501 B5502 B5601 B5604 B5610 B6701 B7801 B8101 B8103 C0102 C0144 C0704 C0801 C0803
LPPVVAKEI

SEQ ID NO: 711 - protein, 10 aa, Human immunodeficiency virus 1
  source 1..10: note = HLAs: B4201 B5101 B5102 B5105 B5108 B5109 B5501 B5502 B5601 B5604 B5610
LPPVVAKEIV

SEQ ID NO: 712 - protein, 11 aa, Human immunodeficiency virus 1
  source 1..11: note = HLAs: B5401 B5501 B5502 B5601 B5610
LPPVVAKEIVA

SEQ ID NO: 713 - protein, 9 aa, Human immunodeficiency virus 1
  source 1..9: note = HLAs: B4201 B5401 B5501 B5502 B5601 B5610
LPQGWKGSP

SEQ ID NO: 714 - protein, 10 aa, Human immunodeficiency virus 1
  source 1..10: note = HLAs: B0702 B0705 B3503 B4201 B4202 B5401 B5501 B5502 B5601 B5604 B5610 B6701
LPQGWKGSPA

SEQ ID NO: 715 - protein, 11 aa, Human immunodeficiency virus 1
  source 1..11: note = HLAs: B0702 B0705 B3503 B3508 B4201 B4202 B5105 B5108 B5109 B5401 B5501 B5502 B5601 B5604 B5610 B6701 B8101 B8103
LPQGWKGSPAI

SEQ ID NO: 716 - protein, 8 aa, Human immunodeficiency virus 1
  source 1..8: note = HLAs: B1302 B1303 B1503 B15220 B1525 B5107 B5201
LQKQITKI

SEQ ID NO: 717 - protein, 11 aa, Human immunodeficiency virus 1
  source 1..11: note = HLAs: B1301 B1501 B1503 B15220 B1524 B1525 B1527 B1532
LQKQITKIQNF

SEQ ID NO: 718 - protein, 8 aa, Human immunodeficiency virus 1
  source 1..8: note = HLAs: B5201
LQTGSEEL

SEQ ID NO: 719 - protein, 9 aa, Human immunodeficiency virus 1
  source 1..9: note = HLAs: B1503 B1518 B15220 B2702 B2703 B2704 B2705 C0214 C0602 C0701 C0702 C0705 C0706 C0718
LRPGGKKKY

SEQ ID NO: 720 - protein, 10 aa, Human immunodeficiency virus 1
  source 1..10: note = HLAs: C0403 C0501 C0509 C0801 C0802 C0803 C0812 C1505 C1701 C1702 C1703 C1704 C1705
LSEGATPQDL

SEQ ID NO: 721 - protein, 8 aa, Human immunodeficiency virus 1
  source 1..8: note = HLAs: A0302 A1101 A1102 A3402
LSWVPAHK

SEQ ID NO: 722 - protein, 10 aa, Human immunodeficiency virus 1
  source 1..10: note = HLAs: B1517
LSWVPAHKGI

SEQ ID NO: 723 - protein, 9 aa, Human immunodeficiency virus 1
  source 1..9: note = HLAs: A0204 A0207 B0801 B1517 B2705 B4201 B4202 B5702 B5703 B5704 B5802 C0102 C0103 C0144 C0202 C0210 C0214 C0217 C0229 C0302 C0303 C0304 C0305 C0317 C0401 C0403 C0404 C0407 C0501 C0509 C0602 C0701 C0702 C0704 C0705 C0706 C0718 C0801 C0802 C0803 C0804 C0812 C1202 C1203 C1402 C1403 C1502 C1504 C1505 C1509 C1601 C1602 C1604 C16112 C1646 C17 C1701 C1702 C1703 C1704 C1705 C1706 C1707 C18 C1801 C1802
LTEEKIKAL

SEQ ID NO: 724 - protein, 8 aa, Human immunodeficiency virus 1
  source 1..8: note = HLAs: A3601
LTETTNQK

SEQ ID NO: 725 - protein, 8 aa, Human immunodeficiency virus 1
  source 1..8: note = HLAs: C0102 C0144 C0202 C0210 C0229 C0302 C0303 C0304 C0305 C0317 C0801 C0803 C0804 C0812 C1202 C1203 C1502 C1504 C1505 C1509 C1601 C1602 C1604 C16112 C1646 C17 C1701 C1702 C1703 C1704 C1705 C1706 C1707
LTQIGCTL

SEQ ID NO: 726 - protein, 10 aa, Human immunodeficiency virus 1
  source 1..10: note = HLAs: A3601 B1501 B1503 B1512 B1516 B1517 B15220 B1524 B1525 B1527 B1532 B2705 B5701 B5702 B5703 B5704 B5801 B5802 C1504 C1509 C1602
LTQIGCTLNF

SEQ ID NO: 727 - protein, 10 aa, Human immunodeficiency virus 1
  source 1..10: note = HLAs: A2601 A2608 A2612 A2901 A2902 A2911 A3002 A3004 A3009 A3010 A3401 A3402 A3601 A4301 A6603 B1501 B1502 B1503 B1512 B1517 B15220 B1525 B1527 B1531 B1532 B3541 C0202 C0210 C0229 C0302 C1202
LVAVHVASGY

SEQ ID NO: 728 - protein, 9 aa, Human immunodeficiency virus 1
  source 1..9: note = HLAs: A0301 A0302 A0305 A1101 A1102 A3402 A3601 A7401 A7402 A7403 A7404 A7405 A7409 A7411 A7413 C0303 C1602
LVDFRELNK

SEQ ID NO: 729 - protein, 10 aa, Human immunodeficiency virus 1
  source 1..10: note = HLAs: A3104 A3401 A3402 A3601 A6801 A7401 A7402 A7403 A7404 A7405 A7408 A7409 A7411
LVDFRELNKR

SEQ ID NO: 730 - protein, 9 aa, Human immunodeficiency virus 1
  source 1..9: note = HLAs: A0201 A0202 A0203 A0204 A0205 A0206 A0207 A0211 A0214 A02264 A0230 B1301 B1302 B1303 B2705 B5108 B5201 B5702 B5703 B5802 C0102 C0103 C0144 C0202 C0210 C0217 C0229 C0302 C0303 C0304 C0305 C0317 C0403 C0501 C0509 C0602 C0704 C0801 C0803 C0804 C0812 C1202 C1203 C1502 C1504 C1505 C1509 C1601 C1602 C1604 C16112 C1646 C17 C1701 C1702 C1703 C1704 C1705 C1706 C1707
LVGPTPVNI

SEQ ID NO: 731 - protein, 10 aa, Human immunodeficiency virus 1
  source 1..10: note = HLAs: C0102 C0144 C1505 C1701 C1702 C1703 C1704 C1705
LVGPTPVNII

SEQ ID NO: 732 - protein, 10 aa, Human immunodeficiency virus 1
  source 1..10: note = HLAs: A0302 A1101 A1102 A3402 A3601 A6801 C0303
LVQNANPDCK

SEQ ID NO: 733 - protein, 8 aa, Human immunodeficiency virus 1
  source 1..8: note = HLAs: A3402 C0303
LVSSGIRK

SEQ ID NO: 734 - protein, 9 aa, Human immunodeficiency virus 1
  source 1..9: note = HLAs: A0201 A0202 A0203 A0204 A0205 A0206 A0207 A0211 A0214 A02264 A0230 A6802 A6827 A7404 B1302 B1303 B5108 B5201 C0102 C0144 C0202 C0210 C0214 C0217 C0229 C0302 C0303 C0304 C0305 C0317 C0602 C0801 C0803 C0812 C1202 C1203 C1502 C1504 C1505 C1509 C1601 C1602 C1604 C16112 C1646 C17 C1701 C1702 C1703 C1704 C1705 C1706 C1707
LVSSGIRKV

SEQ ID NO: 735 - protein, 10 aa, Human immunodeficiency virus 1
  source 1..10: note = HLAs: C0102 C0144 C0202 C0210 C0229 C0303 C1202 C1203 C1502 C1504 C1505 C1509 C1601 C1602 C1604 C16112 C1646 C17 C1701 C1702 C1703 C1704 C1705 C1706
LVSSGIRKVL

SEQ ID NO: 736 - protein, 11 aa, Human immunodeficiency virus 1
  source 1..11: note = HLAs: B5701 B5702 B5703 B5704
LVSSGIRKVLF

SEQ ID NO: 737 - protein, 8 aa, Human immunodeficiency virus 1
  source 1..8: note = HLAs: B5201 C0302 C0303 C0304 C0305 C0317 C1203 C1601 C1602 C16112 C1646 C1701 C1702 C1703 C1704 C1705
LVWASREL

SEQ ID NO: 738 - protein, 9 aa, Human immunodeficiency virus 1
  source 1..9: note = HLAs: C1402 C1403
LWKGEGAVV

SEQ ID NO: 739 - protein, 10 aa, Human immunodeficiency virus 1
  source 1..10: note = HLAs: A2301 A2403 A2410
LWYQLETEPI

SEQ ID NO: 740 - protein, 9 aa, Human immunodeficiency virus 1
  source 1..9: note = HLAs: A2301 A2402 A2403 A2407 A2410 A2464 C0401 C0404 C0407 C0702 C0704 C0705 C1402 C1403
LYVGSDLEI

SEQ ID NO: 741 - protein, 10 aa, Human immunodeficiency virus 1
  source 1..10: note = HLAs: A3104 A3303 A3401 A3402 A3601 A6601 A6602 A6603 A6801 A7404 A7405 A7408 C0202 C0210 C0214 C0229 C0302 C0303 C0602 C1202 C1601 C1602 C16112 C1646
MAGDDCVAGR

SEQ ID NO: 742 - protein, 9 aa, Human immunodeficiency virus 1
  source 1..9: note = HLAs: B3541 B5401 B5502 C0801 C0803 C1202
MASDFNLPP

SEQ ID NO: 743 - protein, 10 aa, Human immunodeficiency virus 1
  source 1..10: note = HLAs: A0201 A0202 A0203 A0204 A0205 A0206 A0207 A0211 A0214 A02264 A0230 A6802 A6827 A6901 B5101 B5108 B5109 B5201 B5401 B5502 C0102 C0144 C0202 C0210 C0217 C0229 C0302 C0303 C0304 C0305 C0317 C0501 C0509 C0801 C0802 C0803 C0804 C0812 C1202 C1203 C1502 C1504 C1505 C1509 C1601 C1602 C1604 C16112 C1646 C17 C1701 C1702 C1703 C1704 C1705 C1706 C1707
MASDFNLPPV

SEQ ID NO: 744 - protein, 11 aa, Human immunodeficiency virus 1
  source 1..11: note = HLAs: A0205 A0206 A0214 A6802 A6827 A6901 C0202 C0210 C0229 C0303 C0304 C0501 C0509 C0801 C0803 C0804 C1202 C1203 C1502 C1504 C1505 C1509 C1601 C1602 C1604 C16112 C1646 C17 C1701 C1702 C1703 C1704 C1705 C1706
MASDFNLPPVV

SEQ ID NO: 745 - protein, 8 aa, Human immunodeficiency virus 1
  source 1..8: note = HLAs: B1502 B1517 B1531 B3541 B5703 B5802 C0302 C1202 C1203 C1601 C1602 C1604 C16112 C1646
MAVFIHNF

SEQ ID NO: 746 - protein, 9 aa, Human immunodeficiency virus 1
  source 1..9: note = HLAs: A0301 A0302 A0305 A1101 A1102 A3001 A3101 A3104 A3301 A3303 A3305 A3401 A3402 A3601 A6601 A6602 A6603 A6801 A7401 A7402 A7403 A7404 A7405 A7407 A7408 A7409 A7411 A7413 C0303
MAVFIHNFK

SEQ ID NO: 747 - protein, 10 aa, Human immunodeficiency virus 1
  source 1..10: note = HLAs: A0302 A1101 A1102 A3101 A3104 A3301 A3303 A3305 A3401 A3402 A6601 A6602 A6603 A6801 A7401 A7402 A7403 A7404 A7405 A7407 A7408 A7409 A7411 A7413
MAVFIHNFKR

SEQ ID NO: 748 - protein, 11 aa, Human immunodeficiency virus 1
  source 1..11: note = HLAs: A1101 A1102 A3104 A3303 A3402 A6801
MAVFIHNFKRK

SEQ ID NO: 749 - protein, 10 aa, Human immunodeficiency virus 1
  source 1..10: note = HLAs: B3701
MDDLYVGSDL

SEQ ID NO: 750 - protein, 9 aa, Human immunodeficiency virus 1
  source 1..9: note = HLAs: B3701 B4402 B4403 B4404 B4407 B4427 B5301 B5701 B5702 B5703 B5704 B5801 B5802
MDGPKVKQW

SEQ ID NO: 751 - protein, 11 aa, Human immunodeficiency virus 1
  source 1..11: note = HLAs: B0801 B4201 B4202
MDGPKVKQWPL

SEQ ID NO: 752 - protein, 9 aa, Human immunodeficiency virus 1
  source 1..9: note = HLAs: A3402 A7404 A7405 B1802 B2705 B3701 B4002 B4006 B4101 B4102 B4427 B4701 B4703 B5001
MEKEGKISK

SEQ ID NO: 753 - protein, 10 aa, Human immunodeficiency virus 1
  source 1..10: note = HLAs: B1302 B1303 B1802 B2705 B3701 B4001 B4002 B4006 B40114 B4016 B4101 B4102 B4402 B4403 B4404 B4405 B4407 B4415 B4427 B4501 B4507 B4701 B4901 B5001 B5201 C0704
MEKEGKISKI

SEQ ID NO: 754 - protein, 8 aa, Human immunodeficiency virus 1
  source 1..8: note = HLAs: C1601 C16112
MGARASVL

SEQ ID NO: 755 - protein, 10 aa, Human immunodeficiency virus 1
  source 1..10: note = HLAs: A3001
MGARASVLSG

SEQ ID NO: 756 - protein, 9 aa, Human immunodeficiency virus 1
  source 1..9: note = HLAs: A0301 A0302 A0305 A1101 A1102 A3001 A3104 A3402 A7404 A7405 A7413 C0303
MGYELHPDK

SEQ ID NO: 757 - protein, 10 aa, Human immunodeficiency virus 1
  source 1..10: note = HLAs: B1516 B1517 B5301 B5701 B5702 B5703 B5704 B5801 B5802
MGYELHPDKW

SEQ ID NO: 758 - protein, 9 aa, Human immunodeficiency virus 1
  source 1..9: note = HLAs: B3906
MHGQVDCSP

SEQ ID NO: 759 - protein, 11 aa, Human immunodeficiency virus 1
  source 1..11: note = HLAs: A0206 A0214 B3801 B3802
MHGQVDCSPGI

SEQ ID NO: 760 - protein, 9 aa, Human immunodeficiency virus 1
  source 1..9: note = HLAs: A0201 A0202 A0203 A0204 A0205 A0206 A0207 A0211 A0214 A02264 A0230 A6802 A6827 A6901 B1302 C1502 C1505 C17 C1701 C1702 C1703 C1704 C1705 C1706
MIGGIGGFI

SEQ ID NO: 761 - protein, 10 aa, Human immunodeficiency virus 1
  source 1..10: note = HLAs: A0301 A0302 A0305 A1101 A1102 A3104 A3401 A3402 A3601 A6602 A6801 A74 A7401 A7402 A7403 A7404 A7405 A7408 A7409 A7411 A7413 C0202 C0210 C0229 C0303 C1202 C1504 C1509 C1601 C1602 C16112 C1646
MIGGIGGFIK

SEQ ID NO: 762 - protein, 11 aa, Human immunodeficiency virus 1
  source 1..11: note = HLAs: A0201 A0202 A0203 A0204 A0205 A0206 A0207 A0211 A0214 A02264 A0230 A6901 B1302
MIGGIGGFIKV

SEQ ID NO: 763 - protein, 10 aa, Human immunodeficiency virus 1
  source 1..10: note = HLAs: A0201 A0202 A0203 A0204 A0205 A0206 A0207 A0211 A0214 A02264 A0230
MLKDTINEEA

SEQ ID NO: 764 - protein, 11 aa, Human immunodeficiency virus 1
  source 1..11: note = HLAs: A0201 A0202 A0203 A0204 A0205 A0211 A02264 A0230
MLKDTINEEAA

SEQ ID NO: 765 - protein, 10 aa, Human immunodeficiency virus 1
  source 1..10: note = HLAs: A0201 A0202 A0203 A0204 A0205 A0206 A0207 A0211 A0214 A02264 A0230
MLNTVGGHQA

SEQ ID NO: 766 - protein, 11 aa, Human immunodeficiency virus 1
  source 1..11: note = HLAs: A0203 A02264
MLNTVGGHQAA

SEQ ID NO: 767 - protein, 8 aa, Human immunodeficiency virus 1
  source 1..8: note = HLAs: A0202 A0203 A02264
MMTACQGV

SEQ ID NO: 768 - protein, 8 aa, Human immunodeficiency virus 1
  source 1..8: note = HLAs: B5201
MNKELKKI

SEQ ID NO: 769 - protein, 9 aa, Human immunodeficiency virus 1
  source 1..9: note = HLAs: B0801 B2705 B5201 C0704
MNKELKKII

SEQ ID NO: 770 - protein, 8 aa, Human immunodeficiency virus 1
  source 1..8: note = HLAs: B1302 B1303 B1401 B1402 B1503 B15220 B5107 B5201
MQMLKDTI

SEQ ID NO: 771 - protein, 9 aa, Human immunodeficiency virus 1
  source 1..9: note = HLAs: B1503 B15220
MQMLKDTIN

SEQ ID NO: 772 - protein, 9 aa, Human immunodeficiency virus 1
  source 1..9: note = HLAs: B1401 B1402 B1403 B2705 B2706 B2707 B3802 B3901 B3924 C0602 C0701 C0702 C0704 C0705 C0706 C0718
MREPRGSDI

SEQ ID NO: 773 - protein, 10 aa, Human immunodeficiency virus 1
  source 1..10: note = HLAs: B7301
MREPRGSDIA

SEQ ID NO: 774 - protein, 9 aa, Human immunodeficiency virus 1
  source 1..9: note = HLAs: A3601
MTDTLLVQN

SEQ ID NO: 775 - protein, 10 aa, Human immunodeficiency virus 1
  source 1..10: note = HLAs: A6802 A6827
MTDTLLVQNA

SEQ ID NO: 776 - protein, 8 aa, Human immunodeficiency virus 1
  source 1..8: note = HLAs: B1517 B5703 B5802 C1601 C16112
MTKILEPF

SEQ ID NO: 777 - protein, 9 aa, Human immunodeficiency virus 1
  source 1..9: note = HLAs: A0302 A1101 A1102 A3001 A3101 A3104 A3301 A3303 A3305 A3401 A3402 A6601 A6602 A6603 A6801 A74 A7401 A7402 A7403 A7404 A7405 A7407 A7408 A7409 A7411 A7413
MTKILEPFR

SEQ ID NO: 778 - protein, 8 aa, Human immunodeficiency virus 1
  source 1..8: note = HLAs: A2403 A2410 C0404 C0702 C0704 C0705 C1402 C1403
MYSPVSIL

SEQ ID NO: 779 - protein, 10 aa, Human immunodeficiency virus 1
  source 1..10: note = HLAs: A2301 A2402 A2403 A2407 A2410 A2464 C1402 C1403
MYSPVSILDI

SEQ ID NO: 780 - protein, 9 aa, Human immunodeficiency virus 1
  source 1..9: note = HLAs: B3503 B5101 B5102 B5105 B5107 B5108 B5109 B5201 B5301 B5702 B5703 B5802 C0102 C0103 C0144 C0202 C0210 C0214 C0217 C0229 C0302 C0303 C0304 C0305 C0317 C0403 C0501 C0509 C0602 C0704 C0705 C0801 C0802 C0803 C0804 C0812 C1202 C1203 C1502 C1504 C1505 C1509 C1601 C1602 C1604 C16112 C1646 C17 C1701 C1702 C1703 C1704 C1705 C1706 C1707
NANPDCKTI

SEQ ID NO: 781 - protein, 10 aa, Human immunodeficiency virus 1
  source 1..10: note = HLAs: B5108 C0102 C0103 C0144 C0202 C0210 C0229 C0303 C0304 C0305 C0317 C0403 C0501 C0509 C0704 C0801 C0802 C0803 C0804 C0812 C1202 C1203 C1505 C1601 C1602 C1604 C16112 C1646 C17 C1701 C1702 C1703 C1704 C1705 C1706 C1707
NANPDCKTIL

SEQ ID NO: 782 - protein, 11 aa, Human immunodeficiency virus 1
  source 1..11: note = HLAs: A0302 A1101 A1102 A3401 A3402 A3601 A6601 A6602 A6801 A7401 A7402 A7403 A7404 A7405 A7408 A7409 A7411 C0202 C0210 C0214 C0229 C0303 C0602 C1202 C1504 C1509 C1601 C1602 C16112 C1646
NANPDCKTILK

SEQ ID NO: 783 - protein, 10 aa, Human immunodeficiency virus 1
  source 1..10: note = HLAs: A3402 A3601 A6801 C0303 C1602
NAWVKVVEEK

SEQ ID NO: 784 - protein, 11 aa, Human immunodeficiency virus 1
  source 1..11: note = HLAs: B5701 B5704
NCRAPRKKGCW

SEQ ID NO: 785 - protein, 9 aa, Human immunodeficiency virus 1
  source 1..9: note = HLAs: A3401 A3402 A3601 A6801 B2705 B3701 B4701 C0303 C1602
NDIQKLVGK

SEQ ID NO: 786 - protein, 10 aa, Human immunodeficiency virus 1
  source 1..10: note = HLAs: B3701 B4102
NDIQKLVGKL

SEQ ID NO: 787 - protein, 10 aa, Human immunodeficiency virus 1
  source 1..10: note = HLAs: B40114 B4101 B4102 B4404 B4405 B4415
NEEAAEWDRL

SEQ ID NO: 788 - protein, 8 aa, Human immunodeficiency virus 1
  source 1..8: note = HLAs: B3701 B4002 B4006 B40114 B4101 B4102 B4901
NEQVDKLV

SEQ ID NO: 789 - protein, 9 aa, Human immunodeficiency virus 1
  source 1..9: note = HLAs: B4006 B4101 B4102 B4415 B4501 B4507 B5001
NEQVDKLVS

SEQ ID NO: 790 - protein, 10 aa, Human immunodeficiency virus 1
  source 1..10: note = HLAs: B4006 B4101 B4102 B4501 B4507
NEQVDKLVSS

SEQ ID NO: 791 - protein, 11 aa, Human immunodeficiency virus 1
  source 1..11: note = HLAs: B4101
NEQVDKLVSSG

SEQ ID NO: 792 - protein, 8 aa, Human immunodeficiency virus 1
  source 1..8: note = HLAs: B1502 B1503 B15220 B1531 B1801 B1802 B1803 B3701 B4402 B4403 B4404 B4407 B4427
NETPGIRY

SEQ ID NO: 793 - protein, 10 aa, Human immunodeficiency virus 1
  source 1..10: note = HLAs: A2901 A2902 A2911 B1531 B1801 B1802 B1803 B4402 B4403 B4404 B4407 B4427 B4701 B4703
NETPGIRYQY

SEQ ID NO: 794 - protein, 11 aa, Human immunodeficiency virus 1
  source 1..11: note = HLAs: A3002 A3009
NFKRKGGIGGY

SEQ ID NO: 795 - protein, 9 aa, Human immunodeficiency virus 1
  source 1..9: note = HLAs: C1402 C1403
NFPISPIET

SEQ ID NO: 796 - protein, 10 aa, Human immunodeficiency virus 1
  source 1..10: note = HLAs: B5401
NFPISPIETV

SEQ ID NO: 797 - protein, 10 aa, Human immunodeficiency virus 1
  source 1..10: note = HLAs: A3101 A3104 A3301 A3303 A3305 A6801
NFPQITLWQR

SEQ ID NO: 798 - protein, 10 aa, Human immunodeficiency virus 1
  source 1..10: note = HLAs: A3101 A3104 A3301 A3303 A3305
NFRVYYRDSR

SEQ ID NO: 799 - protein, 9 aa, Human immunodeficiency virus 1
  source 1..9: note = HLAs: A0205
NIVTDSQYA

SEQ ID NO: 800 - protein, 10 aa, Human immunodeficiency virus 1
  source 1..10: note = HLAs: A0205
NIVTDSQYAL

SEQ ID NO: 801 - protein, 10 aa, Human immunodeficiency virus 1
  source 1..10: note = HLAs: A0203 A02264 A6802 A6827
NKIVRMYSPV

SEQ ID NO: 802 - protein, 9 aa, Human immunodeficiency virus 1
  source 1..9: note = HLAs: A0301 A0302 A0305 A3001 A3101 A3104 A3303 A3402 A7401 A7402 A7403 A7404 A7405 A7408 A7409 A7411 A7413
NLKTGKYAK

SEQ ID NO: 803 - protein, 9 aa, Human immunodeficiency virus 1
  source 1..9: note = HLAs: A0301 A0302 A0305 A1101 A1102 A3001 A3402 A7401 A7402 A7403 A7404 A7405 A7408 A7409 A7411 A7413
NLPGKWKPK

SEQ ID NO: 804 - protein, 8 aa, Human immunodeficiency virus 1
  source 1..8: note = HLAs: A3402 A7404 C0303 C1602
NLPPVVAK

SEQ ID NO: 805 - protein, 10 aa, Human immunodeficiency virus 1
  source 1..10: note = HLAs: A0202 A0203 A0204 A0205 A0207 A0211 A02264 B1302 C0102 C0103 C0144
NLPPVVAKEI

SEQ ID NO: 806 - protein, 11 aa, Human immunodeficiency virus 1
  source 1..11: note = HLAs: A0207 A0211
NLPPVVAKEIV

SEQ ID NO: 807 - protein, 9 aa, Human immunodeficiency virus 1
  source 1..9: note = HLAs: A0101 A0102 A0109 A0123 A2901 A2902 A2911 A3601
NNETPGIRY

SEQ ID NO: 808 - protein, 11 aa, Human immunodeficiency virus 1
  source 1..11: note = HLAs: A0101 A0102 A0109 A3601
NNETPGIRYQY

SEQ ID NO: 809 - protein, 8 aa, Human immunodeficiency virus 1
  source 1..8: note = HLAs: B0702 B0801 B3910 B4201 B4202 B5610
NPDCKTIL

SEQ ID NO: 810 - protein, 9 aa, Human immunodeficiency virus 1
  source 1..9: note = HLAs: A3402
NPDCKTILK

SEQ ID NO: 811 - protein, 10 aa, Human immunodeficiency virus 1
  source 1..10: note = HLAs: B5501 B5502 B5601
NPDCKTILKA

SEQ ID NO: 812 - protein, 11 aa, Human immunodeficiency virus 1
  source 1..11: note = HLAs: B0702 B0705 B3503 B3910 B4201 B4202 B5604 B5610 B6701
NPDCKTILKAL

SEQ ID NO: 813 - protein, 9 aa, Human immunodeficiency virus 1
  source 1..9: note = HLAs: B0702 B0705 B1403 B3503 B3508 B3910 B4201 B4202 B5101 B5102 B5105 B5107 B5108 B5109 B5201 B5401 B5501 B5502 B5601 B5604 B5610 B6701 B7801 C0102 C0103 C0144 C0704 C0801 C0803 C0812
NPPIPVGEI

SEQ ID NO: 814 - protein, 10 aa, Human immunodeficiency virus 1
  source 1..10: note = HLAs: B1502 B1508 B1511 B1521 B1531 B3501 B3503 B3505 B3508 B3532 B3541 B3543 B5301 B5502 B5604 B5610
NPPIPVGEIY

SEQ ID NO: 815 - protein, 10 aa, Human immunodeficiency virus 1
  source 1..10: note = HLAs: B5502
NPQSQGVVES

SEQ ID NO: 816 - protein, 11 aa, Human immunodeficiency virus 1
  source 1..11: note = HLAs: B0702 B0705 B0801 B1531 B3501 B3502 B3503 B3505 B3508 B3512 B3532 B3541 B3910 B4201 B4202 B5108 B5301 B5501 B5502 B5601 B5604 B5610 B6701 B8101 B8103 B8201 B8202
NPQSQGVVESM

SEQ ID NO: 817 - protein, 8 aa, Human immunodeficiency virus 1
  source 1..8: note = HLAs: B0702 B1502 B1531 B3501 B3503 B3505 B3508 B3532 B3541 B4201 B5101 B5108 B5109 B5301 B5501 B5502 B5601 B5604 B5610
NPYNTPVF

SEQ ID NO: 818 - protein, 9 aa, Human immunodeficiency virus 1
  source 1..9: note = HLAs: B0702 B3501 B3503 B3505 B3508 B3532 B3906 B3910 B4201 B4202 B5101 B5102 B5105 B5108 B5109 B5401 B5501 B5502 B5601 B5604 B5610 B6701 B7801
NPYNTPVFA

SEQ ID NO: 819 - protein, 10 aa, Human immunodeficiency virus 1
  source 1..10: note = HLAs: A2403 A2410 B0702 B0705 B3503 B3910 B4201 B4202 B5101 B5102 B5105 B5108 B5109 B5401 B5501 B5502 B5601 B5604 B5610 B6701 B7801
NPYNTPVFAI

SEQ ID NO: 820 - protein, 11 aa, Human immunodeficiency virus 1
  source 1..11: note = HLAs: A3402
NPYNTPVFAIK

SEQ ID NO: 821 - protein, 8 aa, Human immunodeficiency virus 1
  source 1..8: note = HLAs: B1302 B1303 B5107 B5201
NQIIEQLI

SEQ ID NO: 822 - protein, 9 aa, Human immunodeficiency virus 1
  source 1..9: note = HLAs: B0801 B1301 B1302 B1303 B1401 B1402 B1403 B1501 B1502 B1503 B1510 B1518 B15220 B1524 B1525 B1537 B3701 B3801 B3802 B3901 B3905 B3906 B3924 B4002 B4101 B4102 B4901 B5107 B5201 C0704
NQKTELQAI

SEQ ID NO: 823 - protein, 9 aa, Human immunodeficiency virus 1
  source 1..9: note = HLAs: B1401 B1402 B1403 B2706 B2707 B3802 B3901 B3906 B3924 B7301 C0704
NREILKEPV

SEQ ID NO: 824 - protein, 10 aa, Human immunodeficiency virus 1
  source 1..10: note = HLAs: A3402
NTMLNTVGGH

SEQ ID NO: 825 - protein, 8 aa, Human immunodeficiency virus 1
  source 1..8: note = HLAs: B5107 B5201 C0102 C0103 C0144 C0202 C0210 C0214 C0217 C0229 C0302 C0303 C0304 C0305 C0317 C0403 C0404 C0501 C0509 C0602 C0702 C0704 C0705 C0801 C0803 C0804 C0812 C1202 C1203 C1502 C1504 C1505 C1509 C1601 C1602 C1604 C16112 C1646 C17 C1701 C1702 C1703 C1704 C1705 C1706 C1707
NTPPLVKL

SEQ ID NO: 826 - protein, 9 aa, Human immunodeficiency virus 1
  source 1..9: note = HLAs: A2501 A3201 B1516 B1517 B5301 B5701 B5702 B5703 B5704 B5801 B5802 C0202 C0210 C0229 C1203 C1504 C1509 C1601 C1602 C1604 C16112 C1646
NTPPLVKLW

SEQ ID NO: 827 - protein, 10 aa, Human immunodeficiency virus 1
  source 1..10: note = HLAs: A0101 A0102 A0103 A0109 A0123 A2901 A2902 A2911 A3002 A3004 A3009 A3010 A3601 B5704 C1602
NTPPLVKLWY

SEQ ID NO: 828 - protein, 8 aa, Human immunodeficiency virus 1
  source 1..8: note = HLAs: A6801
NTPVFAIK

SEQ ID NO: 829 - protein, 9 aa, Human immunodeficiency virus 1
  source 1..9: note = HLAs: A0301 A0302 A0305 A1101 A1102 A3001 A3401 A3402 A3601 A6601 A6602 A6801 A7401 A7402 A7403 A7404 A7405 A7408 A7409 A7411 A7413
NTPVFAIKK

SEQ ID NO: 830 - protein, 10 aa, Human immunodeficiency virus 1
  source 1..10: note = HLAs: A0302 A1101 A1102 A3401 A3402 A6602 A6801 A7404 A7405
NTPVFAIKKK

SEQ ID NO: 831 - protein, 9 aa, Human immunodeficiency virus 1
  source 1..9: note = HLAs: A0201 A0202 A0203 A0204 A0205 A0206 A0207 A0211 A0214 A02264 A0230 A6802 A6827 A6901 C1502 C1505
NTVATLYCV

SEQ ID NO: 832 - protein, 9 aa, Human immunodeficiency virus 1
  source 1..9: note = HLAs: A6603 A6802 A6827 B5401 B5501 B5502 B5601 C0801 C0803 C1202 C1203
NTVGGHQAA

SEQ ID NO: 833 - protein, 10 aa, Human immunodeficiency virus 1
  source 1..10: note = HLAs: A2501 A2601 A2603 A2608 A2612 A2630 A3401 A6601 A6602 A6603 A6802 A6827 B1502 B1525 B1531 C0102 C0144 C0202 C0210 C0229 C0302 C0303 C0304 C0317 C0801 C0803 C1202 C1203 C1504 C1505 C1509 C1601 C1602 C1604 C16112 C1646 C17 C1701 C1702 C1703 C1704 C1705 C1706
NTVGGHQAAM

SEQ ID NO: 834 - protein, 8 aa, Human immunodeficiency virus 1
  source 1..8: note = HLAs: A3402
NVLPQGWK

SEQ ID NO: 835 - protein, 9 aa, Human immunodeficiency virus 1
  source 1..9: note = HLAs: A2403 C1402 C1403
NWRAMASDF

SEQ ID NO: 836 - protein, 11 aa, Human immunodeficiency virus 1
  source 1..11: note = HLAs: B2707
NWRAMASDFNL

SEQ ID NO: 837 - protein, 10 aa, Human immunodeficiency virus 1
  source 1..10: note = HLAs: A0101 A0109 A3601
PAETGQETAY

SEQ ID NO: 838 - protein, 9 aa, Human immunodeficiency virus 1
  source 1..9: note = HLAs: B3701 B4002 B4006 B40114 B4101 B4102 B4901 B5001
PENPYNTPV

SEQ ID NO: 839 - protein, 10 aa, Human immunodeficiency virus 1
  source 1..10: note = HLAs: B3701 B4102 B4404 B4427
PENPYNTPVF

SEQ ID NO: 840 - protein, 9 aa, Human immunodeficiency virus 1
  source 1..9: note = HLAs: B4006 B4101 B5001
PEVIPMFSA

SEQ ID NO: 841 - protein, 10 aa, Human immunodeficiency virus 1
  source 1..10: note = HLAs: A6802 A6827 B4102
PEVIPMFSAL

SEQ ID NO: 842 - protein, 9 aa, Human immunodeficiency virus 1
  source 1..9: note = HLAs: B4006 B4101 B4501 B4507 B5001
PEWEFVNTP

SEQ ID NO: 843 - protein, 10 aa, Human immunodeficiency virus 1
  source 1..10: note = HLAs: B4101
PEWEFVNTPP

SEQ ID NO: 844 - protein, 11 aa, Human immunodeficiency virus 1
  source 1..11: note = HLAs: B4006 B4101
PEWEFVNTPPL

SEQ ID NO: 845 - protein, 9 aa, Human immunodeficiency virus 1
  source 1..9: note = HLAs: A2301 A2402 A2403 A2407 A2410 A2464
PFLWMGYEL

SEQ ID NO: 846 - protein, 9 aa, Human immunodeficiency virus 1
  source 1..9: note = HLAs: A2301 A2402 A2403 A2407 A2464 C1402 C1403
PFRDYVDRF

SEQ ID NO: 847 - protein, 10 aa, Human immunodeficiency virus 1
  source 1..10: note = HLAs: A2301 A2402 A2407
PFRDYVDRFF

SEQ ID NO: 848 - protein, 11 aa, Human immunodeficiency virus 1
  source 1..11: note = HLAs: B5701 B5702 B5703 B5704 B5801 B5802
PGMDGPKVKQW

SEQ ID NO: 849 - protein, 9 aa, Human immunodeficiency virus 1
  source 1..9: note = HLAs: C0403 C0501 C0509 C0802
PIETVPVKL

SEQ ID NO: 850 - protein, 10 aa, Human immunodeficiency virus 1
  source 1..10: note = HLAs: B1501 B1525
PKMIGGIGGF

SEQ ID NO: 851 - protein, 8 aa, Human immunodeficiency virus 1
  source 1..8: note = HLAs: B0801
PKVKQWPL

SEQ ID NO: 852 - protein, 9 aa, Human immunodeficiency virus 1
  source 1..9: note = HLAs: A0204 A0211
PLVKLWYQL

SEQ ID NO: 853 - protein, 10 aa, Human immunodeficiency virus 1
  source 1..10: note = HLAs: A0203 A02264
PMFSALSEGA

SEQ ID NO: 854 - protein, 8 aa, Human immunodeficiency virus 1
  source 1..8: note = HLAs: B5108
PPIPVGEI

SEQ ID NO: 855 - protein, 9 aa, Human immunodeficiency virus 1
  source 1..9: note = HLAs: B1502 B1508 B1511 B1521 B1531 B3501 B3503 B3505 B3508 B3532 B3541 B3543 B5301 B5604 B5610
PPIPVGEIY

SEQ ID NO: 856 - protein, 9 aa, Human immunodeficiency virus 1
  source 1..9: note = HLAs: B5108
PPVVAKEIV

SEQ ID NO: 857 - protein, 10 aa, Human immunodeficiency virus 1
  source 1..10: note = HLAs: B5502 B5601
PPVVAKEIVA

SEQ ID NO: 858 - protein, 8 aa, Human immunodeficiency virus 1
  source 1..8: note = HLAs: C0401 C0403 C0407 C0501 C0509 C0802
PQDLNTML

SEQ ID NO: 859 - protein, 9 aa, Human immunodeficiency virus 1
  source 1..9: note = HLAs: B5108
PSKDLIAEI

SEQ ID NO: 860 - protein, 9 aa, Human immunodeficiency virus 1
  source 1..9: note = HLAs: A3303 A3401 A3402 A6602 A6801
PTPVNIIGR

SEQ ID NO: 861 - protein, 8 aa, Human immunodeficiency virus 1
  source 1..8: note = HLAs: A3402
PVFAIKKK

SEQ ID NO: 862 - protein, 9 aa, Human immunodeficiency virus 1
  source 1..9: note = HLAs: B5701 B5703 B5704 B5801 B5802
PVGEIYKRW

SEQ ID NO: 863 - protein, 9 aa, Human immunodeficiency virus 1
  source 1..9: note = HLAs: A2301 A2402 A2403 A2407 A2410 A2464 C1402 C1403
PYNTPVFAI

SEQ ID NO: 864 - protein, 8 aa, Human immunodeficiency virus 1
  source 1..8: note = HLAs: A3402
QAAMQMLK

SEQ ID NO: 865 - protein, 9 aa, Human immunodeficiency virus 1
  source 1..9: note = HLAs: B5108 B5109 C0501 C0509 C0801 C0803 C1505 C1602 C1646
QAEHLKTAV

SEQ ID NO: 866 - protein, 11 aa, Human immunodeficiency virus 1
  source 1..11: note = HLAs: B3503 B4201 B5108 B5610 B5702 B5703 C0102 C0103 C0144 C0202 C0210 C0229 C0303 C0304 C0305 C0403 C0501 C0509 C0704 C0801 C0802 C0803 C0804 C0812 C1202 C1203 C1502 C1505 C1601 C1602 C1604 C16112 C1646 C17 C1701 C1702 C1703 C1704 C1705 C1706 C1707
QAQPDKSESEL

SEQ ID NO: 867 - protein, 8 aa, Human immunodeficiency virus 1
  source 1..8: note = HLAs: B5701 B5703 B5704 B5801 B5802
QATWIPEW

SEQ ID NO: 868 - protein, 10 aa, Human immunodeficiency virus 1
  source 1..10: note = HLAs: B5703 B5801
QATWIPEWEF

SEQ ID NO: 869 - protein, 8 aa, Human immunodeficiency virus 1
  source 1..8: note = HLAs: B3701 B4002 B4006 B40114 B4101 B4102
QDFWEVQL

SEQ ID NO: 870 - protein, 10 aa, Human immunodeficiency virus 1
  source 1..10: note = HLAs: A0201 A0202 A0203 A0205 A0211 A02264 A0230
QDLNTMLNTV

SEQ ID NO: 871 - protein, 9 aa, Human immunodeficiency virus 1
  source 1..9: note = HLAs: B4002 B4006 B40114 B4101 B4102 B4415 B4501 B4507 B4901 B5001
QEFGIPYNP

SEQ ID NO: 872 - protein, 11 aa, Human immunodeficiency virus 1
  source 1..11: note = HLAs: B4006 B4101 B4501 B4507 B5001
QEFGIPYNPQS

SEQ ID NO: 873 - protein, 9 aa, Human immunodeficiency virus 1
  source 1..9: note = HLAs: B4006 B4101 B4102
QEPFKNLKT

SEQ ID NO: 874 - protein, 9 aa, Human immunodeficiency virus 1
  source 1..9: note = HLAs: A1101 A1102 A3401 A3402 A3601 A6601 A6602 A6603 A6801 A7404 C0202 C0210 C0229 C0303 C0602 C1202 C1601 C1602 C16112 C1646
QGVGGPGHK

SEQ ID NO: 875 - protein, 11 aa, Human immunodeficiency virus 1
  source 1..11: note = HLAs: A3303 A3401 A3402 A6602 A6801 C0303 C1602
QGVGGPGHKAR

SEQ ID NO: 876 - protein, 9 aa, Human immunodeficiency virus 1
  source 1..9: note = HLAs: A3402 A3601 C0303 C1602
QGVVESMNK

SEQ ID NO: 877 - protein, 9 aa, Human immunodeficiency virus 1
  source 1..9: note = HLAs: B1302 B5101 B5107 B5108 B5109 B5201 C1505
QGWKGSPAI

SEQ ID NO: 878 - protein, 10 aa, Human immunodeficiency virus 1
  source 1..10: note = HLAs: B1502 B5703 C1202
QGWKGSPAIF

SEQ ID NO: 879 - protein, 10 aa, Human immunodeficiency virus 1
  source 1..10: note = HLAs: A0202 A0206 A0211
QIGCTLNFPI

SEQ ID NO: 880 - protein, 8 aa, Human immunodeficiency virus 1
  source 1..8: note = HLAs: A3402 C0303
QIIEQLIK

SEQ ID NO: 881 - protein, 9 aa, Human immunodeficiency virus 1
  source 1..9: note = HLAs: A0301 A0302 A0305 A1101 A1102 A3001 A3101 A3104 A3303 A3401 A3402 A3601 A6601 A6602 A6603 A6801 A74 A7401 A7402 A7403 A7404 A7405 A7407 A7408 A7409 A7411 A7413 C0303 C1202 C1602 C1646
QIIEQLIKK

SEQ ID NO: 882 - protein, 9 aa, Human immunodeficiency virus 1
  source 1..9: note = HLAs: A0302 A1101 A1102 A3101 A3104 A3301 A3303 A3305 A3401 A3402 A6601 A6602 A6603 A6801 A74 A7401 A7402 A7403 A7404 A7405 A7407 A7408 A7409 A7411 A7413
QITKIQNFR

SEQ ID NO: 883 - protein, 11 aa, Human immunodeficiency virus 1
  source 1..11: note = HLAs: B1503 B15220
QITKIQNFRVY

SEQ ID NO: 884 - protein, 8 aa, Human immunodeficiency virus 1
  source 1..8: note = HLAs: B5107 B5201 C1203 C1502 C1505
QIYPGIKV

SEQ ID NO: 885 - protein, 8 aa, Human immunodeficiency virus 1
  source 1..8: note = HLAs: A3402
QIYQEPFK

SEQ ID NO: 886 - protein, 10 aa, Human immunodeficiency virus 1
  source 1..10: note = HLAs: A0205 A2403
QIYQEPFKNL

SEQ ID NO: 887 - protein, 11 aa, Human immunodeficiency virus 1
  source 1..11: note = HLAs: A0301 A0302 A0305 A1101 A1102 A3104 A3401 A3402 A6602 A6801 A7401 A7402 A7403 A7404 A7405 A7408 A7409 A7411 A7413
QIYQEPFKNLK

SEQ ID NO: 888 - protein, 9 aa, Human immunodeficiency virus 1
  source 1..9: note = HLAs: B5701
QKLVGKLNW

SEQ ID NO: 889 - protein, 10 aa, Human immunodeficiency virus 1
  source 1..10: note = HLAs: A0202 A0203 A02264
QKLVGKLNWA

SEQ ID NO: 890 - protein, 10 aa, Human immunodeficiency virus 1
  source 1..10: note = HLAs: B1501 B1503 B15220
QKQITKIQNF

SEQ ID NO: 891 - protein, 11 aa, Human immunodeficiency virus 1
  source 1..11: note = HLAs: A3101 A3104
QKQITKIQNFR

SEQ ID NO: 892 - protein, 10 aa, Human immunodeficiency virus 1
  source 1..10: note = HLAs: A0302 A3402 A3601 A7404 C0303
QLDCTHLEGK

SEQ ID NO: 893 - protein, 10 aa, Human immunodeficiency virus 1
  source 1..10: note = HLAs: A0202 A0203 A0211 A02264
QLGIPHPAGL

SEQ ID NO: 894 - protein, 11 aa, Human immunodeficiency virus 1
  source 1..11: note = HLAs: A0302 A3402 C0303
QLGIPHPAGLK

SEQ ID NO: 895 - protein, 8 aa, Human immunodeficiency virus 1
  source 1..8: note = HLAs: A3402 A3601 C0303 C1602
QLTEAVQK

SEQ ID NO: 896 - protein, 9 aa, Human immunodeficiency virus 1
  source 1..9: note = HLAs: A0205
QMAGDDCVA

SEQ ID NO: 897 - protein, 11 aa, Human immunodeficiency virus 1
  source 1..11: note = HLAs: A0302 A3101 A3104 A3301 A3303 A3305 A3401 A3402 A3601 A6601 A6602 A6603 A6801 A74 A7401 A7402 A7403 A7404 A7405 A7408 A7409 A7411 A7413 C0202 C0210 C0214 C0229 C0303 C0602 C1202 C1602 C1646
QMAGDDCVAGR

SEQ ID NO: 898 - protein, 9 aa, Human immunodeficiency virus 1
  source 1..9: note = HLAs: A0202 A0204 A2301 A2402 A2403 A2407 A2410 A2464 A2901 A2902 A2911 A3002 A3004 A3009 A3010 A3201 A7404 A7410 B1301 B1302 B1501 B1502 B1503 B1512 B1517 B1521 B15220 B1524 B1525 B1527 B1531 B1532 B5701 B5702 B5703 B5802 C0202 C0210 C0229 C1202 C1601 C1602 C1604 C16112 C1646
QMAVFIHNF

SEQ ID NO: 899 - protein, 10 aa, Human immunodeficiency virus 1
  source 1..10: note = HLAs: A0301 A0302 A0305 A1101 A1102 A3001 A3101 A3104 A3303 A3401 A3402 A6602 A6801 A74 A7401 A7402 A7403 A7404 A7405 A7407 A7408 A7409 A7411 A7413
QMAVFIHNFK

SEQ ID NO: 900 - protein, 11 aa, Human immunodeficiency virus 1
  source 1..11: note = HLAs: A3101 A3104 A3301 A3303 A3305 A6801 A7401 A7402 A7403 A7404 A7405 A7408 A7409 A7411 A7413
QMAVFIHNFKR

SEQ ID NO: 901 - protein, 8 aa, Human immunodeficiency virus 1
  source 1..8: note = HLAs: A3101 A3104 A3301 A3303 A3305
QNFRVYYR

SEQ ID NO: 902 - protein, 9 aa, Human immunodeficiency virus 1
  source 1..9: note = HLAs: B0702 B0705 B3501 B3502 B3503 B3505 B3508 B3512 B3532 B3541 B3910 B4201 B4202 B5105 B5108 B5301 B5501 B5502 B5601 B5604 B5610 B6701 C0401 C0403 C0407 C0501 C0509 C0704 C0801 C0802 C0803 C1801 C1802
QPDKSESEL

SEQ ID NO: 903 - protein, 9 aa, Human immunodeficiency virus 1
  source 1..9: note = HLAs: A2501 A3401 A6603 A6802 A6827 B1301 B1502 B1517 B1521 B1525 B1531 B3501 B3505 B3508 B3701 B4002 B4701 B5701 B5702 B5703 B5704 B5802 C0102 C0103 C0144 C0202 C0210 C0214 C0217 C0229 C0302 C0303 C0304 C0305 C0317 C0403 C0501 C0509 C0602 C0704 C0705 C0801 C0802 C0803 C0804 C0812 C1202 C1203 C1502 C1504 C1505 C1509 C1601 C1602 C1604 C16112 C1646 C17 C1701 C1702 C1703 C1704 C1705 C1706 C1707
QSQGVVESM

SEQ ID NO: 904 - protein, 11 aa, Human immunodeficiency virus 1
  source 1..11: note = HLAs: A0302 A1101 A1102 A3401 A3402 A3601 A6801 A7401 A7402 A7403 A7404 A7405 A7408 A7409 A7411 A7413 C0303 C1202 C1602 C1646
QSQGVVESMNK

SEQ ID NO: 905 - protein, 9 aa, Human immunodeficiency virus 1
  source 1..9: note = HLAs: B1517 B5701 B5702 B5703 B5704 B5802 C0202 C0210 C0229 C1202 C1203 C1502 C1504 C1505 C1509 C1602 C1604 C1646
QTKELQKQI

SEQ ID NO: 906 - protein, 9 aa, Human immunodeficiency virus 1
  source 1..9: note = HLAs: B5701 B5702 B5703 B5704 B5801 B5802
QVDCSPGIW

SEQ ID NO: 907 - protein, 11 aa, Human immunodeficiency virus 1
  source 1..11: note = HLAs: B5702 C0403 C0501 C0509 C0802
QVDCSPGIWQL

SEQ ID NO: 908 - protein, 11 aa, Human immunodeficiency virus 1
  source 1..11: note = HLAs: A3303 A3401 A3402 A3601 A6601 A6602 A6801 C0303
QVDKLVSSGIR

SEQ ID NO: 909 - protein, 9 aa, Human immunodeficiency virus 1
  source 1..9: note = HLAs: A0205 A2501 A3001 A3004 A3401 A6602 A6603 B0702 B0801 B1301 B1302 B1502 B1525 B1531 B4201 B4202 B5610 C0102 C0144 C0202 C0210 C0214 C0229 C0302 C0303 C0304 C0305 C0317 C0704 C0801 C0803 C0812 C1202 C1203 C1502 C1504 C1505 C1509 C1601 C1602 C1604 C16112 C1646 C17 C1701 C1702 C1703 C1704 C1705 C1706 C1707
QVRDQAEHL

SEQ ID NO: 910 - protein, 10 aa, Human immunodeficiency virus 1
  source 1..10: note = HLAs: A0301 A0302 A0305 A1101 A1102 A3001 A3101 A3104 A3303 A3401 A3402 A3601 A6601 A6602 A6603 A6801 A74 A7401 A7402 A7403 A7404 A7405 A7408 A7409 A7411 A7413 C0303 C1602
QVRDQAEHLK

SEQ ID NO: 911 - protein, 9 aa, Human immunodeficiency virus 1
  source 1..9: note = HLAs: A2402 A2403 A2407 A2410 A2464
QWPLTEEKI

SEQ ID NO: 912 - protein, 11 aa, Human immunodeficiency virus 1
  source 1..11: note = HLAs: A2301 A2403 A2410
QWTYQIYQEPF

SEQ ID NO: 913 - protein, 9 aa, Human immunodeficiency virus 1
  source 1..9: note = HLAs: A2301 A2402 A2403 A2407 A2410 A2464 B5701 B5704 B5802
QYNVLPQGW

SEQ ID NO: 914 - protein, 10 aa, Human immunodeficiency virus 1
  source 1..10: note = HLAs: A3303
QYNVLPQGWK

SEQ ID NO: 915 - protein, 9 aa, Human immunodeficiency virus 1
  source 1..9: note = HLAs: A0202 A0204 A0205 A0206 A0211 A0214 A3001 A3004 A3009 A3201 B0705 B1301 B1302 B1303 B1503 B1516 B1517 B15220 B1525 B2705 B2707 B3910 B4201 B5701 B5702 B5703 B5704 B5801 B5802 B6701 C0202 C0210 C0229 C0302 C0303 C0304 C0305 C0317 C0701 C0704 C0705 C0706 C0718 C0801 C0803 C0804 C1202 C1203 C1502 C1504 C1505 C1509 C1601 C1602 C1604 C16112 C1646 C17 C1701 C1702 C1703 C1704 C1705 C1706 C1707
RAMASDFNL

SEQ ID NO: 916 - protein, 9 aa, Human immunodeficiency virus 1
  source 1..9: note = HLAs: B5701 B5702 B5703 B5704 B5801 B5802
RAPRKKGCW

SEQ ID NO: 917 - protein, 10 aa, Human immunodeficiency virus 1
  source 1..10: note = HLAs: A3001
RAPRKKGCWK

SEQ ID NO: 918 - protein, 9 aa, Human immunodeficiency virus 1
  source 1..9: note = HLAs: B4101
RDQAEHLKT

SEQ ID NO: 919 - protein, 10 aa, Human immunodeficiency virus 1
  source 1..10: note = HLAs: B4006 B4101 B4102
RDQAEHLKTA

SEQ ID NO: 920 - protein, 11 aa, Human immunodeficiency virus 1
  source 1..11: note = HLAs: B4101 B4102
RDQAEHLKTAV

SEQ ID NO: 921 - protein, 8 aa, Human immunodeficiency virus 1
  source 1..8: note = HLAs: B4006 B4101
RDYGKQMA

SEQ ID NO: 922 - protein, 9 aa, Human immunodeficiency virus 1
  source 1..9: note = HLAs: B3701 B4006 B4101 B4102
RDYGKQMAG

SEQ ID NO: 923 - protein, 8 aa, Human immunodeficiency virus 1
  source 1..8: note = HLAs: B3701 B4002 B4102
RDYVDRFF

SEQ ID NO: 924 - protein, 9 aa, Human immunodeficiency virus 1
  source 1..9: note = HLAs: A0301 A0302 A0305 A1101 A1102 A3001 A3101 A3104 A3402 A7401 A7402 A7403 A7404 A7405 A7408 A7409 A7411 A7413
RDYVDRFFK

SEQ ID NO: 925 - protein, 8 aa, Human immunodeficiency virus 1
  source 1..8: note = HLAs: B3701 B4001 B4002 B4006 B40114 B4016 B4101 B4102 B4415 B4901 B5001 B5201
REILKEPV

SEQ ID NO: 926 - protein, 9 aa, Human immunodeficiency virus 1
  source 1..9: note = HLAs: B1503 B15220 B1801 B1802 B3701 B4002 B4006 B4102 B4402 B4403 B4404 B4407 B4427 B4701 B4703
REILKEPVH

SEQ ID NO: 927 - protein, 10 aa, Human immunodeficiency virus 1
  source 1..10: note = HLAs: B4002 B4006 B4101 B4102 B4415 B4901 B5001
REILKEPVHG

SEQ ID NO: 928 - protein, 11 aa, Human immunodeficiency virus 1
  source 1..11: note = HLAs: A0203 A0211 A02264 B1302 B3701 B4001 B4002 B4006 B40114 B4016 B4101 B4102 B4402 B4415 B4427 B4501 B4507 B4901 B5001
REILKEPVHGV

SEQ ID NO: 929 - protein, 8 aa, Human immunodeficiency virus 1
  source 1..8: note = HLAs: B1401 B1402 B1403 B1503 B15220 B1801 B1802 B1803 B3701 B4001 B4002 B4006 B40114 B4016 B4101 B4102 B4415 B4427 B4701 B4901 B5001 B5201 C0704
RELERFAL

SEQ ID NO: 930 - protein, 9 aa, Human immunodeficiency virus 1
  source 1..9: note = HLAs: B4101
RELNKRTQD

SEQ ID NO: 931 - protein, 10 aa, Human immunodeficiency virus 1
  source 1..10: note = HLAs: B1503 B15220 B3701 B4001 B4002 B4006 B40114 B4016 B4101 B4102 B4402 B4403 B4404 B4405 B4407 B4427 B4701 B4703 B4901
RELNKRTQDF

SEQ ID NO: 932 - protein, 11 aa, Human immunodeficiency virus 1
  source 1..11: note = HLAs: B4402 B4403 B4404 B4407 B4427 B5701
RELNKRTQDFW

SEQ ID NO: 933 - protein, 8 aa, Human immunodeficiency virus 1
  source 1..8: note = HLAs: B3701 B4101 B4102
REPRGSDI

SEQ ID NO: 934 - protein, 9 aa, Human immunodeficiency virus 1
  source 1..9: note = HLAs: B4002 B4006 B40114 B4101 B4102 B4415 B4501 B4507 B4901 B5001
REPRGSDIA

SEQ ID NO: 935 - protein, 10 aa, Human immunodeficiency virus 1
  source 1..10: note = HLAs: B0702 B0705 B4006 B4101
REPRGSDIAG

SEQ ID NO: 936 - protein, 11 aa, Human immunodeficiency virus 1
  source 1..11: note = HLAs: B4006 B4101
REPRGSDIAGT

SEQ ID NO: 937 - protein, 9 aa, Human immunodeficiency virus 1
  source 1..9: note = HLAs: B1503 B15220 B1525 B2702 B2705 C0701 C0702 C0705 C0706 C0718
RKAKIIRDY

SEQ ID NO: 938 - protein, 9 aa, Human immunodeficiency virus 1
  source 1..9: note = HLAs: B1503 B15220 B2705 B2706 B2707 C0701 C0702 C0704 C0705 C0706 C0718
RKLVDFREL

SEQ ID NO: 939 - protein, 11 aa, Human immunodeficiency virus 1
  source 1..11: note = HLAs: A0301 A0305 A1101 A1102
RKLVDFRELNK

SEQ ID NO: 940 - protein, 9 aa, Human immunodeficiency virus 1
  source 1..9: note = HLAs: B1503 B15220 B2706 B2707
RKVLFLDGI

SEQ ID NO: 941 - protein, 8 aa, Human immunodeficiency virus 1
  source 1..8: note = HLAs: B1503 B15220
RKYTAFTI

SEQ ID NO: 942 - protein, 11 aa, Human immunodeficiency virus 1
  source 1..11: note = HLAs: A2403 B1503 B1517 B15220
RKYTAFTIPSI

SEQ ID NO: 943 - protein, 9 aa, Human immunodeficiency virus 1
  source 1..9: note = HLAs: A2402 A2403 A2407 A2410 A3201 B1301 B1524 B5701 B5702 B5703 B5704 B5801 B5802
RLPIQKETW

SEQ ID NO: 944 - protein, 8 aa, Human immunodeficiency virus 1
  source 1..8: note = HLAs: A0301 A0305 A3001
RLRPGGKK

SEQ ID NO: 945 - protein, 9 aa, Human immunodeficiency virus 1
  source 1..9: note = HLAs: A0301 A0302 A0305 A1101 A1102 A3001 A3101 A3104 A3402 A7401 A7402 A7403 A7404 A7405 A7407 A7408 A7409 A7411 A7413 B2705
RLRPGGKKK

SEQ ID NO: 946 - protein, 10 aa, Human immunodeficiency virus 1
  source 1..10: note = HLAs: A0301 A0305 A3001 A3002 A3004 A3009 A3010 A3201 A7401 A7402 A7403 A7404 A7405 A7409 A7410 A7411 B1501 B1502 B1503 B1512 B15220 B1525 B1527 B1531 B1532 C0705 C1202
RLRPGGKKKY

SEQ ID NO: 947 - protein, 8 aa, Human immunodeficiency virus 1
  source 1..8: note = HLAs: A0211 A3201 B1503 B15220 B5201
RMYSPVSI

SEQ ID NO: 948 - protein, 9 aa, Human immunodeficiency virus 1
  source 1..9: note = HLAs: A0201 A0202 A0203 A0204 A0205 A0206 A0207 A0211 A0214 A02264 A0230 A2403 A2410 A3001 A3002 A3004 A3009 A3010 A3201 A7401 A7402 A7403 A7404 A7405 A7408 A7409 A7411 B0705 B1301 B1302 B1303 B1501 B1502 B1503 B1512 B1517 B1521 B15220 B1524 B1525 B1527 B1531 B1532 B2705 B2706 B2707 B4012 B4801 B4803 B5201 B5802 C0102 C0103 C0144 C0202 C0210 C0214 C0217 C0229 C0302 C0303 C0304 C0305 C0317 C0404 C0602 C0701 C0702 C0704 C0705 C0706 C0718 C0801 C0803 C0804 C0812 C1202 C1203 C1402 C1403 C1502 C1504 C1505 C1509 C1601 C1602 C1604 C16112 C1646 C17 C1701 C1702 C1703 C1704 C1705 C1706 C1707
RMYSPVSIL

SEQ ID NO: 949 - protein, 10 aa, Human immunodeficiency virus 1
  source 1..10: note = HLAs: A0202 A0203 A0211 A02264 B1503 B15220 B1525
RMYSPVSILD

SEQ ID NO: 950 - protein, 11 aa, Human immunodeficiency virus 1
  source 1..11: note = HLAs: A0201 A0203 A0204 A0211 A02264 A0230 A2403 A3201 B1301 B1302
RMYSPVSILDI

SEQ ID NO: 951 - protein, 9 aa, Human immunodeficiency virus 1
  source 1..9: note = HLAs: A3001
RNCRAPRKK

SEQ ID NO: 952 - protein, 8 aa, Human immunodeficiency virus 1
  source 1..8: note = HLAs: B1503 B15220 B1525 C0701 C0702 C0704 C0705 C0706 C0718
RQGPKEPF

SEQ ID NO: 953 - protein, 9 aa, Human immunodeficiency virus 1
  source 1..9: note = HLAs: A0301 A0302 A0305 A3001 A3101 A3104 A3303 A74 A7401 A7402 A7403 A7404 A7405 A7407 A7408 A7409 A7411 A7413 B2705
RQGPKEPFR

SEQ ID NO: 954 - protein, 11 aa, Human immunodeficiency virus 1
  source 1..11: note = HLAs: A3002 A3004 A3009 A3010 B1501 B1502 B1503 B1512 B15220 B1525 B1527 B1532 C0702
RQGPKEPFRDY

SEQ ID NO: 955 - protein, 10 aa, Human immunodeficiency virus 1
  source 1..10: note = HLAs: B1503 B15220 B2702 B2703 B2704 B2705 C0701 C0705 C0706 C0718
RRKAKIIRDY

SEQ ID NO: 956 - protein, 8 aa, Human immunodeficiency virus 1
  source 1..8: note = HLAs: A1101 A1102 A3001 A3104
RTLNAWVK

SEQ ID NO: 957 - protein, 9 aa, Human immunodeficiency virus 1
  source 1..9: note = HLAs: A0201 A0202 A0204 A0205 A0206 A0211 A0214 A0230 A3001 A3004 A3009 A3201 A6802 A6827 A7404 B1301 B1302 B1303 B1516 B1517 B5701 B5702 B5703 B5704 B5801 B5802 C0202 C0210 C0229 C1502 C1504 C1505 C1509 C1602 C1646 C1701 C1702 C1703 C1704 C1705
RTLNAWVKV

SEQ ID NO: 958 - protein, 10 aa, Human immunodeficiency virus 1
  source 1..10: note = HLAs: A0203 A0205 A0206 A0211 A02264 A3001 A3201 B5703 B5802 C1502 C1505
RTLNAWVKVV

SEQ ID NO: 959 - protein, 8 aa, Human immunodeficiency virus 1
  source 1..8: note = HLAs: C1502 C1505
RTQDFWEV

SEQ ID NO: 960 - protein, 10 aa, Human immunodeficiency virus 1
  source 1..10: note = HLAs: A0204 A0205 A0207 A3009 A3201 A7404 B1301 B1302 B1517 B5701 B5702 B5703 B5704 B5802 C0202 C0210 C0229 C0403 C0501 C0509 C0704 C0801 C0803 C0804 C0812 C1502 C1504 C1505 C1509 C1601 C1602 C16112 C1646 C17 C1701 C1702 C1703 C1704 C1705 C1706 C1707
RTQDFWEVQL

SEQ ID NO: 961 - protein, 10 aa, Human immunodeficiency virus 1
  source 1..10: note = HLAs: A0201 A0202 A0203 A0204 A0205 A0206 A0207 A0211 A0214 A02264 A0230 A3001 A6802 A6827 B1301 B1302 B1303
RVLAEAMSQV

SEQ ID NO: 962 - protein, 11 aa, Human immunodeficiency virus 1
  source 1..11: note = HLAs: A0202 A0203 A0211 A02264
RVLAEAMSQVT

SEQ ID NO: 963 - protein, 8 aa, Human immunodeficiency virus 1
  source 1..8: note = HLAs: A3101 A3104
RVYYRDSR

SEQ ID NO: 964 - protein, 9 aa, Human immunodeficiency virus 1
  source 1..9: note = HLAs: A3001 A3101 A3104
RWIILGLNK

SEQ ID NO: 965 - protein, 10 aa, Human immunodeficiency virus 1
  source 1..10: note = HLAs: A0203 A02264 A2301 A2402 A2403 A2407 A2410
RWIILGLNKI

SEQ ID NO: 966 - protein, 10 aa, Human immunodeficiency virus 1
  source 1..10: note = HLAs: A3001
RYQYNVLPQG

SEQ ID NO: 967 - protein, 11 aa, Human immunodeficiency virus 1
  source 1..11: note = HLAs: A2301 A2402 A2403 A2407 A2410 A2464
RYQYNVLPQGW

SEQ ID NO: 968 - protein, 9 aa, Human immunodeficiency virus 1
  source 1..9: note = HLAs: A0205 B0801 B5101 B5102 B5105 B5107 B5108 B5109 B5201 C0102 C0103 C0144 C0202 C0210 C0214 C0217 C0229 C0302 C0303 C0304 C0305 C0317 C0403 C0404 C0501 C0509 C0602 C0702 C0704 C0705 C0801 C0802 C0803 C0804 C0812 C1202 C1203 C1502 C1504 C1505 C1509 C1601 C1602 C1604 C16112 C1646 C17 C1701 C1702 C1703 C1704 C1705 C1706 C1707
SAGERIIDI

SEQ ID NO: 969 - protein, 10 aa, Human immunodeficiency virus 1
  source 1..10: note = HLAs: C0102 C0103 C0144 C0202 C0210 C0229 C0302 C0303 C0304 C0305 C0317 C0704 C0801 C0803 C0804 C0812 C1202 C1203 C1502 C1504 C1505 C1509 C1601 C1602 C1604 C16112 C1646 C17 C1701 C1702 C1703 C1704 C1705 C1706 C1707
SAHTNDVKQL

SEQ ID NO: 970 - protein, 9 aa, Human immunodeficiency virus 1
  source 1..9: note = HLAs: C1202
SALSEGATP

SEQ ID NO: 971 - protein, 8 aa, Human immunodeficiency virus 1
  source 1..8: note = HLAs: B3701 B4002 B4006 B4101 B4102 B4901 B5001 B5107 B5201
SDFNLPPV

SEQ ID NO: 972 - protein, 9 aa, Human immunodeficiency virus 1
  source 1..9: note = HLAs: B1302 B1303 B3701 B3906 B4001 B4002 B4006 B40114 B4016 B4101 B4102 B4415 B4501 B4507 B4901 B5001 B5107 B5108 B5109 B5201 C0704
SDFNLPPVV

SEQ ID NO: 973 - protein, 10 aa, Human immunodeficiency virus 1
  source 1..10: note = HLAs: B4006 B4101 B4102 B4501 B4507 B5001
SDFNLPPVVA

SEQ ID NO: 974 - protein, 11 aa, Human immunodeficiency virus 1
  source 1..11: note = HLAs: A3402 A3601 C0303 C1202 C1602 C1646
SDFNLPPVVAK

SEQ ID NO: 975 - protein, 9 aa, Human immunodeficiency virus 1
  source 1..9: note = HLAs: B3701 B4006 B4101 B4102 B5001
SDIAGTTST

SEQ ID NO: 976 - protein, 10 aa, Human immunodeficiency virus 1
  source 1..10: note = HLAs: A0202 A0203 A02264 B3701 B4002 B4006 B40114 B4016 B4101 B4102 B4701 B4901 B5001 C0704
SDIAGTTSTL

SEQ ID NO: 977 - protein, 9 aa, Human immunodeficiency virus 1
  source 1..9: note = HLAs: A3301 A3303 A3305 A3401 A3402 A3601 A6601 A6602 A6603 A6801 A7404 A7405 B3701 B4701 C0202 C0210 C0229 C0303 C0602 C1202 C1602 C1646
SDLEIGQHR

SEQ ID NO: 978 - protein, 10 aa, Human immunodeficiency virus 1
  source 1..10: note = HLAs: B4006 B4101
SDLEIGQHRA

SEQ ID NO: 979 - protein, 9 aa, Human immunodeficiency virus 1
  source 1..9: note = HLAs: B3701 B4001 B4002 B4006 B40114 B4016 B4101 B4102 B4402 B4403 B4404 B4405 B4407 B4415 B4427 B4501 B4507 B4901 B5001 C0704
SEGATPQDL

SEQ ID NO: 980 - protein, 11 aa, Human immunodeficiency virus 1
  source 1..11: note = HLAs: B4006 B4101
SEGATPQDLNT

SEQ ID NO: 981 - protein, 8 aa, Human immunodeficiency virus 1
  source 1..8: note = HLAs: B1801 B1802 B1803 B3701 B4001 B4002 B4006 B40114 B4016 B4101 B4102 B4415 B4901 B5001 B5107 B5201
SELVNQII

SEQ ID NO: 982 - protein, 9 aa, Human immunodeficiency virus 1
  source 1..9: note = HLAs: B4006 B4101 B4102
SELVNQIIE

SEQ ID NO: 983 - protein, 9 aa, Human immunodeficiency virus 1
  source 1..9: note = HLAs: B3701 B4002 B4006 B40114 B4101 B4102 B4415 B4501 B4507 B4901 B5001
SEQTRANSP

SEQ ID NO: 984 - protein, 9 aa, Human immunodeficiency virus 1
  source 1..9: note = HLAs: A0204 A0205 A0206 A0214 B1301 B1302 B1303 B1510 B1531 B1537 B1801 B1802 B1803 B3701 B3801 B3802 B3905 B3906 B4001 B4002 B4006 B40114 B4012 B4016 B4101 B4102 B4402 B4403 B4404 B4405 B4407 B4410 B4415 B4427 B4501 B4507 B4701 B4703 B4803 B4901 B5001 B5107 B5201 C0704 C1202
SESELVNQI

SEQ ID NO: 985 - protein, 10 aa, Human immunodeficiency virus 1
  source 1..10: note = HLAs: B1302 B1303 B3701 B4001 B4002 B4006 B40114 B4016 B4101 B4102 B4402 B4403 B4404 B4405 B4407 B4410 B4415 B4427 B4501 B4507 B4901 B5001
SESELVNQII

SEQ ID NO: 986 - protein, 9 aa, Human immunodeficiency virus 1
  source 1..9: note = HLAs: B4006 B4101 B4102 B4415 B4501 B4507 B5001
SEVNIVTDS

SEQ ID NO: 987 - protein, 11 aa, Human immunodeficiency virus 1
  source 1..11: note = HLAs: B1502 B1503 B15220 B1531 B1801 B1802 B1803 B4402 B4403 B4404 B4407 B4427 B4701 B4703
SEVNIVTDSQY

SEQ ID NO: 988 - protein, 9 aa, Human immunodeficiency virus 1
  source 1..9: note = HLAs: B0801 B1401 B1402 B2705 B5802 C0102 C0144 C0202 C0210 C0214 C0229 C0303 C0304 C0305 C0317 C0602 C0701 C0702 C0704 C0705 C0706 C0718 C0801 C0803 C1202 C1203 C1502 C1504 C1505 C1509 C1601 C1602 C1604 C16112 C1646 C17 C1701 C1702 C1703 C1704 C1705 C1706 C1707
SGIRKVLFL

SEQ ID NO: 989 - protein, 8 aa, Human immunodeficiency virus 1
  source 1..8: note = HLAs: B5201
SGYIEAEV

SEQ ID NO: 990 - protein, 9 aa, Human immunodeficiency virus 1
  source 1..9: note = HLAs: B1302 B5101 B5102 B5107 B5108 B5109 B5201 C0704 C0801 C0803 C1505
SGYIEAEVI

SEQ ID NO: 991 - protein, 10 aa, Human immunodeficiency virus 1
  source 1..10: note = HLAs: A0301 A0302 A0305 A1101 A1102 A3001 A3104 A3401 A3402 A3601 A6601 A6602 A6603 A6801 A74 A7401 A7402 A7403 A7404 A7405 A7408 A7409 A7411 A7413 C0303 C1602
SILDIRQGPK

SEQ ID NO: 992 - protein, 9 aa, Human immunodeficiency virus 1
  source 1..9: note = HLAs: A0201 A0202 A0203 A0204 A0205 A0206 A0207 A0211 A0214 A02264 A0230 B1301 B1302 B1303 C1502 C1505 C17 C1701 C1702 C1703 C1704 C1705 C1706
SINNETPGI

SEQ ID NO: 993 - protein, 10 aa, Human immunodeficiency virus 1
  source 1..10: note = HLAs: A3101 A3104 A3303 A3401 A3402 A3601 A6601 A6602 A6603 A6801 A7401 A7402 A7403 A7404 A7405 A7408 A7409 A7411 A7413 C0202 C0210 C0229 C0303 C0602 C1202 C1602 C1646
SINNETPGIR

SEQ ID NO: 994 - protein, 11 aa, Human immunodeficiency virus 1
  source 1..11: note = HLAs: A0101 A0102 A0103 A0109 A0123 A2901 A2902 A2911 A3002 A3004 A3009 A3010 A3601 A7404 A7410 B1501 B1502 B1512 B1525 B1527 B1531 B1532 C0202 C0210 C0229 C1202 C1504 C1509 C1602 C1646
SINNETPGIRY

SEQ ID NO: 995 - protein, 8 aa, Human immunodeficiency virus 1
  source 1..8: note = HLAs: C0704
SKDLIAEI

SEQ ID NO: 996 - protein, 10 aa, Human immunodeficiency virus 1
  source 1..10: note = HLAs: C0303
SKDLIAEIQK

SEQ ID NO: 997 - protein, 9 aa, Human immunodeficiency virus 1
  source 1..9: note = HLAs: B1501 B1502 B1503 B1518 B1521 B15220 B1525 B1527 B1531 B1532 C0701 C0702 C0705 C0706 C0718 C1202
SKIGPENPY

SEQ ID NO: 998 - protein, 9 aa, Human immunodeficiency virus 1
  source 1..9: note = HLAs: A0201 A0202 A0203 A0204 A0205 A0206 A0207 A0211 A0214 A02264 A0230 A7404 B1301 B1302 B1303 B1502 B1525 B1531 B3802 B4701 B5201 C0102 C0103 C0144 C0202 C0210 C0214 C0229 C0302 C0303 C0304 C0305 C0317 C0401 C0403 C0404 C0407 C0501 C0509 C0702 C0704 C0705 C0801 C0802 C0803 C0804 C0812 C1202 C1203 C1402 C1403 C1502 C1504 C1505 C1509 C1601 C1602 C1604 C16112 C1646 C17 C1701 C1702 C1703 C1704 C1705 C1706 C1707 C1801 C1802
SLQTGSEEL

SEQ ID NO: 999 - protein, 8 aa, Human immunodeficiency virus 1
  source 1..8: note = HLAs: A0302
SMNKELKK

SEQ ID NO: 1000 - protein, 9 aa, Human immunodeficiency virus 1
  source 1..9: note = HLAs: A0201 A0202 A0203 A0204 A0205 A0207 A0211 A0214 A02264 A0230 A3201 B1301 B1302 B1303 B1525 B2705 B5201 C0704 C1502 C1505 C1602
SMNKELKKI

SEQ ID NO: 1001 - protein, 9 aa, Human immunodeficiency virus 1
  source 1..9: note = HLAs: A0202 A0204 A0205 A0206 A0211 A2301 A2402 A2403 A2407 A2410 A2464 A2902 A2911 A3004 A3009 A3201 A7404 B1301 B1302 B1501 B1502 B1503 B1512 B1521 B15220 B1524 B1525 B1527 B1531 B1532 B3541 B4601 B4701 B5703 C0202 C0210 C0229 C0302 C0702 C1202 C1203 C1601 C1602 C1604 C16112 C1646
SMTKILEPF

SEQ ID NO: 1002 - protein, 10 aa, Human immunodeficiency virus 1
  source 1..10: note = HLAs: A0302 A3101 A3104 A3301 A3303 A3305 A3401 A3402 A6801 A7401 A7402 A7403 A7404 A7405 A7407 A7408 A7409 A7411 A7413
SMTKILEPFR

SEQ ID NO: 1003 - protein, 8 aa, Human immunodeficiency virus 1
  source 1..8: note = HLAs: B5501 B5502
SPAIFQSS

SEQ ID NO: 1004 - protein, 9 aa, Human immunodeficiency virus 1
  source 1..9: note = HLAs: B0702 B0705 B0801 B1401 B1402 B1502 B1508 B1511 B1521 B1531 B3501 B3502 B3503 B3505 B3508 B3512 B3532 B3541 B3543 B3910 B4201 B4202 B5108 B5301 B5501 B5502 B5601 B5604 B5610 B6701 B8101 B8103 B8201 B8202
SPAIFQSSM

SEQ ID NO: 1005 - protein, 8 aa, Human immunodeficiency virus 1
  source 1..8: note = HLAs: B3508 B4201
SPEVIPMF

SEQ ID NO: 1006 - protein, 9 aa, Human immunodeficiency virus 1
  source 1..9: note = HLAs: B5502
SPEVIPMFS

SEQ ID NO: 1007 - protein, 10 aa, Human immunodeficiency virus 1
  source 1..10: note = HLAs: B4002 B4006 B4101 B4501 B4507 B5001 B5401 B5501 B5502 B5601 B5610
SPEVIPMFSA

SEQ ID NO: 1008 - protein, 11 aa, Human immunodeficiency virus 1
  source 1..11: note = HLAs: B0702 B0705 B3503 B3910 B4201 B4202 B5501 B5502 B5601 B5604 B5610 B6701 B8101 B8103
SPEVIPMFSAL

SEQ ID NO: 1009 - protein, 8 aa, Human immunodeficiency virus 1
  source 1..8: note = HLAs: B0705 B3503 B3910 B4201 B5101 B5102 B5105 B5107 B5108 B5109 B5401 B5501 B5502 B5601 B5604 B5610 B6701 B7801
SPIETVPV

SEQ ID NO: 1010 - protein, 9 aa, Human immunodeficiency virus 1
  source 1..9: note = HLAs: A3401 A3402 A6601 A6602 A6801 B3501 B3505 B4201 B5501 B5502 B5601 B5604 B5610 C0303 C1602
SPIETVPVK

SEQ ID NO: 1011 - protein, 10 aa, Human immunodeficiency virus 1
  source 1..10: note = HLAs: B0702 B0705 B0801 B1531 B3501 B3502 B3503 B3505 B3508 B3512 B3532 B3541 B3910 B4008 B4201 B4202 B5101 B5102 B5105 B5108 B5109 B5301 B5401 B5501 B5502 B5601 B5604 B5610 B6701 B7801 B8101 B8103 B8201 B8202 C0102 C0144 C0303 C0304 C0704 C0801 C0803 C17 C1701 C1702 C1703 C1704 C1705 C1706
SPIETVPVKL

SEQ ID NO: 1012 - protein, 11 aa, Human immunodeficiency virus 1
  source 1..11: note = HLAs: A3402
SPIETVPVKLK

SEQ ID NO: 1013 - protein, 8 aa, Human immunodeficiency virus 1
  source 1..8: note = HLAs: B0705 B5301
SPRTLNAW

SEQ ID NO: 1014 - protein, 9 aa, Human immunodeficiency virus 1
  source 1..9: note = HLAs: B0702 B0705 B4201 B4202 B5501 B5502 B5601 B5604 B5610 B6701 B8101 B8103
SPRTLNAWV

SEQ ID NO: 1015 - protein, 11 aa, Human immunodeficiency virus 1
  source 1..11: note = HLAs: B0702 B0705 B4201 B5501 B5502 B5601 B5610
SPRTLNAWVKV

SEQ ID NO: 1016 - protein, 8 aa, Human immunodeficiency virus 1
  source 1..8: note = HLAs: B5101 B5102 B5108 B5109 B5501 B5502 B5601
SPVSILDI

SEQ ID NO: 1017 - protein, 8 aa, Human immunodeficiency virus 1
  source 1..8: note = HLAs: B1301 B1302 B1503 B15220 B1525 B3701 B5201 C0704
SQGVVESM

SEQ ID NO: 1018 - protein, 10 aa, Human immunodeficiency virus 1
  source 1..10: note = HLAs: A0302 A1101 A1102 A3402 A3601 A7404 C0303 C1602
SQGVVESMNK

SEQ ID NO: 1019 - protein, 9 aa, Human immunodeficiency virus 1
  source 1..9: note = HLAs: A0201 A0202 A0203 A0204 A0205 A0206 A0207 A0211 A0214 A02264 A0230 B1301 B1302 B1303 B1401 B1402 B1501 B1503 B1510 B15220 B1525 B1537 B2706 B3701 B3801 B3802 B3901 B3905 B3906 B3924 B4002 B4006 B40114 B4101 B4102 B4701 B4703 B4901 B5001 B5107 B5201 B7301 C0602 C0704 C1502 C1505 C1701 C1702 C1703 C1704 C1705
SQIYPGIKV

SEQ ID NO: 1020 - protein, 8 aa, Human immunodeficiency virus 1
  source 1..8: note = HLAs: B1302 B1303 B1503 B15220 B5107 B5201
SQYALGII

SEQ ID NO: 1021 - protein, 9 aa, Human immunodeficiency virus 1
  source 1..9: note = HLAs: B1503 B15220
SQYALGIIQ

SEQ ID NO: 1022 - protein, 10 aa, Human immunodeficiency virus 1
  source 1..10: note = HLAs: A0201 A0202 A0203 A0204 A0205 A0206 A0211 A0214 A02264 A0230 B1302 B1303 B1503 B15220 B3906 B4006 B5001 B5201 B7301
SQYALGIIQA

SEQ ID NO: 1023 - protein, 9 aa, Human immunodeficiency virus 1
  source 1..9: note = HLAs: B1401 B1402 B1403 B1510 B2702 B2703 B2704 B2705 B2706 B2707 B3801 B3802 B3901 B3906 B3909 B3924 B7301 C0602 C0701 C0702 C0704 C0705 C0706 C0718
SRELERFAL

SEQ ID NO: 1024 - protein, 8 aa, Human immunodeficiency virus 1
  source 1..8: note = HLAs: B0801 C0102 C0144 C0202 C0210 C0229 C0302 C0303 C0304 C0305 C0317 C0602 C0704 C0705 C0801 C0803 C1202 C1203 C1502 C1504 C1505 C1509 C1601 C1602 C1604 C16112 C1646 C1701 C1702 C1703 C1704 C1705
SSGIRKVL

SEQ ID NO: 1025 - protein, 9 aa, Human immunodeficiency virus 1
  source 1..9: note = HLAs: B1502 B1517 B1525 B1531 B5701 B5702 B5703 B5704 B5801 B5802 C0202 C0210 C0229 C0302 C0702 C0704 C0705 C1202 C1203 C1502 C1504 C1505 C1509 C1601 C1602 C1604 C16112 C1646
SSGIRKVLF

SEQ ID NO: 1026 - protein, 10 aa, Human immunodeficiency virus 1
  source 1..10: note = HLAs: B1517
SSGIRKVLFL

SEQ ID NO: 1027 - protein, 10 aa, Human immunodeficiency virus 1
  source 1..10: note = HLAs: B1517
STKWRKLVDF

SEQ ID NO: 1028 - protein, 11 aa, Human immunodeficiency virus 1
  source 1..11: note = HLAs: A3101 A3104 A3303 A6801
STKWRKLVDFR

SEQ ID NO: 1029 - protein, 11 aa, Human immunodeficiency virus 1
  source 1..11: note = HLAs: A0101 A0109 A3009 A3601 B1502 B1525 B1531 C1202
SVTVLDVGDAY

SEQ ID NO: 1030 - protein, 9 aa, Human immunodeficiency virus 1
  source 1..9: note = HLAs: C0303
SWTVNDIQK

SEQ ID NO: 1031 - protein, 10 aa, Human immunodeficiency virus 1
  source 1..10: note = HLAs: A2407 A2410
SWTVNDIQKL

SEQ ID NO: 1032 - protein, 9 aa, Human immunodeficiency virus 1
  source 1..9: note = HLAs: A2301 A2402 A2403 A2407 A2410 A2464 C1402 C1403
SWVPAHKGI

SEQ ID NO: 1033 - protein, 11 aa, Human immunodeficiency virus 1
  source 1..11: note = HLAs: B2705 B4701 C1202
TACQGVGGPGH

SEQ ID NO: 1034 - protein, 8 aa, Human immunodeficiency virus 1
  source 1..8: note = HLAs: B1303 B5101 B5102 B5105 B5107 B5108 B5109 B5201 C0102 C0144 C0202 C0210 C0217 C0229 C0302 C0303 C0304 C0305 C0317 C0704 C0801 C0803 C0804 C0812 C1202 C1203 C1502 C1504 C1505 C1509 C1601 C1602 C1604 C16112 C1646 C17 C1701 C1702 C1703 C1704 C1705 C1706 C1707
TAFTIPSI

SEQ ID NO: 1035 - protein, 8 aa, Human immunodeficiency virus 1
  source 1..8: note = HLAs: C0302 C1202 C1203 C1601 C1602 C1604 C16112 C1646
TAVQMAVF

SEQ ID NO: 1036 - protein, 9 aa, Human immunodeficiency virus 1
  source 1..9: note = HLAs: A0205 A6802 A6827 A6901 B5101 B5102 B5107 B5108 B5109 B5201 B5802 C0202 C0210 C0217 C0229 C0302 C0303 C0304 C0305 C0317 C0704 C0801 C0803 C1202 C1203 C1502 C1504 C1505 C1509 C1601 C1602 C1604 C16112 C1646 C17 C1701 C1702 C1703 C1704 C1705 C1706 C1707
TAVQMAVFI

SEQ ID NO: 1037 - protein, 8 aa, Human immunodeficiency virus 1
  source 1..8: note = HLAs: B3701 B4002 B4006 B40114 B4016 B4101 B4102 B4901 C0704
TDIQTKEL

SEQ ID NO: 1038 - protein, 10 aa, Human immunodeficiency virus 1
  source 1..10: note = HLAs: A1101 A1102 A3402 A3601 B4701 C0303 C1602
TDIQTKELQK

SEQ ID NO: 1039 - protein, 9 aa, Human immunodeficiency virus 1
  source 1..9: note = HLAs: B3701 B4002 B4006 B4101 B4102
TDSQYALGI

SEQ ID NO: 1040 - protein, 9 aa, Human immunodeficiency virus 1
  source 1..9: note = HLAs: B4006 B4101
TDTLLVQNA

SEQ ID NO: 1041 - protein, 8 aa, Human immunodeficiency virus 1
  source 1..8: note = HLAs: B1801 B1802 B1803 B3701 B4001 B4002 B4006 B40114 B4016 B4101 B4102 B4402 B4403 B4404 B4405 B4407 B4415 B4427 B4501 B4507 B4901 B5001 C0704
TEEKIKAL

SEQ ID NO: 1042 - protein, 9 aa, Human immunodeficiency virus 1
  source 1..9: note = HLAs: B3701 B4002 B4006 B40114 B4101 B4102 B4415 B4501 B4507 B4901 B5001
TEEKIKALT

SEQ ID NO: 1043 - protein, 11 aa, Human immunodeficiency virus 1
  source 1..11: note = HLAs: B3701 B4002 B4006 B40114 B4101 B4102 B4415 B4901 B5001
TEEKIKALTEI

SEQ ID NO: 1044 - protein, 9 aa, Human immunodeficiency virus 1
  source 1..9: note = HLAs: B1301 B1302 B1303 B1801 B1802 B1803 B3701 B3801 B3802 B4001 B4002 B4006 B40114 B4016 B4101 B4102 B4402 B4403 B4404 B4405 B4407 B4410 B4415 B4427 B4501 B4507 B4701 B4901 B5001 B5107 B5201 C0704
TEMEKEGKI

SEQ ID NO: 1045 - protein, 10 aa, Human immunodeficiency virus 1
  source 1..10: note = HLAs: B4006 B4101 B4102 B4415 B4501 B4507 B5001
TEMEKEGKIS

SEQ ID NO: 1046 - protein, 8 aa, Human immunodeficiency virus 1
  source 1..8: note = HLAs: B1801 B1802 B1803 B3701 B4002 B4102 B4402 B4403 B4404 B4407 B4427
TERQANFF

SEQ ID NO: 1047 - protein, 9 aa, Human immunodeficiency virus 1
  source 1..9: note = HLAs: A3101 A3104 A3301 A3303 A3305 A3401 A6801
TERQANFFR

SEQ ID NO: 1048 - protein, 10 aa, Human immunodeficiency virus 1
  source 1..10: note = HLAs: A3101 A3104 A3301 A3303 A3305 A3401 A6801 A7404 A7405 C0303
TFYVDGAANR

SEQ ID NO: 1049 - protein, 8 aa, Human immunodeficiency virus 1
  source 1..8: note = HLAs: B1401 B1402 B1403 B1510 B1537 B3801 B3802 B3901 B3905 B3906 B3909 B3924
THLEGKII

SEQ ID NO: 1050 - protein, 9 aa, Human immunodeficiency virus 1
  source 1..9: note = HLAs: B1401 B1402 B1403 B1510 B1518 B1537 B2706 B3801 B3802 B3901 B3905 B3906 B3909 B3924 B7301 C0701 C0702 C0704 C0705 C0706 C0718
THLEGKIIL

SEQ ID NO: 1051 - protein, 10 aa, Human immunodeficiency virus 1
  source 1..10: note = HLAs: A0211 B1401 B1402 B1510 B1537 B3801 B3802 B3901 B3905 B3906 B3909 B3924
THLEGKIILV

SEQ ID NO: 1052 - protein, 11 aa, Human immunodeficiency virus 1
  source 1..11: note = HLAs: B3906
THLEGKIILVA

SEQ ID NO: 1053 - protein, 9 aa, Human immunodeficiency virus 1
  source 1..9: note = HLAs: A2501 A3201 B1301 B1502 B1516 B1517 B1524 B1525 B1531 B5301 B5701 B5702 B5703 B5704 B5801 B5802 C0202 C0210 C0229 C1202 C1504 C1509 C1601 C1602 C16112 C1646
TINEEAAEW

SEQ ID NO: 1054 - protein, 11 aa, Human immunodeficiency virus 1
  source 1..11: note = HLAs: A3303 A3401 A3402 A3601 A6602 A6801 A7404 A7405 C0202 C0210 C0229 C0303 C1202 C1602 C1646
TINEEAAEWDR

SEQ ID NO: 1055 - protein, 9 aa, Human immunodeficiency virus 1
  source 1..9: note = HLAs: B1501 B1502 B1503 B1518 B1521 B15220 B1525 B1531 C0702 C0705
TKIQNFRVY

SEQ ID NO: 1056 - protein, 10 aa, Human immunodeficiency virus 1
  source 1..10: note = HLAs: A1101 A1102 A2901 A2902 A2911 A3002 A3009 A3010 A3402 B1503 B15220 B1525
TKIQNFRVYY

SEQ ID NO: 1057 - protein, 11 aa, Human immunodeficiency virus 1
  source 1..11: note = HLAs: A3101 A3104 A3303 A7407
TKIQNFRVYYR

SEQ ID NO: 1058 - protein, 9 aa, Human immunodeficiency virus 1
  source 1..9: note = HLAs: B1503 B15220
TKWRKLVDF

SEQ ID NO: 1059 - protein, 10 aa, Human immunodeficiency virus 1
  source 1..10: note = HLAs: A3101 A3104 A3303
TKWRKLVDFR

SEQ ID NO: 1060 - protein, 9 aa, Human immunodeficiency virus 1
  source 1..9: note = HLAs: A0201 A0202 A0203 A0204 A0205 A0206 A0207 A0211 A0214 A02264 A0230 B1302 B1303 B5201 C0602 C1502 C1505 C1602 C1646
TLNAWVKVV

SEQ ID NO: 1061 - protein, 9 aa, Human immunodeficiency virus 1
  source 1..9: note = HLAs: A0201 A0202 A0203 A0204 A0205 A0206 A0207 A0211 A0214 A02264 A0230 A3201 A6802 A6827 A6901 B1302 B5201 C0102 C0144 C1502 C1505 C17 C1701 C1702 C1703 C1704 C1705 C1706
TLNFPISPI

SEQ ID NO: 1062 - protein, 10 aa, Human immunodeficiency virus 1
  source 1..10: note = HLAs: A0203 A02264
TLNFPISPIE

SEQ ID NO: 1063 - protein, 8 aa, Human immunodeficiency virus 1
  source 1..8: note = HLAs: A0211 B5201
TLWQRPLV

SEQ ID NO: 1064 - protein, 9 aa, Human immunodeficiency virus 1
  source 1..9: note = HLAs: A0204 A0211
TLWQRPLVT

SEQ ID NO: 1065 - protein, 11 aa, Human immunodeficiency virus 1
  source 1..11: note = HLAs: A0201 A0202 A0203 A0204 A0205 A0206 A0211 A0214 A02264 A0230
TMLNTVGGHQA

SEQ ID NO: 1066 - protein, 8 aa, Human immunodeficiency virus 1
  source 1..8: note = HLAs: B3501 B3505 B3508 B3532 B3541
TPGIRYQY

SEQ ID NO: 1067 - protein, 11 aa, Human immunodeficiency virus 1
  source 1..11: note = HLAs: B0702 B0705 B4201
TPGIRYQYNVL

SEQ ID NO: 1068 - protein, 8 aa, Human immunodeficiency virus 1
  source 1..8: note = HLAs: B5301 B5701
TPPLVKLW

SEQ ID NO: 1069 - protein, 9 aa, Human immunodeficiency virus 1
  source 1..9: note = HLAs: B1502 B1531 B3501 B3505 B3508 B3532 B3541 B5301
TPPLVKLWY

SEQ ID NO: 1070 - protein, 8 aa, Human immunodeficiency virus 1
  source 1..8: note = HLAs: B0702 B3503 B3508 B4201 B4202 B5501 B5610
TPQDLNTM

SEQ ID NO: 1071 - protein, 9 aa, Human immunodeficiency virus 1
  source 1..9: note = HLAs: B0702 B0705 B0801 B1401 B1402 B1403 B3501 B3502 B3503 B3505 B3508 B3512 B3532 B3541 B3910 B3924 B4008 B4201 B4202 B5105 B5108 B5109 B5301 B5501 B5502 B5601 B5604 B5610 B6701 B8101 B8103 B8201 B8202 C0102 C0144 C0704 C0801 C0803
TPQDLNTML

SEQ ID NO: 1072 - protein, 9 aa, Human immunodeficiency virus 1
  source 1..9: note = HLAs: A3401 A3402
TPVFAIKKK

SEQ ID NO: 1073 - protein, 9 aa, Human immunodeficiency virus 1
  source 1..9: note = HLAs: A0201 A0204 A0206 A0207 A0211 A0214 A0230 B1301 B1302 B1303 B1401 B1402 B1403 B1510 B1531 B1537 B2706 B3701 B3801 B3802 B3901 B3905 B3906 B3909 B3924 B4002 B40114 B4016 B4101 B4102 B4701 B5201 C0102 C0144 C0401 C0403 C0404 C0407 C0501 C0509 C0702 C0704 C0705 C0801 C0802 C0803 C0804 C0812 C1502 C1505 C1602 C1646 C17 C1701 C1702 C1703 C1704 C1705 C1706 C1707 C18 C1801 C1802
TQDFWEVQL

SEQ ID NO: 1074 - protein, 11 aa, Human immunodeficiency virus 1
  source 1..11: note = HLAs: A0206
TQDFWEVQLGI

SEQ ID NO: 1075 - protein, 9 aa, Human immunodeficiency virus 1
  source 1..9: note = HLAs: A2301 A2402 A2407 A2410 A2464 A2901 A2902 A2911 A3002 A3004 A3009 A3010 A3201 B1301 B1302 B1303 B1501 B1502 B1503 B1510 B1512 B1517 B1518 B1521 B15220 B1524 B1525 B1527 B1531 B1532 B1537 B1802 B2702 B2705 B2706 B3701 B3801 B3802 B4427 B4701 B4703 B5201 B5702 B5703 B5802 C0202 C0210 C0214 C0229 C0302 C0701 C0702 C0704 C0705 C0706 C0718 C1202 C1203 C1504 C1509 C1601 C1602 C1604 C16112 C1646 C1701 C1702 C1703 C1704 C1705
TQIGCTLNF

SEQ ID NO: 1076 - protein, 10 aa, Human immunodeficiency virus 1
  source 1..10: note = HLAs: B1503 B15220
TQIGCTLNFP

SEQ ID NO: 1077 - protein, 11 aa, Human immunodeficiency virus 1
  source 1..11: note = HLAs: A0205 A0206 A0211 A0214 B1301
TQIGCTLNFPI

SEQ ID NO: 1078 - protein, 8 aa, Human immunodeficiency virus 1
  source 1..8: note = HLAs: C0102 C0144 C0202 C0210 C0229 C0304 C0305 C0704 C1202 C1203 C1502 C1504 C1505 C1509 C1601 C1602 C1604 C16112 C1646 C17 C1701 C1702 C1703 C1704 C1705 C1706
TTNQKTEL

SEQ ID NO: 1079 - protein, 9 aa, Human immunodeficiency virus 1
  source 1..9: note = HLAs: A0301 A0302 A0305 A1101 A1102 A3001 A3009 A3101 A3104 A3303 A3401 A3402 A3601 A6601 A6602 A6603 A6801 A7401 A7402 A7403 A7404 A7405 A7408 A7409 A7411 A7413 C1602 C1646
TTPDKKHQK

SEQ ID NO: 1080 - protein, 9 aa, Human immunodeficiency virus 1
  source 1..9: note = HLAs: A0205 A6802 A6827 B1301 B1302 B1303 B1517 B5701 B5702 B5703 B5704 B5802 C0202 C0210 C0229 C0801 C0803 C1502 C1504 C1505 C1509 C1602 C1646 C17 C1701 C1702 C1703 C1704 C1705 C1706
TTSTLQEQI

SEQ ID NO: 1081 - protein, 9 aa, Human immunodeficiency virus 1
  source 1..9: note = HLAs: A3402 C1202
TVATLYCVH

SEQ ID NO: 1082 - protein, 9 aa, Human immunodeficiency virus 1
  source 1..9: note = HLAs: A2501 A2601 A2608 A3401 A6601 A6602 A6603 B1501 B1502 B1511 B1521 B1525 B1531 B3501 B3505 B3508 B4201 B4601 B5610 C0102 C0103 C0144 C0202 C0210 C0214 C0217 C0229 C0302 C0303 C0304 C0305 C0317 C0403 C0501 C0509 C0702 C0704 C0705 C0801 C0802 C0803 C0804 C0812 C1202 C1203 C1402 C1403 C1502 C1504 C1505 C1509 C1601 C1602 C1604 C16112 C1646 C17 C1701 C1702 C1703 C1704 C1705 C1706 C1707
TVGGHQAAM

SEQ ID NO: 1083 - protein, 11 aa, Human immunodeficiency virus 1
  source 1..11: note = HLAs: C1202
TVGGHQAAMQM

SEQ ID NO: 1084 - protein, 9 aa, Human immunodeficiency virus 1
  source 1..9: note = HLAs: A0101 A0102 A0109 A0123 A2501 A2601 A2608 A2612 A2901 A2902 A2911 A3002 A3004 A3009 A3010 A3401 A3402 A3601 A4301 A6601 A6602 A6603 A7404 A7410 B1501 B1502 B1503 B1508 B1511 B1512 B1518 B1521 B15220 B1525 B1527 B1531 B1532 B3501 B3505 B3508 B3532 B3541 B3543 B4601 B4701 C0202 C0210 C0214 C0217 C0229 C0302 C0303 C0705 C1202 C1203 C1504 C1509 C1601 C1602 C1604 C16112 C1646
TVLDVGDAY

SEQ ID NO: 1085 - protein, 10 aa, Human immunodeficiency virus 1
  source 1..10: note = HLAs: A2501 A2601 A2612 A2901 A2902 A2911 A3004 A3009 A3201 A3401 B1301 B1501 B1502 B1521 B1525 B1531 B5702 B5703 C0202 C0210 C0229 C0302 C0303 C0501 C0509 C1202 C1203 C1504 C1509 C1601 C1602 C1604 C16112 C1646 C17 C1701 C1702 C1703 C1704 C1705 C1706
TVLDVGDAYF

SEQ ID NO: 1086 - protein, 9 aa, Human immunodeficiency virus 1
  source 1..9: note = HLAs: A0201 A0202 A0203 A0204 A0205 A0206 A0207 A0211 A0214 A02264 A0230 A6802 A6827 A6901 B1302 B1303 B1502 B1525 B5107 B5108 B5201 B5501 B5502 B5601 B5604 B5610 C0102 C0144 C0202 C0210 C0229 C0302 C0303 C0304 C0305 C0317 C0704 C0801 C0803 C0804 C0812 C1202 C1203 C1502 C1504 C1505 C1509 C1601 C1602 C1604 C16112 C1646 C17 C1701 C1702 C1703 C1704 C1705 C1706 C1707
TVLVGPTPV

SEQ ID NO: 1087 - protein, 8 aa, Human immunodeficiency virus 1
  source 1..8: note = HLAs: C0102 C0144 C0202 C0210 C0229 C0302 C0303 C0304 C0305 C0317 C0403 C0501 C0509 C0704 C0801 C0803 C0804 C0812 C1202 C1203 C1502 C1504 C1505 C1509 C1601 C1602 C1604 C16112 C1646 C17 C1701 C1702 C1703 C1704 C1705 C1706 C1707
TVNDIQKL

SEQ ID NO: 1088 - protein, 8 aa, Human immunodeficiency virus 1
  source 1..8: note = HLAs: A2301 A2403 A2407 A2410
TWIPEWEF

SEQ ID NO: 1089 - protein, 9 aa, Human immunodeficiency virus 1
  source 1..9: note = HLAs: A2301 A2402 A2403 A2407 A2410 A2464
TWIPEWEFV

SEQ ID NO: 1090 - protein, 9 aa, Human immunodeficiency virus 1
  source 1..9: note = HLAs: A2301 A2402 A2403 A2407 A2410 A2464 C0214 C0404 C0702 C0704 C0705 C1402 C1403
TYQIYQEPF

SEQ ID NO: 1091 - protein, 10 aa, Human immunodeficiency virus 1
  source 1..10: note = HLAs: A1101 A1102 A2403 A3101 A3104
TYQIYQEPFK

SEQ ID NO: 1092 - protein, 9 aa, Human immunodeficiency virus 1
  source 1..9: note = HLAs: B1502 B4201 B4202 B5101 B5102 B5108 B5109 B5201 B5401 B5501 B5502 B5601 B5604 B5610 B5802 C0102 C0144 C0202 C0210 C0229 C0302 C0303 C0304 C0305 C0317 C0704 C0801 C0803 C0804 C1202 C1203 C1502 C1504 C1505 C1509 C1601 C1602 C1604 C16112 C1646 C17 C1701 C1702 C1703 C1704 C1705 C1706
VAKEIVASC

SEQ ID NO: 1093 - protein, 11 aa, Human immunodeficiency virus 1
  source 1..11: note = HLAs: A3402 A3601 A7404 C0303 C1202 C1602 C1646
VAKEIVASCDK

SEQ ID NO: 1094 - protein, 9 aa, Human immunodeficiency virus 1
  source 1..9: note = HLAs: B5702 B5703 B5802 C0102 C0144 C0202 C0210 C0229 C0303 C0304 C0305 C0317 C0501 C0509 C0801 C0803 C0804 C0812 C1202 C1203 C1502 C1504 C1505 C1509 C1601 C1602 C1604 C16112 C1646 C17 C1701 C1702 C1703 C1704 C1705 C1706 C1707
VASCDKCQL

SEQ ID NO: 1095 - protein, 10 aa, Human immunodeficiency virus 1
  source 1..10: note = HLAs: A0302 A1101 A1102 A3402 A3601 C0303
VASCDKCQLK

SEQ ID NO: 1096 - protein, 10 aa, Human immunodeficiency virus 1
  source 1..10: note = HLAs: A0203 A0205 A02264 A6802 A6827 C0202 C0210 C0229 C1202 C1203 C1502 C1505 C1602 C1646
VASGYIEAEV

SEQ ID NO: 1097 - protein, 9 aa, Human immunodeficiency virus 1
  source 1..9: note = HLAs: A0102 A2501 A2601 A2608 A2612 A2901 A2902 A2911 A3002 A3004 A3009 A3010 A3401 A3402 A3601 A4301 A6601 A6602 A6603 A7410 B1501 B1502 B1503 B1508 B1511 B1512 B1516 B1517 B1518 B1521 B15220 B1525 B1527 B1531 B1532 B3501 B3505 B3508 B3532 B3541 B3543 B4601 B5301 B5802 C0202 C0210 C0214 C0217 C0229 C0302 C0303 C0304 C1202 C1203 C1504 C1509 C1601 C1602 C1604 C16112 C1646
VAVHVASGY

SEQ ID NO: 1098 - protein, 10 aa, Human immunodeficiency virus 1
  source 1..10: note = HLAs: B3701
VDCSPGIWQL

SEQ ID NO: 1099 - protein, 9 aa, Human immunodeficiency virus 1
  source 1..9: note = HLAs: A3301 A3303 A3305 A3401 A3402 A6601 A6602 A6801 A7404
VDFRELNKR

SEQ ID NO: 1100 - protein, 9 aa, Human immunodeficiency virus 1
  source 1..9: note = HLAs: B3701 B4002 B4101 B4102
VDKLVSSGI

SEQ ID NO: 1101 - protein, 11 aa, Human immunodeficiency virus 1
  source 1..11: note = HLAs: A0301 A0305
VDKLVSSGIRK

SEQ ID NO: 1102 - protein, 8 aa, Human immunodeficiency virus 1
  source 1..8: note = HLAs: B4101
VEEKAFSP

SEQ ID NO: 1103 - protein, 10 aa, Human immunodeficiency virus 1
  source 1..10: note = HLAs: B4002 B4006 B40114 B4016 B4101 B4102 B4415 B4501 B4507 B4901 B5001
VEEKAFSPEV

SEQ ID NO: 1104 - protein, 11 aa, Human immunodeficiency virus 1
  source 1..11: note = HLAs: B4002 B4006 B40114 B4101 B4102 B4415 B4501 B4507 B4901 B5001
VEEKAFSPEVI

SEQ ID NO: 1105 - protein, 8 aa, Human immunodeficiency virus 1
  source 1..8: note = HLAs: B1802 B3701 B4001 B4002 B4006 B40114 B4016 B4101 B4102 B4415 B4427 B4901 B5001 C0704
VESMNKEL

SEQ ID NO: 1106 - protein, 9 aa, Human immunodeficiency virus 1
  source 1..9: note = HLAs: B3701 B4701
VESMNKELK

SEQ ID NO: 1107 - protein, 10 aa, Human immunodeficiency virus 1
  source 1..10: note = HLAs: A1101 A1102
VESMNKELKK

SEQ ID NO: 1108 - protein, 11 aa, Human immunodeficiency virus 1
  source 1..11: note = HLAs: B3701 B4002 B4006 B40114 B4101 B4102 B4427 B4901
VESMNKELKKI

SEQ ID NO: 1109 - protein, 8 aa, Human immunodeficiency virus 1
  source 1..8: note = HLAs: A3101 A3104 A3303
VFIHNFKR

SEQ ID NO: 1110 - protein, 9 aa, Human immunodeficiency virus 1
  source 1..9: note = HLAs: A3104
VFIHNFKRK

SEQ ID NO: 1111 - protein, 8 aa, Human immunodeficiency virus 1
  source 1..8: note = HLAs: C0403 C0501 C0509
VGDAYFSV

SEQ ID NO: 1112 - protein, 10 aa, Human immunodeficiency virus 1
  source 1..10: note = HLAs: C0501 C0509
VGDAYFSVPL

SEQ ID NO: 1113 - protein, 8 aa, Human immunodeficiency virus 1
  source 1..8: note = HLAs: B5701 B5704 B5802
VGEIYKRW

SEQ ID NO: 1114 - protein, 10 aa, Human immunodeficiency virus 1
  source 1..10: note = HLAs: B4102
VGEIYKRWII

SEQ ID NO: 1115 - protein, 9 aa, Human immunodeficiency virus 1
  source 1..9: note = HLAs: A3101 A3104 A3303 A3401 A3402 A6602 A6801 A7401 A7402 A7403 A7404 A7405 A7408 A7409 A7411 C0303 C1602 C1646
VGGPGHKAR

SEQ ID NO: 1116 - protein, 11 aa, Human immunodeficiency virus 1
  source 1..11: note = HLAs: A3002 B1525
VGKLNWASQIY

SEQ ID NO: 1117 - protein, 8 aa, Human immunodeficiency virus 1
  source 1..8: note = HLAs: B5201 C0102 C0103 C0144 C0704 C1505 C1602 C1646 C1701 C1702 C1703 C1704 C1705
VGPTPVNI

SEQ ID NO: 1118 - protein, 9 aa, Human immunodeficiency virus 1
  source 1..9: note = HLAs: B5101 B5102 B5107 B5108 B5109 B5201 C0102 C0103 C0144 C0202 C0210 C0214 C0217 C0229 C0302 C0303 C0304 C0305 C0317 C0401 C0403 C0404 C0407 C0501 C0509 C0602 C0702 C0704 C0705 C0801 C0802 C0803 C0804 C0812 C1202 C1203 C1402 C1403 C1502 C1504 C1505 C1509 C1601 C1602 C1604 C16112 C1646 C17 C1701 C1702 C1703 C1704 C1705 C1706 C1707
VGPTPVNII

SEQ ID NO: 1119 - protein, 11 aa, Human immunodeficiency virus 1
  source 1..11: note = HLAs: A3303 A3401 A3402 A3601 A7404 A7405 C0303 C0602 C1602 C1646
VGPTPVNIIGR

SEQ ID NO: 1120 - protein, 11 aa, Human immunodeficiency virus 1
  source 1..11: note = HLAs: A3303 A3401 A3402 A3601 A6801 A7404 A7405 C0202 C0210 C0214 C0229 C0303 C0602 C1202 C1504 C1509 C1602 C1646
VGSDLEIGQHR

SEQ ID NO: 1121 - protein, 10 aa, Human immunodeficiency virus 1
  source 1..10: note = HLAs: B3906
VHVASGYIEA

SEQ ID NO: 1122 - protein, 8 aa, Human immunodeficiency virus 1
  source 1..8: note = HLAs: B5201 C0102 C0103 C0144 C0305 C0317 C0704 C1601 C1602 C16112 C1646
VIPMFSAL

SEQ ID NO: 1123 - protein, 8 aa, Human immunodeficiency virus 1
  source 1..8: note = HLAs: A3402
VIWGKTPK

SEQ ID NO: 1124 - protein, 9 aa, Human immunodeficiency virus 1
  source 1..9: note = HLAs: A0204 A2301 A2402 A2403 A2407 A2464 A2901 A2902 A2911 A3002 A3004 A3009 A3201 A7404 A7410 B1301 B1501 B1502 B1503 B1516 B1517 B1521 B15220 B1524 B1525 B1527 B1531 B1532 B5701 B5702 B5703 B5704 B5802 C0102 C0144 C0202 C0210 C0217 C0229 C0302 C0303 C0304 C0305 C0317 C0702 C0704 C0705 C1202 C1203 C1402 C1403 C1504 C1509 C1601 C1602 C1604 C16112 C1646 C17 C1701 C1702 C1703 C1704 C1705 C1706
VIWGKTPKF

SEQ ID NO: 1125 - protein, 9 aa, Human immunodeficiency virus 1
  source 1..9: note = HLAs: A0202 A0203 A0204 A0205 A0206 A0207 A0211 A0214 A02264 C1505 C1701 C1702 C1703 C1704 C1705 C1706
VIYQYMDDL

SEQ ID NO: 1126 - protein, 10 aa, Human immunodeficiency virus 1
  source 1..10: note = HLAs: A2901 A2902 A2911 A3002 A3004 A3009 A3010 A3601 A8001 B1502 B1525
VIYQYMDDLY

SEQ ID NO: 1127 - protein, 11 aa, Human immunodeficiency virus 1
  source 1..11: note = HLAs: A0201 A0206 A0211 A0230
VIYQYMDDLYV

SEQ ID NO: 1128 - protein, 9 aa, Human immunodeficiency virus 1
  source 1..9: note = HLAs: B1503 B1518 B15220 B1525
VKVVEEKAF

SEQ ID NO: 1129 - protein, 9 aa, Human immunodeficiency virus 1
  source 1..9: note = HLAs: A0201 A0202 A0203 A0204 A0205 A0206 A0207 A0211 A0214 A02264 A0230 A6802 A6827 A6901 A7404 B1301 B1302 B1303 B5201 C0102 C0144 C0202 C0210 C0229 C0501 C0509 C0801 C0803 C1202 C1203 C1502 C1505 C1602 C1646 C17 C1701 C1702 C1703 C1704 C1705 C1706
VLAEAMSQV

SEQ ID NO: 1130 - protein, 10 aa, Human immunodeficiency virus 1
  source 1..10: note = HLAs: A0201 A0202 A0203 A0205 A0206 A0211 A02264 A0230
VLAEAMSQVT

SEQ ID NO: 1131 - protein, 11 aa, Human immunodeficiency virus 1
  source 1..11: note = HLAs: A0203 A02264
VLAEAMSQVTN

SEQ ID NO: 1132 - protein, 8 aa, Human immunodeficiency virus 1
  source 1..8: note = HLAs: A0101 A0102 A0103 A0109 A0123 A3601 B1502 B1525 B1531 C0403 C0501 C0509
VLDVGDAY

SEQ ID NO: 1133 - protein, 9 aa, Human immunodeficiency virus 1
  source 1..9: note = HLAs: A0101 A0102 A0103 A0109 A0123 A0201 A0204 A0207 A0211 A0214 A0230 A3601 A7404 B1301 B1502 B1521 B1525 B1531 B3508 B5702 B5703 B5704 C0102 C0103 C0144 C0202 C0210 C0229 C0302 C0303 C0304 C0401 C0403 C0404 C0407 C0501 C0509 C0702 C0704 C0705 C0801 C0802 C0803 C0804 C0812 C1202 C1402 C1403 C1502 C1504 C1505 C1509 C1601 C1602 C16112 C1646 C17 C1701 C1702 C1703 C1704 C1705 C1706 C1707 C1801 C1802
VLDVGDAYF

SEQ ID NO: 1134 - protein, 11 aa, Human immunodeficiency virus 1
  source 1..11: note = HLAs: A0201 A0202 A0203 A0206 A0207 A0211 A0214 A02264 A0230 C0403 C0501 C0509
VLDVGDAYFSV

SEQ ID NO: 1135 - protein, 9 aa, Human immunodeficiency virus 1
  source 1..9: note = HLAs: A0301 A0302 A0305 A1101 A1102 A3402 A3601 A7401 A7402 A7403 A7404 A7405 A7408 A7409 A7411 A7413 C0303
VLFLDGIDK

SEQ ID NO: 1136 - protein, 10 aa, Human immunodeficiency virus 1
  source 1..10: note = HLAs: A0201 A0202 A0203 A0204 A0205 A0206 A0207 A0211 A0214 A02264 A0230
VLFLDGIDKA

SEQ ID NO: 1137 - protein, 8 aa, Human immunodeficiency virus 1
  source 1..8: note = HLAs: A0203 A0211 A02264
VLVGPTPV

SEQ ID NO: 1138 - protein, 10 aa, Human immunodeficiency virus 1
  source 1..10: note = HLAs: A0201 A0202 A0203 A0204 A0205 A0206 A0207 A0211 A0214 A02264 A0230 B1301 B1302 B1303 B5201 C0102 C0144 C17 C1701 C1702 C1703 C1704 C1705 C1706
VLVGPTPVNI

SEQ ID NO: 1139 - protein, 11 aa, Human immunodeficiency virus 1
  source 1..11: note = HLAs: A0204 A0207
VLVGPTPVNII

SEQ ID NO: 1140 - protein, 8 aa, Human immunodeficiency virus 1
  source 1..8: note = HLAs: C0403 C0501 C0509 C0802
VNDIQKLV

SEQ ID NO: 1141 - protein, 10 aa, Human immunodeficiency virus 1
  source 1..10: note = HLAs: A3601 C0303 C1602 C1646
VNDIQKLVGK

SEQ ID NO: 1142 - protein, 9 aa, Human immunodeficiency virus 1
  source 1..9: note = HLAs: A2901 A2902 A2911 A3002 A3009 A3601 B1502 B1503 B1521 B15220 B1525 B1531 C1202
VNIVTDSQY

SEQ ID NO: 1143 - protein, 8 aa, Human immunodeficiency virus 1
  source 1..8: note = HLAs: B5201 C0704 C1505
VNQIIEQL

SEQ ID NO: 1144 - protein, 9 aa, Human immunodeficiency virus 1
  source 1..9: note = HLAs: B5201 C1505
VNQIIEQLI

SEQ ID NO: 1145 - protein, 8 aa, Human immunodeficiency virus 1
  source 1..8: note = HLAs: A3402 C0303 C1602 C1646
VNTPPLVK

SEQ ID NO: 1146 - protein, 9 aa, Human immunodeficiency virus 1
  source 1..9: note = HLAs: B1301 B1517 B2705 B5201 B5702 B5703 B5802 C0102 C0144 C0202 C0210 C0214 C0217 C0229 C0302 C0303 C0304 C0305 C0317 C0403 C0404 C0501 C0509 C0602 C0701 C0702 C0704 C0705 C0706 C0718 C0801 C0803 C0804 C0812 C1202 C1203 C1502 C1504 C1505 C1509 C1601 C1602 C1604 C16112 C1646 C17 C1701 C1702 C1703 C1704 C1705 C1706 C1707
VNTPPLVKL

SEQ ID NO: 1147 - protein, 10 aa, Human immunodeficiency virus 1
  source 1..10: note = HLAs: B5701 B5702 B5703 B5704 B5801 B5802
VNTPPLVKLW

SEQ ID NO: 1148 - protein, 9 aa, Human immunodeficiency virus 1
  source 1..9: note = HLAs: B5501 B5502 B5601 B5610
VPAHKGIGG

SEQ ID NO: 1149 - protein, 8 aa, Human immunodeficiency virus 1
  source 1..8: note = HLAs: B0702 B0801 B4201 B4202 B5501
VPRRKAKI

SEQ ID NO: 1150 - protein, 9 aa, Human immunodeficiency virus 1
  source 1..9: note = HLAs: B0702 B0705 B0801 B4201 B4202 B5501 B5502 B5610
VPRRKAKII

SEQ ID NO: 1151 - protein, 9 aa, Human immunodeficiency virus 1
  source 1..9: note = HLAs: B0702 B0705 B0801 B1502 B3501 B3502 B3503 B3505 B3508 B3512 B3532 B3541 B3910 B4201 B4202 B5108 B5109 B5301 B5501 B5502 B5601 B5604 B5610 B6701 B8101 B8103
VPVKLKPGM

SEQ ID NO: 1152 - protein, 9 aa, Human immunodeficiency virus 1
  source 1..9: note = HLAs: A0201 A0202 A0203 A0204 A0205 A0206 A0207 A0211 A0214 A02264 A0230 B1302 B1303 B1503 B15220 B1525 B3906 B4006 B4101 B5001 B5201 B7301
VQLGIPHPA

SEQ ID NO: 1153 - protein, 11 aa, Human immunodeficiency virus 1
  source 1..11: note = HLAs: B1301 B1302 B1303 B1525 B5201
VQLGIPHPAGL

SEQ ID NO: 1154 - protein, 8 aa, Human immunodeficiency virus 1
  source 1..8: note = HLAs: B1503 B15220
VQMAVFIH

SEQ ID NO: 1155 - protein, 9 aa, Human immunodeficiency virus 1
  source 1..9: note = HLAs: B1503 B15220
VQMAVFIHN

SEQ ID NO: 1156 - protein, 10 aa, Human immunodeficiency virus 1
  source 1..10: note = HLAs: A0206 A2301 A2402 A2403 A2407 A2410 A3004 A3009 A3201 B1301 B1501 B1502 B1503 B1512 B15220 B1524 B1525 B1527 B1531 B1532 B4701
VQMAVFIHNF

SEQ ID NO: 1157 - protein, 11 aa, Human immunodeficiency virus 1
  source 1..11: note = HLAs: A0301 A0302 A0305 A1101 A1102 A3101 A3104 A6801
VQMAVFIHNFK

SEQ ID NO: 1158 - protein, 9 aa, Human immunodeficiency virus 1
  source 1..9: note = HLAs: A3601 C0303
VQNANPDCK

SEQ ID NO: 1159 - protein, 11 aa, Human immunodeficiency virus 1
  source 1..11: note = HLAs: B1301 B1302 B1303 B3801 B3802 B5201
VQNANPDCKTI

SEQ ID NO: 1160 - protein, 8 aa, Human immunodeficiency virus 1
  source 1..8: note = HLAs: B2706 B3802 C0401 C0403 C0404 C0407 C0501 C0509 C0701 C0702 C0704 C0705 C0706 C0718 C0802 C18 C1801 C1802
VRDQAEHL

SEQ ID NO: 1161 - protein, 9 aa, Human immunodeficiency virus 1
  source 1..9: note = HLAs: A3601 B2702 B2703 B2704 B2705 B4701 C0303 C0701 C0705 C0706 C0718 C1602
VRDQAEHLK

SEQ ID NO: 1162 - protein, 11 aa, Human immunodeficiency virus 1
  source 1..11: note = HLAs: B7301
VRDQAEHLKTA

SEQ ID NO: 1163 - protein, 9 aa, Human immunodeficiency virus 1
  source 1..9: note = HLAs: B1401 B1402 B1403 B1503 B1510 B15220 B1537 B2702 B2703 B2704 B2705 B2706 B2707 B3801 B3802 B3901 B3906 B3909 B3924 B7301 C0602 C0701 C0702 C0704 C0705 C0706 C0718 C1402 C1403
VRMYSPVSI

SEQ ID NO: 1164 - protein, 10 aa, Human immunodeficiency virus 1
  source 1..10: note = HLAs: A0202 A0203 A0211 A02264 B1401 B1402 B1501 B1503 B15220 B1525 B2702 B2704 B2705 B2706 B2707 B3924 C0602 C0701 C0702 C0705 C0706 C0718
VRMYSPVSIL

SEQ ID NO: 1165 - protein, 8 aa, Human immunodeficiency virus 1
  source 1..8: note = HLAs: B5201
VSQNYPIV

SEQ ID NO: 1166 - protein, 8 aa, Human immunodeficiency virus 1
  source 1..8: note = HLAs: B5201 C0202 C0210 C0229 C1203 C1502 C1504 C1505 C1509 C1601 C1602 C1604 C16112 C1646
VSSGIRKV

SEQ ID NO: 1167 - protein, 9 aa, Human immunodeficiency virus 1
  source 1..9: note = HLAs: B1301 B1516 B1517 B1525 B5108 B5201 B5701 B5702 B5703 B5704 B5801 B5802 C0102 C0103 C0144 C0202 C0210 C0214 C0217 C0229 C0302 C0303 C0304 C0305 C0317 C0403 C0404 C0501 C0509 C0602 C0701 C0702 C0704 C0705 C0706 C0718 C0801 C0802 C0803 C0804 C0812 C1202 C1203 C1502 C1504 C1505 C1509 C1601 C1602 C1604 C16112 C1646 C17 C1701 C1702 C1703 C1704 C1705 C1706 C1707
VSSGIRKVL

SEQ ID NO: 1168 - protein, 10 aa, Human immunodeficiency virus 1
  source 1..10: note = HLAs: B1516 B1517 B5701 B5702 B5703 B5704 B5801 B5802 C0202 C0210 C0229 C0302 C1202 C1203 C1504 C1509 C1601 C1602 C1604 C16112 C1646
VSSGIRKVLF

SEQ ID NO: 1169 - protein, 11 aa, Human immunodeficiency virus 1
  source 1..11: note = HLAs: B1517 B5701 B5702 B5703 B5704 B5802 C1502 C1504 C1505 C1509 C1602 C1646
VSSGIRKVLFL

SEQ ID NO: 1170 - protein, 8 aa, Human immunodeficiency virus 1
  source 1..8: note = HLAs: A3601 C0102 C0144 C0303 C0304 C0305 C0401 C0403 C0404 C0407 C0501 C0509 C0704 C0801 C0802 C0803 C0804 C0812 C1502 C1504 C1505 C1509 C1601 C1602 C16112 C1646 C17 C1701 C1702 C1703 C1704 C1705 C1706 C1707 C1801 C1802
VTDSQYAL

SEQ ID NO: 1171 - protein, 10 aa, Human immunodeficiency virus 1
  source 1..10: note = HLAs: C0403 C0501 C0509
VTDSQYALGI

SEQ ID NO: 1172 - protein, 10 aa, Human immunodeficiency virus 1
  source 1..10: note = HLAs: A0101 A0102 A0103 A0109 A0123 A2901 A2902 A2911 A3002 A3004 A3009 A3010 A3601 B1501 B1502 B1517 B1521 B1525 B1531 B5701 B5702 B5703 B5704 B5802 C0202 C0210 C0229 C1202 C1504 C1509 C1601 C1602 C16112 C1646
VTVLDVGDAY

SEQ ID NO: 1173 - protein, 11 aa, Human immunodeficiency virus 1
  source 1..11: note = HLAs: B1516 B1517 B5701 B5702 B5703 B5704 B5801 B5802
VTVLDVGDAYF

SEQ ID NO: 1174 - protein, 9 aa, Human immunodeficiency virus 1
  source 1..9: note = HLAs: A0207 C0102 C0103 C0144 C0202 C0210 C0229 C0302 C0303 C0304 C0305 C0317 C0401 C0403 C0404 C0407 C0501 C0509 C0704 C0801 C0802 C0803 C0804 C0812 C1202 C1203 C1502 C1504 C1505 C1509 C1601 C1602 C1604 C16112 C1646 C17 C1701 C1702 C1703 C1704 C1705 C1706 C1707
VVESMNKEL

SEQ ID NO: 1175 - protein, 10 aa, Human immunodeficiency virus 1
  source 1..10: note = HLAs: A0302 A1101 A1102 A3401 A3402 A3601 A6801 A7404 A7405 C0303 C1602 C1646
VVESMNKELK

SEQ ID NO: 1176 - protein, 11 aa, Human immunodeficiency virus 1
  source 1..11: note = HLAs: A0301 A0302 A0305 A1101 A1102 A3402 A3601 A7401 A7402 A7403 A7404 A7405 A7408 A7409 A7411 A7413 C1602
VVESMNKELKK

SEQ ID NO: 1177 - protein, 9 aa, Human immunodeficiency virus 1
  source 1..9: note = HLAs: B5201 C0102 C0144 C1602 C1646
VVPRRKAKI

SEQ ID NO: 1178 - protein, 9 aa, Human immunodeficiency virus 1
  source 1..9: note = HLAs: A3101 A3104 A3301 A3303 A3305
VWASRELER

SEQ ID NO: 1179 - protein, 10 aa, Human immunodeficiency virus 1
  source 1..10: note = HLAs: A2301 A2402 A2403 A2407 A2410 A2464
VWASRELERF

SEQ ID NO: 1180 - protein, 9 aa, Human immunodeficiency virus 1
  source 1..9: note = HLAs: C1402 C1403
VYLSWVPAH

SEQ ID NO: 1181 - protein, 10 aa, Human immunodeficiency virus 1
  source 1..10: note = HLAs: A0301 A0302 A0305 A1101 A1102 A3001 A3101 A3104 A3301 A3303 A3305 A3402 A6801 A7401 A7402 A7403 A7404 A7405 A7408 A7409 A7411 A7413
VYLSWVPAHK

SEQ ID NO: 1182 - protein, 9 aa, Human immunodeficiency virus 1
  source 1..9: note = HLAs: A2301 A2402 A2403 A2407 A2410 A2464 C0102 C0103 C0144 C0214 C0305 C0317 C0401 C0404 C0407 C0602 C0701 C0702 C0704 C0705 C0706 C0718 C1402 C1403 C1601 C1602 C16112 C1646 C1801 C1802
VYYDPSKDL

SEQ ID NO: 1183 - protein, 10 aa, Human immunodeficiency virus 1
  source 1..10: note = HLAs: A2301 A2402 A2403 A2407 A2410 A2464 C0401 C0404 C0407 C0702 C0704 C0705 C1402 C1403
VYYDPSKDLI

SEQ ID NO: 1184 - protein, 9 aa, Human immunodeficiency virus 1
  source 1..9: note = HLAs: A0202 A0203 A0204 A0205 A0206 A0214 A02264 A6802 A6827 A6901 B5108 B5109 C0302 C0303 C0304 C0801 C0803 C1203 C1502 C1505 C1601 C1604 C16112 C1701 C1702 C1703 C1704 C1705
WASQIYPGI

SEQ ID NO: 1185 - protein, 10 aa, Human immunodeficiency virus 1
  source 1..10: note = HLAs: A3402 A6801
WASQIYPGIK

SEQ ID NO: 1186 - protein, 9 aa, Human immunodeficiency virus 1
  source 1..9: note = HLAs: B1502 B1517 B1531 B3501 B3508 B3541 B5301 B5701 B5702 B5703 B5704 B5801 B5802 C0202 C0210 C0229 C0302 C1202 C1504 C1509 C1601 C1602 C1604 C16112 C1646
WASRELERF

SEQ ID NO: 1187 - protein, 11 aa, Human immunodeficiency virus 1
  source 1..11: note = HLAs: B3924
WASRELERFAL

SEQ ID NO: 1188 - protein, 8 aa, Human immunodeficiency virus 1
  source 1..8: note = HLAs: B4006 B4101
WEFVNTPP

SEQ ID NO: 1189 - protein, 9 aa, Human immunodeficiency virus 1
  source 1..9: note = HLAs: B1301 B1302 B1303 B1401 B1402 B1503 B1510 B15220 B1525 B1531 B1537 B1801 B1802 B1803 B3541 B3701 B3901 B3905 B3906 B3910 B3924 B4001 B4002 B4006 B4008 B40114 B4012 B4016 B4101 B4102 B4402 B4403 B4405 B4407 B4415 B4427 B4501 B4507 B4701 B4703 B4801 B4803 B4901 B5001 B5107 B5201 C0704
WEFVNTPPL

SEQ ID NO: 1190 - protein, 10 aa, Human immunodeficiency virus 1
  source 1..10: note = HLAs: B3701 B4001 B4002 B4006 B40114 B4016 B4101 B4102 B4415 B4501 B4507 B4901 B5001 B5201
WEFVNTPPLV

SEQ ID NO: 1191 - protein, 9 aa, Human immunodeficiency virus 1
  source 1..9: note = HLAs: B1503 B15220 B1801 B1802 B1803 B4403 B4407 B4703
WEVQLGIPH

SEQ ID NO: 1192 - protein, 10 aa, Human immunodeficiency virus 1
  source 1..10: note = HLAs: B4006 B40114 B4101 B4501 B4507 B5001
WEVQLGIPHP

SEQ ID NO: 1193 - protein, 11 aa, Human immunodeficiency virus 1
  source 1..11: note = HLAs: B4002 B4006 B40114 B4101 B4102 B4415 B4501 B4507 B5001
WEVQLGIPHPA

SEQ ID NO: 1194 - protein, 9 aa, Human immunodeficiency virus 1
  source 1..9: note = HLAs: A3402 A3601 C0303
WGFTTPDKK

SEQ ID NO: 1195 - protein, 9 aa, Human immunodeficiency virus 1
  source 1..9: note = HLAs: A0201 A0202 A0203 A0204 A0205 A0206 A0207 A0211 A0214 A02264 A0230 A6802 A6827
WIILGLNKI

SEQ ID NO: 1196 - protein, 10 aa, Human immunodeficiency virus 1
  source 1..10: note = HLAs: A0202 A0203 A0205 A0206 A0211 A0214 A02264
WIILGLNKIV

SEQ ID NO: 1197 - protein, 9 aa, Human immunodeficiency virus 1
  source 1..9: note = HLAs: B1503 B15220 B3901
WKGEGAVVI

SEQ ID NO: 1198 - protein, 9 aa, Human immunodeficiency virus 1
  source 1..9: note = HLAs: B5701 B5802
WKGPAKLLW

SEQ ID NO: 1199 - protein, 8 aa, Human immunodeficiency virus 1
  source 1..8: note = HLAs: A0202 A0203 A0211 A02264
WMTDTLLV

SEQ ID NO: 1200 - protein, 11 aa, Human immunodeficiency virus 1
  source 1..11: note = HLAs: A0201 A0202 A0203 A0211 A02264 A0230
WMTDTLLVQNA

SEQ ID NO: 1201 - protein, 8 aa, Human immunodeficiency virus 1
  source 1..8: note = HLAs: B5108 B5109
WPLTEEKI

SEQ ID NO: 1202 - protein, 10 aa, Human immunodeficiency virus 1
  source 1..10: note = HLAs: B5401 B5501 B5502 B5601
WPLTEEKIKA

SEQ ID NO: 1203 - protein, 11 aa, Human immunodeficiency virus 1
  source 1..11: note = HLAs: B0702 B0705 B0801 B3501 B3503 B3505 B3508 B3910 B4201 B4202 B5108 B5109 B5501 B5502 B5601 B5604 B5610 B6701
WPLTEEKIKAL

SEQ ID NO: 1204 - protein, 9 aa, Human immunodeficiency virus 1
  source 1..9: note = HLAs: A2301 A2403 A2410 A3201 B1301 B1501 B1503 B1517 B15220 B1524 B1525 B1531 B4403 B4407 B4427 B5301 B5701 B5702 B5703 B5704 B5801 B5802
WQATWIPEW

SEQ ID NO: 1205 - protein, 11 aa, Human immunodeficiency virus 1
  source 1..11: note = HLAs: B1301 B1501 B1503 B15220 B1525
WQATWIPEWEF

SEQ ID NO: 1206 - protein, 8 aa, Human immunodeficiency virus 1
  source 1..8: note = HLAs: B5201
WQLDCTHL

SEQ ID NO: 1207 - protein, 10 aa, Human immunodeficiency virus 1
  source 1..10: note = HLAs: B2702 B2705 B2706 B2707 B3801 B3802 B3901 B3924
WRAMASDFNL

SEQ ID NO: 1208 - protein, 11 aa, Human immunodeficiency virus 1
  source 1..11: note = HLAs: B2707
WRAMASDFNLP

SEQ ID NO: 1209 - protein, 10 aa, Human immunodeficiency virus 1
  source 1..10: note = HLAs: B2702 B2704 B2705 B2706 B2707 B3924 C0701 C0705 C0706 C0718
WRKLVDFREL

SEQ ID NO: 1210 - protein, 8 aa, Human immunodeficiency virus 1
  source 1..8: note = HLAs: A3601 C0303
WTVNDIQK

SEQ ID NO: 1211 - protein, 9 aa, Human immunodeficiency virus 1
  source 1..9: note = HLAs: A0202 A0204 A0205 A0206 A0207 A0214 A2501 A6603 A6802 A6827 B1301 B1517 B5702 B5703 B5802 C0202 C0210 C0217 C0229 C0302 C0303 C0304 C0317 C0501 C0509 C0801 C0803 C0804 C0812 C1202 C1203 C1502 C1504 C1505 C1509 C1601 C1602 C1604 C16112 C1646 C17 C1701 C1702 C1703 C1704 C1705 C1706 C1707
WTVNDIQKL

SEQ ID NO: 1212 - protein, 10 aa, Human immunodeficiency virus 1
  source 1..10: note = HLAs: A0205 A6802 A6827 A6901
WTVNDIQKLV

SEQ ID NO: 1213 - protein, 8 aa, Human immunodeficiency virus 1
  source 1..8: note = HLAs: C0303 C0304 C1502 C1504 C1505 C1509 C1602 C1646 C17 C1701 C1702 C1703 C1704 C1705 C1706 C1707
WTVQPIQL

SEQ ID NO: 1214 - protein, 10 aa, Human immunodeficiency virus 1
  source 1..10: note = HLAs: A2301 A2402 A2403 A2407 A2410 B1501 B1502 B1503 B1516 B1517 B15220 B1525 B1527 B5703 B5801 C0302
WTYQIYQEPF

SEQ ID NO: 1215 - protein, 11 aa, Human immunodeficiency virus 1
  source 1..11: note = HLAs: A1101 A1102 A3402 A6801
WTYQIYQEPFK

SEQ ID NO: 1216 - protein, 8 aa, Human immunodeficiency virus 1
  source 1..8: note = HLAs: A3402 C0303
WVKVVEEK

SEQ ID NO: 1217 - protein, 9 aa, Human immunodeficiency virus 1
  source 1..9: note = HLAs: A2301 A2402 A2403 A2407 A2410 A2464 C1402 C1403
WYQLETEPI

SEQ ID NO: 1218 - protein, 9 aa, Human immunodeficiency virus 1
  source 1..9: note = HLAs: C0202 C0210 C0229 C0302 C0303 C1202 C1203 C1601 C1604 C16112
YALGIIQAQ

SEQ ID NO: 1219 - protein, 9 aa, Human immunodeficiency virus 1
  source 1..9: note = HLAs: B4101
YDPSKDLIA

SEQ ID NO: 1220 - protein, 8 aa, Human immunodeficiency virus 1
  source 1..8: note = HLAs: B1801 B1802 B4402 B4403 B4404 B4407 B4427 B5701
YELHPDKW

SEQ ID NO: 1221 - protein, 9 aa, Human immunodeficiency virus 1
  source 1..9: note = HLAs: B4006 B4101 B5001
YELHPDKWT

SEQ ID NO: 1222 - protein, 10 aa, Human immunodeficiency virus 1
  source 1..10: note = HLAs: A0201 A0202 A0203 A0204 A0205 A0206 A0211 A0214 A02264 A0230 B1302 B1303 B3701 B4001 B4002 B4006 B40114 B4101 B4102 B4415 B4501 B4507 B4901 B5001 B5201
YELHPDKWTV

SEQ ID NO: 1223 - protein, 11 aa, Human immunodeficiency virus 1
  source 1..11: note = HLAs: A0211
YELHPDKWTVQ

SEQ ID NO: 1224 - protein, 9 aa, Human immunodeficiency virus 1
  source 1..9: note = HLAs: A3101 A3104 A3301 A3303 A3305 A6801 A7404
YFILKLAGR

SEQ ID NO: 1225 - protein, 10 aa, Human immunodeficiency virus 1
  source 1..10: note = HLAs: A2301 A2403 A2410
YFILKLAGRW

SEQ ID NO: 1226 - protein, 11 aa, Human immunodeficiency virus 1
  source 1..11: note = HLAs: A0206
YGKQMAGDDCV

SEQ ID NO: 1227 - protein, 8 aa, Human immunodeficiency virus 1
  source 1..8: note = HLAs: B1510 B1518 B1537 B3901 B3905 B3924 C0702 C1402 C1403
YHSNWRAM

SEQ ID NO: 1228 - protein, 9 aa, Human immunodeficiency virus 1
  source 1..9: note = HLAs: B3901 B3906 B3924
YHSNWRAMA

SEQ ID NO: 1229 - protein, 9 aa, Human immunodeficiency virus 1
  source 1..9: note = HLAs: A0201 A0202 A0203 A0204 A0205 A0206 A0207 A0211 A0214 A02264 A0230
YIEAEVIPA

SEQ ID NO: 1230 - protein, 9 aa, Human immunodeficiency virus 1
  source 1..9: note = HLAs: B1503 B15220 B2706 B2707 B3924 C0701 C0702 C0705 C0706 C0718
YKRWIILGL

SEQ ID NO: 1231 - protein, 11 aa, Human immunodeficiency virus 1
  source 1..11: note = HLAs: B2705
YKRWIILGLNK

SEQ ID NO: 1232 - protein, 9 aa, Human immunodeficiency virus 1
  source 1..9: note = HLAs: A0202 A0211 A0301 A0302 A0305 A1101 A1102 A3001 A3101 A3104 A3303 A3401 A3402 A3601 A6602 A6801 A74 A7401 A7402 A7403 A7404 A7405 A7407 A7408 A7409 A7411 A7413 C0303
YLSWVPAHK

SEQ ID NO: 1233 - protein, 10 aa, Human immunodeficiency virus 1
  source 1..10: note = HLAs: A0202 A0203 A02264
YLSWVPAHKG

SEQ ID NO: 1234 - protein, 11 aa, Human immunodeficiency virus 1
  source 1..11: note = HLAs: A0201 A0202 A0203 A0205 A0211 A02264 A0230
YLSWVPAHKGI

SEQ ID NO: 1235 - protein, 9 aa, Human immunodeficiency virus 1
  source 1..9: note = HLAs: A0201 A0202 A0204 A0205 A0206 A0207 A0211 A0214 A0230
YMDDLYVGS

SEQ ID NO: 1236 - protein, 11 aa, Human immunodeficiency virus 1
  source 1..11: note = HLAs: A0201 A0202 A0204 A0205 A0206 A0207 A0211 A0214 A0230 C0401 C0403 C0404 C0407 C0501 C0509 C0704 C0801 C0802 C0803 C0804 C0812 C17 C1701 C1702 C1703 C1704 C1705 C1706 C1801 C1802
YMDDLYVGSDL

SEQ ID NO: 1237 - protein, 9 aa, Human immunodeficiency virus 1
  source 1..9: note = HLAs: C0704
YNPQSQGVV

SEQ ID NO: 1238 - protein, 8 aa, Human immunodeficiency virus 1
  source 1..8: note = HLAs: B5201
YNTPVFAI

SEQ ID NO: 1239 - protein, 9 aa, Human immunodeficiency virus 1
  source 1..9: note = HLAs: A0302 A1101 A1102 A3104 A3303 A3401 A3402 A3601 A6801 A7401 A7402 A7403 A7404 A7405 A7408 A7409 A7411 A7413 C0303 C1602 C1646
YNTPVFAIK

SEQ ID NO: 1240 - protein, 10 aa, Human immunodeficiency virus 1
  source 1..10: note = HLAs: A1101 A1102 A3402 A6801
YNTPVFAIKK

SEQ ID NO: 1241 - protein, 8 aa, Human immunodeficiency virus 1
  source 1..8: note = HLAs: B5701 B5703 B5704 B5802
YNVLPQGW

SEQ ID NO: 1242 - protein, 9 aa, Human immunodeficiency virus 1
  source 1..9: note = HLAs: A0302 A1101 A1102 A3402 A3601 A6801
YNVLPQGWK

SEQ ID NO: 1243 - protein, 8 aa, Human immunodeficiency virus 1
  source 1..8: note = HLAs: B1401 B1402 B3701 B5201 C0102 C0144 C0304 C0401 C0403 C0404 C0407 C0501 C0509 C0602 C0702 C0704 C0705 C0801 C0803 C0804 C1505 C1602 C1646 C17 C1701 C1702 C1703 C1704 C1705 C1706 C1801 C1802
YQEPFKNL

SEQ ID NO: 1244 - protein, 9 aa, Human immunodeficiency virus 1
  source 1..9: note = HLAs: A0301 A0302 A0305 A1101 A1102 A3104 A3402 A3601 A7401 A7402 A7403 A7404 A7405 A7408 A7409 A7411 A7413 B2705 B4701 C0303 C1202 C1602 C1646
YQEPFKNLK

SEQ ID NO: 1245 - protein, 8 aa, Human immunodeficiency virus 1
  source 1..8: note = HLAs: B1501 B1503 B15220 B1525 B1527
YQIYQEPF

SEQ ID NO: 1246 - protein, 9 aa, Human immunodeficiency virus 1
  source 1..9: note = HLAs: A0302 A1101 A1102 A3402 A7404 A7405 A7413
YQIYQEPFK

SEQ ID NO: 1247 - protein, 11 aa, Human immunodeficiency virus 1
  source 1..11: note = HLAs: A0205 A0206 A0214 A2403 A2410 C1402 C1403
YQIYQEPFKNL

SEQ ID NO: 1248 - protein, 8 aa, Human immunodeficiency virus 1
  source 1..8: note = HLAs: A0206 B1302 B1303 B1503 B15220 B5107 B5201
YQLETEPI

SEQ ID NO: 1249 - protein, 8 aa, Human immunodeficiency virus 1
  source 1..8: note = HLAs: B1501 B1502 B1503 B15220 B1525 B1531
YQYMDDLY

SEQ ID NO: 1250 - protein, 9 aa, Human immunodeficiency virus 1
  source 1..9: note = HLAs: A0201 A0202 A0203 A0204 A0205 A0206 A0207 A0211 A0214 A02264 A0230 B1301 B1302 B1303 B1503 B15220 B1525 B2707 B3901 B4701 B4703 B4901 B5107 B5201 C0202 C0210 C0229 C0302 C0303 C0304 C0704 C0801 C0803 C1202 C1203 C1502 C1505 C1604 C17 C1701 C1702 C1703 C1704 C1705 C1706
YQYMDDLYV

SEQ ID NO: 1251 - protein, 10 aa, Human immunodeficiency virus 1
  source 1..10: note = HLAs: A0202 A0205 A0206 A0214 B1503 B15220
YQYMDDLYVG

SEQ ID NO: 1252 - protein, 9 aa, Human immunodeficiency virus 1
  source 1..9: note = HLAs: A0205 A0206 A0214 B1302 B1303 B1503 B15220 B5201
YQYNVLPQG

SEQ ID NO: 1253 - protein, 10 aa, Human immunodeficiency virus 1
  source 1..10: note = HLAs: A2301 A2402 A2403 A2410 A3201 B1301 B1302 B1303 B1501 B1502 B1503 B1516 B15220 B1524 B1525 B1531 B2702 B4403 B4407 B4427 B4701 B5701 B5702 B5703 B5704 B5801 B5802 C0702
YQYNVLPQGW

SEQ ID NO: 1254 - protein, 8 aa, Human immunodeficiency virus 1
  source 1..8: note = HLAs: C1505 C1601 C1602 C16112 C1646
YSAGERII

SEQ ID NO: 1255 - protein, 10 aa, Human immunodeficiency virus 1
  source 1..10: note = HLAs: C1502 C1505 C1602 C1646
YSAGERIIDI

SEQ ID NO: 1256 - protein, 9 aa, Human immunodeficiency virus 1
  source 1..9: note = HLAs: A0207 B5107 B5201 C0102 C0103 C0144 C0202 C0210 C0214 C0217 C0229 C0302 C0303 C0304 C0305 C0317 C0403 C0501 C0509 C0602 C0704 C0705 C0801 C0802 C0803 C0804 C0812 C1202 C1203 C1502 C1504 C1505 C1509 C1601 C1602 C1604 C16112 C1646 C17 C1701 C1702 C1703 C1704 C1705 C1706 C1707
YSPVSILDI

SEQ ID NO: 1257 - protein, 9 aa, Human immunodeficiency virus 1
  source 1..9: note = HLAs: A0201 A0202 A0203 A0204 A0205 A0206 A0207 A0211 A0214 A02264 A0230 A2612 A3201 A3401 A6602 A6603 A6802 A6827 A6901 A7404 B1301 B1302 B1303 B1516 B1517 B5107 B5108 B5201 B5702 B5703 B5802 C0102 C0144 C0202 C0210 C0214 C0217 C0229 C0302 C0303 C0304 C0305 C0317 C0602 C0704 C0801 C0803 C0804 C0812 C1202 C1203 C1502 C1504 C1505 C1509 C1601 C1602 C1604 C16112 C1646 C17 C1701 C1702 C1703 C1704 C1705 C1706 C1707
YTAFTIPSI

SEQ ID NO: 1258 - protein, 10 aa, Human immunodeficiency virus 1
  source 1..10: note = HLAs: A6802 A6827
YTAFTIPSIN

SEQ ID NO: 1259 - protein, 8 aa, Human immunodeficiency virus 1
  source 1..8: note = HLAs: A3601 C0303
YVDGAANR

SEQ ID NO: 1260 - protein, 10 aa, Human immunodeficiency virus 1
  source 1..10: note = HLAs: C0403 C0501 C0509
YVDGAANRET

SEQ ID NO: 1261 - protein, 11 aa, Human immunodeficiency virus 1
  source 1..11: note = HLAs: A3402 A3601 A7404 C0303 C1602 C1646
YVDGAANRETK

SEQ ID NO: 1262 - protein, 8 aa, Human immunodeficiency virus 1
  source 1..8: note = HLAs: C0801 C0803 C1505 C17 C1701 C1702 C1703 C1704 C1705 C1706
YVGSDLEI

SEQ ID NO: 1263 - protein, 10 aa, Human immunodeficiency virus 1
  source 1..10: note = HLAs: A2301 A2402 A2403 A2407 A2410 B1524 B5701 B5801
YWQATWIPEW

SEQ ID NO: 1264 - protein, 11 aa, Human immunodeficiency virus 1
  source 1..11: note = HLAs: A2403
YWQATWIPEWE

SEQ ID NO: 1265 - protein, 8 aa, Human immunodeficiency virus 1
  source 1..8: note = HLAs: B0702 B0801 B2705 C0102 C0103 C0144 C0214 C0303 C0304 C0305 C0401 C0403 C0404 C0407 C0501 C0509 C0602 C0701 C0702 C0704 C0705 C0706 C0718 C0801 C0802 C0803 C0804 C0812 C1402 C1403 C1505 C1601 C1602 C16112 C1646 C17 C1701 C1702 C1703 C1704 C1705 C18 C1801 C1802 C1803
YYDPSKDL

SEQ ID NO: 1266 - protein, 9 aa, Human immunodeficiency virus 1
  source 1..9: note = HLAs: A2301 A2402 A2403 A2407 A2410 A2464 B0702 B0705 B0801 B1403 B2705 B2706 B2707 B3801 B3802 B3901 B3924 B4201 B5610 B5701 B5702 B5703 B5704 B5801 B5802 C0102 C0103 C0144 C0214 C0303 C0304 C0305 C0401 C0403 C0404 C0407 C0501 C0509 C0602 C0701 C0702 C0704 C0705 C0706 C0718 C0801 C0802 C0803 C0804 C0812 C1402 C1403 C1502 C1504 C1505 C1509 C1601 C1602 C16112 C1646 C17 C1701 C1702 C1703 C1704 C1705 C1706 C1707 C18 C1801 C1802 C1803
YYDPSKDLI

SEQ ID NO: 1267 - protein, 10 aa, Human immunodeficiency virus 1
  source 1..10: note = HLAs: C0401 C0403 C0404 C0407 C0702 C0704 C0705 C1402 C1403 C1801 C1802
YYDPSKDLIA

SEQ ID NO: 1268 - protein, 11 aa, Human immunodeficiency virus 1
  source 1..11: note = HLAs: C0401 C0407
YYDPSKDLIAE

SEQ ID NO: 1269 - protein, 11 aa, synthetic construct
  source 1..11: note = Seed: ALLDTGADDTV; note = HLAs: B1301 B1302 B1303
AALDTGADDTI

SEQ ID NO: 1270 - protein, 11 aa, synthetic construct
  source 1..11: note = Seed: ALLDTGADDTV; note = HLAs: A0205 A0207 A0214 B1301 B1302 B1303
AALDTGADDTL

SEQ ID NO: 1271 - protein, 11 aa, synthetic construct
  source 1..11: note = Seed: ALLDTGADDTV; note = HLAs: A0205 B1301 B1302 B1303
AALDTGADDTM

SEQ ID NO: 1272 - protein, 11 aa, synthetic construct
  source 1..11: note = Seed: ALLDTGADDTV; note = HLAs: B1301 B1302 B1303
AALDTGADDTF

SEQ ID NO: 1273 - protein, 11 aa, synthetic construct
  source 1..11: note = Seed: ALLDTGADDTV; note = HLAs: B1301
AALDTGADDTW

SEQ ID NO: 1274 - protein, 11 aa, synthetic construct
  source 1..11: note = Seed: ALLDTGADDTV; note = HLAs: B1301
AALDTGADDTY

SEQ ID NO: 1275 - protein, 11 aa, synthetic construct
  source 1..11: note = Seed: ALLDTGADDTV; note = HLAs: A0205 A0206 A0207 A0214 B1301 B1302 B1303
AALDTGADDTV

SEQ ID NO: 1276 - protein, 11 aa, synthetic construct
  source 1..11: note = Seed: ALLDTGADDTV; note = HLAs: B1301
ARLDTGADDTI

SEQ ID NO: 1277 - protein, 11 aa, synthetic construct
  source 1..11: note = Seed: ALLDTGADDTV; note = HLAs: B1301 B1302
ARLDTGADDTL

SEQ ID NO: 1278 - protein, 11 aa, synthetic construct
  source 1..11: note = Seed: ALLDTGADDTV; note = HLAs: B1301
ARLDTGADDTM

SEQ ID NO: 1279 - protein, 11 aa, synthetic construct
  source 1..11: note = Seed: ALLDTGADDTV; note = HLAs: B1301
ARLDTGADDTF

SEQ ID NO: 1280 - protein, 11 aa, synthetic construct
  source 1..11: note = Seed: ALLDTGADDTV; note = HLAs: B1301
ARLDTGADDTW

SEQ ID NO: 1281 - protein, 11 aa, synthetic construct
  source 1..11: note = Seed: ALLDTGADDTV; note = HLAs: B1301
ANLDTGADDTI

SEQ ID NO: 1282 - protein, 11 aa, synthetic construct
  source 1..11: note = Seed: ALLDTGADDTV; note = HLAs: B1301 B1302
ANLDTGADDTL

SEQ ID NO: 1283 - protein, 11 aa, synthetic construct
  source 1..11: note = Seed: ALLDTGADDTV; note = HLAs: B1301
ANLDTGADDTM

SEQ ID NO: 1284 - protein, 11 aa, synthetic construct
  source 1..11: note = Seed: ALLDTGADDTV; note = HLAs: B1301
ANLDTGADDTF

SEQ ID NO: 1285 - protein, 11 aa, synthetic construct
  source 1..11: note = Seed: ALLDTGADDTV; note = HLAs: B1301
ANLDTGADDTW

SEQ ID NO: 1286 - protein, 11 aa, synthetic construct
  source 1..11: note = Seed: ALLDTGADDTV; note = HLAs: B1301
ANLDTGADDTY

SEQ ID NO: 1287 - protein, 11 aa, synthetic construct
  source 1..11: note = Seed: ALLDTGADDTV; note = HLAs: B1301
ANLDTGADDTV

SEQ ID NO: 1288 - protein, 11 aa, synthetic construct
  source 1..11: note = Seed: ALLDTGADDTV; note = HLAs: B1301
ADLDTGADDTL

SEQ ID NO: 1289 - protein, 11 aa, synthetic construct
  source 1..11: note = Seed: ALLDTGADDTV; note = HLAs: B1301
ADLDTGADDTF

SEQ ID NO: 1290 - protein, 11 aa, synthetic construct
  source 1..11: note = Seed: ALLDTGADDTV; note = HLAs: B1301
ADLDTGADDTW

SEQ ID NO: 1291 - protein, 11 aa, synthetic construct
  source 1..11: note = Seed: ALLDTGADDTV; note = HLAs: B1301
ACLDTGADDTL

SEQ ID NO: 1292 - protein, 11 aa, synthetic construct
  source 1..11: note = Seed: ALLDTGADDTV; note = HLAs: B1301
ACLDTGADDTF

SEQ ID NO: 1293 - protein, 11 aa, synthetic construct
  source 1..11: note = Seed: ALLDTGADDTV; note = HLAs: B1301
ACLDTGADDTW

SEQ ID NO: 1294 - protein, 11 aa, synthetic construct
  source 1..11: note = Seed: ALLDTGADDTV; note = HLAs: A0205 A0214 B1301 B1302 B1303
AQLDTGADDTA

SEQ ID NO: 1295 - protein, 11 aa, synthetic construct
  source 1..11: note = Seed: ALLDTGADDTV; note = HLAs: B1301 B1302 B1303
AQLDTGADDTC

SEQ ID NO: 1296 - protein, 11 aa, synthetic construct
  source 1..11: note = Seed: ALLDTGADDTV; note = HLAs: A0201 A0202 A0204 A0205 A0206 A0207 A0211 A0214 A0230 B1301 B1302 B1303
AQLDTGADDTI

SEQ ID NO: 1297 - protein, 11 aa, synthetic construct
  source 1..11: note = Seed: ALLDTGADDTV; note = HLAs: A0201 A0202 A0204 A0205 A0206 A0207 A0211 A0214 A0230 B1301 B1302 B1303
AQLDTGADDTL

SEQ ID NO: 1298 - protein, 11 aa, synthetic construct
  source 1..11: note = Seed: ALLDTGADDTV; note = HLAs: A0201 A0202 A0204 A0205 A0206 A0207 A0211 A0214 A0230 B1301 B1302 B1303
AQLDTGADDTM

SEQ ID NO: 1299 - protein, 11 aa, synthetic construct
  source 1..11: note = Seed: ALLDTGADDTV; note = HLAs: B1301 B1302 B1303
AQLDTGADDTF

SEQ ID NO: 1300 - protein, 11 aa, synthetic construct
  source 1..11: note = Seed: ALLDTGADDTV; note = HLAs: B1302
AQLDTGADDTT

SEQ ID NO: 1301 - protein, 11 aa, synthetic construct
  source 1..11: note = Seed: ALLDTGADDTV; note = HLAs: B1301 B1302 B1303
AQLDTGADDTW

SEQ ID NO: 1302 - protein, 11 aa, synthetic construct
  source 1..11: note = Seed: ALLDTGADDTV; note = HLAs: B1301 B1302 B1303
AQLDTGADDTY

SEQ ID NO: 1303 - protein, 11 aa, synthetic construct
  source 1..11: note = Seed: ALLDTGADDTV; note = HLAs: A0201 A0202 A0204 A0205 A0206 A0207 A0211 A0214 A0230 B1301 B1302 B1303
AQLDTGADDTV

SEQ ID NO: 1304 - protein, 11 aa, synthetic construct
  source 1..11: note = Seed: ALLDTGADDTV; note = HLAs: B1301 B1302 B1303
AELDTGADDTI

SEQ ID NO: 1305 - protein, 11 aa, synthetic construct
  source 1..11: note = Seed: ALLDTGADDTV; note = HLAs: B1301 B1302 B1303
AELDTGADDTL

SEQ ID NO: 1306 - protein, 11 aa, synthetic construct
  source 1..11: note = Seed: ALLDTGADDTV; note = HLAs: B1301 B1302 B1303
AELDTGADDTM

SEQ ID NO: 1307 - protein, 11 aa, synthetic construct
  source 1..11: note = Seed: ALLDTGADDTV; note = HLAs: B1301 B1302 B1303
AELDTGADDTF

SEQ ID NO: 1308 - protein, 11 aa, synthetic construct
  source 1..11: note = Seed: ALLDTGADDTV; note = HLAs: B1301 B1302 B1303
AELDTGADDTW

SEQ ID NO: 1309 - protein, 11 aa, synthetic construct
  source 1..11: note = Seed: ALLDTGADDTV; note = HLAs: B1301
AELDTGADDTY

SEQ ID NO: 1310 - protein, 11 aa, synthetic construct
  source 1..11: note = Seed: ALLDTGADDTV; note = HLAs: B1301 B1302 B1303
AELDTGADDTV

SEQ ID NO: 1311 - protein, 11 aa, synthetic construct
  source 1..11: note = Seed: ALLDTGADDTV; note = HLAs: B1301
AGLDTGADDTI

SEQ ID NO: 1312 - protein, 11 aa, synthetic construct
  source 1..11: note = Seed: ALLDTGADDTV; note = HLAs: B1301 B1302
AGLDTGADDTL

SEQ ID NO: 1313 - protein, 11 aa, synthetic construct
  source 1..11: note = Seed: ALLDTGADDTV; note = HLAs: B1301
AGLDTGADDTM

SEQ ID NO: 1314 - protein, 11 aa, synthetic construct
  source 1..11: note = Seed: ALLDTGADDTV; note = HLAs: B1301
AGLDTGADDTF

SEQ ID NO: 1315 - protein, 11 aa, synthetic construct
  source 1..11: note = Seed: ALLDTGADDTV; note = HLAs: B1301
AGLDTGADDTW

SEQ ID NO: 1316 - protein, 11 aa, synthetic construct
  source 1..11: note = Seed: ALLDTGADDTV; note = HLAs: B1301
AHLDTGADDTI

SEQ ID NO: 1317 - protein, 11 aa, synthetic construct
  source 1..11: note = Seed: ALLDTGADDTV; note = HLAs: B1301
AHLDTGADDTL

SEQ ID NO: 1318 - protein, 11 aa, synthetic construct
  source 1..11: note = Seed: ALLDTGADDTV; note = HLAs: B1301
AHLDTGADDTM

SEQ ID NO: 1319 - protein, 11 aa, synthetic construct
  source 1..11: note = Seed: ALLDTGADDTV; note = HLAs: B1301
AHLDTGADDTF

SEQ ID NO: 1320 - protein, 11 aa, synthetic construct
  source 1..11: note = Seed: ALLDTGADDTV; note = HLAs: B1301
AHLDTGADDTW

SEQ ID NO: 1321 - protein, 11 aa, synthetic construct
  source 1..11: note = Seed: ALLDTGADDTV; note = HLAs: A0201 A0202 A0205 A0206 A0207 A0211 A0214 A0230
AILDTGADDTA

SEQ ID NO: 1322 - protein, 11 aa, synthetic construct
  source 1..11: note = Seed: ALLDTGADDTV; note = HLAs: A0201 A0202 A0204 A0205 A0206 A0207 A0211 A0214 A0230 B1301 B1302 B1303
AILDTGADDTI

SEQ ID NO: 1323 - protein, 11 aa, synthetic construct
  source 1..11: note = Seed: ALLDTGADDTV; note = HLAs: A0201 A0202 A0203 A0204 A0205 A0206 A0207 A0211 A0214 A02264 A0230 B1301 B1302 B1303
AILDTGADDTL

SEQ ID NO: 1324 - protein, 11 aa, synthetic construct
  source 1..11: note = Seed: ALLDTGADDTV; note = HLAs: A0201 A0202 A0204 A0205 A0206 A0207 A0211 A0214 A0230 B1301 B1302 B1303
AILDTGADDTM

SEQ ID NO: 1325 - protein, 11 aa, synthetic construct
  source 1..11: note = Seed: ALLDTGADDTV; note = HLAs: A0207 B1301 B1302 B1303
AILDTGADDTF

SEQ ID NO: 1326 - protein, 11 aa, synthetic construct
  source 1..11: note = Seed: ALLDTGADDTV; note = HLAs: B1301 B1302 B1303
AILDTGADDTW

SEQ ID NO: 1327 - protein, 11 aa, synthetic construct
  source 1..11: note = Seed: ALLDTGADDTV; note = HLAs: B1301
AILDTGADDTY

SEQ ID NO: 1328 - protein, 11 aa, synthetic construct
  source 1..11: note = Seed: ALLDTGADDTV; note = HLAs: A0201 A0202 A0203 A0204 A0205 A0206 A0207 A0211 A0214 A02264 A0230 B1301 B1302 B1303
AILDTGADDTV

SEQ ID NO: 1329 - protein, 11 aa, synthetic construct
  source 1..11: note = Seed: ALLDTGADDTV; note = HLAs: A0201 A0202 A0203 A0204 A0205 A0206 A0207 A0211 A0214 A02264 A0230 B1302
ALLDTGADDTA

SEQ ID NO: 1330 - protein, 11 aa, synthetic construct
  source 1..11: note = Seed: ALLDTGADDTV; note = HLAs: A0201 A0202 A0205 A0207 A0230 B1301 B1302 B1303
ALLDTGADDTC

SEQ ID NO: 1331 - protein, 11 aa, synthetic construct
  source 1..11: note = Seed: ALLDTGADDTV; note = HLAs: A0201 A0202 A0203 A0204 A0205 A0206 A0207 A0211 A0214 A02264 A0230 B1301 B1302 B1303
ALLDTGADDTI

SEQ ID NO: 1332 - protein, 11 aa, synthetic construct
  source 1..11: note = Seed: ALLDTGADDTV; note = HLAs: A0201 A0202 A0203 A0204 A0205 A0206 A0207 A0211 A0214 A02264 A0230 B1301 B1302 B1303
ALLDTGADDTM

SEQ ID NO: 1333 - protein, 11 aa, synthetic construct
  source 1..11: note = Seed: ALLDTGADDTV; note = HLAs: A0201 A0202 A0204 A0205 A0206 A0207 A0211 A0214 A0230 B1301 B1302 B1303
ALLDTGADDTF

SEQ ID NO: 1334 - protein, 11 aa, synthetic construct
  source 1..11: note = Seed: ALLDTGADDTV; note = HLAs: A0201 A0202 A0205 A0207 A0211 A0214 A0230
ALLDTGADDTT

SEQ ID NO: 1335 - protein, 11 aa, synthetic construct
  source 1..11: note = Seed: ALLDTGADDTV; note = HLAs: B1301 B1302 B1303
ALLDTGADDTW

SEQ ID NO: 1336 - protein, 11 aa, synthetic construct
  source 1..11: note = Seed: ALLDTGADDTV; note = HLAs: B1301 B1302
ALLDTGADDTY

SEQ ID NO: 1337 - protein, 11 aa, synthetic construct
  source 1..11: note = Seed: ALLDTGADDTV; note = HLAs: B1301 B1302
AKLDTGADDTI

SEQ ID NO: 1338 - protein, 11 aa, synthetic construct
  source 1..11: note = Seed: ALLDTGADDTV; note = HLAs: B1301 B1302
AKLDTGADDTL

SEQ ID NO: 1339 - protein, 11 aa, synthetic construct
  source 1..11: note = Seed: ALLDTGADDTV; note = HLAs: B1301
AKLDTGADDTM

SEQ ID NO: 1340 - protein, 11 aa, synthetic construct
  source 1..11: note = Seed: ALLDTGADDTV; note = HLAs: B1301
AKLDTGADDTF

SEQ ID NO: 1341 - protein, 11 aa, synthetic construct
  source 1..11: note = Seed: ALLDTGADDTV; note = HLAs: B1301
AKLDTGADDTW

SEQ ID NO: 1342 - protein, 11 aa, synthetic construct
  source 1..11: note = Seed: ALLDTGADDTV; note = HLAs: B1302
AKLDTGADDTV

SEQ ID NO: 1343 - protein, 11 aa, synthetic construct
  source 1..11: note = Seed: ALLDTGADDTV; note = HLAs: A0201 A0202 A0203 A0204 A0205 A0206 A0207 A0211 A0214 A02264 A0230 B1302
AMLDTGADDTA

SEQ ID NO: 1344 - protein, 11 aa, synthetic construct
  source 1..11: note = Seed: ALLDTGADDTV; note = HLAs: A0202 A0205 A0207 B1301 B1302 B1303
AMLDTGADDTC

SEQ ID NO: 1345 - protein, 11 aa, synthetic construct
  source 1..11: note = Seed: ALLDTGADDTV; note = HLAs: A0201 A0202 A0203 A0204 A0205 A0206 A0207 A0211 A0214 A02264 A0230 B1301 B1302 B1303
AMLDTGADDTI

SEQ ID NO: 1346 - protein, 11 aa, synthetic construct
  source 1..11: note = Seed: ALLDTGADDTV; note = HLAs: A0201 A0202 A0203 A0204 A0205 A0206 A0207 A0211 A0214 A02264 A0230 B1301 B1302 B1303
AMLDTGADDTM

SEQ ID NO: 1347 - protein, 11 aa, synthetic construct
  source 1..11: note = Seed: ALLDTGADDTV; note = HLAs: A0201 A0202 A0204 A0205 A0207 A0211 A0230 B1301 B1302 B1303
AMLDTGADDTF

SEQ ID NO: 1348 - protein, 11 aa, synthetic construct
  source 1..11: note = Seed: ALLDTGADDTV; note = HLAs: A0201 A0202 A0205 A0211 A0230
AMLDTGADDTT

SEQ ID NO: 1349 - protein, 11 aa, synthetic construct
  source 1..11: note = Seed: ALLDTGADDTV; note = HLAs: B1301 B1302 B1303
AMLDTGADDTW

SEQ ID NO: 1350 - protein, 11 aa, synthetic construct
  source 1..11: note = Seed: ALLDTGADDTV; note = HLAs: B1301 B1302
AMLDTGADDTY

SEQ ID NO: 1351 - protein, 11 aa, synthetic construct
  source 1..11: note = Seed: ALLDTGADDTV; note = HLAs: A0201 A0202 A0203 A0204 A0205 A0206 A0207 A0211 A0214 A02264 A0230 B1301 B1302 B1303
AMLDTGADDTV

SEQ ID NO: 1352 - protein, 11 aa, synthetic construct
  source 1..11: note = Seed: ALLDTGADDTV; note = HLAs: B1301
AFLDTGADDTL

SEQ ID NO: 1353 - protein, 11 aa, synthetic construct
  source 1..11: note = Seed: ALLDTGADDTV; note = HLAs: B1301
AFLDTGADDTM

SEQ ID NO: 1354 - protein, 11 aa, synthetic construct
  source 1..11: note = Seed: ALLDTGADDTV; note = HLAs: B1301
AFLDTGADDTF

SEQ ID NO: 1355 - protein, 11 aa, synthetic construct
  source 1..11: note = Seed: ALLDTGADDTV; note = HLAs: B1301
AFLDTGADDTW

SEQ ID NO: 1356 - protein, 11 aa, synthetic construct
  source 1..11: note = Seed: ALLDTGADDTV; note = HLAs: B1301
APLDTGADDTF

SEQ ID NO: 1357 - protein, 11 aa, synthetic construct
  source 1..11: note = Seed: ALLDTGADDTV; note = HLAs: B1301
APLDTGADDTW

SEQ ID NO: 1358 - protein, 11 aa, synthetic construct
  source 1..11: note = Seed: ALLDTGADDTV; note = HLAs: B1301 B1302 B1303
ASLDTGADDTI

SEQ ID NO: 1359 - protein, 11 aa, synthetic construct
  source 1..11: note = Seed: ALLDTGADDTV; note = HLAs: A0207 B1301 B1302 B1303
ASLDTGADDTL

SEQ ID NO: 1360 - protein, 11 aa, synthetic construct
  source 1..11: note = Seed: ALLDTGADDTV; note = HLAs: B1301 B1302
ASLDTGADDTM

SEQ ID NO: 1361 - protein, 11 aa, synthetic construct
  source 1..11: note = Seed: ALLDTGADDTV; note = HLAs: B1301 B1302 B1303
ASLDTGADDTF

SEQ ID NO: 1362 - protein, 11 aa, synthetic construct
  source 1..11: note = Seed: ALLDTGADDTV; note = HLAs: B1301
ASLDTGADDTW

SEQ ID NO: 1363 - protein, 11 aa, synthetic construct
  source 1..11: note = Seed: ALLDTGADDTV; note = HLAs: B1301
ASLDTGADDTY

SEQ ID NO: 1364 - protein, 11 aa, synthetic construct
  source 1..11: note = Seed: ALLDTGADDTV; note = HLAs: B1301 B1302 B1303
ASLDTGADDTV

SEQ ID NO: 1365 - protein, 11 aa, synthetic construct
  source 1..11: note = Seed: ALLDTGADDTV; note = HLAs: A0205
ATLDTGADDTA

SEQ ID NO: 1366 - protein, 11 aa, synthetic construct
  source 1..11: note = Seed: ALLDTGADDTV; note = HLAs: A0205 A0207 B1301 B1302 B1303
ATLDTGADDTI

SEQ ID NO: 1367 - protein, 11 aa, synthetic construct
  source 1..11: note = Seed: ALLDTGADDTV; note = HLAs: A0202 A0204 A0205 A0206 A0207 A0214 B1301 B1302 B1303
ATLDTGADDTL

SEQ ID NO: 1368 - protein, 11 aa, synthetic construct
  source 1..11: note = Seed: ALLDTGADDTV; note = HLAs: A0205 B1301 B1302
ATLDTGADDTM

SEQ ID NO: 1369 - protein, 11 aa, synthetic construct
  source 1..11: note = Seed: ALLDTGADDTV; note = HLAs: B1301 B1302 B1303
ATLDTGADDTF

SEQ ID NO: 1370 - protein, 11 aa, synthetic construct
  source 1..11: note = Seed: ALLDTGADDTV; note = HLAs: B1301
ATLDTGADDTW

SEQ ID NO: 1371 - protein, 11 aa, synthetic construct
  source 1..11: note = Seed: ALLDTGADDTV; note = HLAs: B1301
ATLDTGADDTY

SEQ ID NO: 1372 - protein, 11 aa, synthetic construct
  source 1..11: note = Seed: ALLDTGADDTV; note = HLAs: A0202 A0204 A0205 A0206 A0207 A0214 B1301 B1302 B1303
ATLDTGADDTV

SEQ ID NO: 1373 - protein, 11 aa, synthetic construct
  source 1..11: note = Seed: ALLDTGADDTV; note = HLAs: B1301
AWLDTGADDTW

SEQ ID NO: 1374 - protein, 11 aa, synthetic construct
  source 1..11: note = Seed: ALLDTGADDTV; note = HLAs: B1301
AYLDTGADDTF

SEQ ID NO: 1375 - protein, 11 aa, synthetic construct
  source 1..11: note = Seed: ALLDTGADDTV; note = HLAs: B1301
AYLDTGADDTW

SEQ ID NO: 1376 - protein, 11 aa, synthetic construct
  source 1..11: note = Seed: ALLDTGADDTV; note = HLAs: A0202 A0205 A0206 A0207 A0214
AVLDTGADDTA

SEQ ID NO: 1377 - protein, 11 aa, synthetic construct
  source 1..11: note = Seed: ALLDTGADDTV; note = HLAs: A0201 A0202 A0204 A0205 A0206 A0207 A0211 A0214 A0230 B1301 B1302 B1303
AVLDTGADDTI

SEQ ID NO: 1378 - protein, 11 aa, synthetic construct
  source 1..11: note = Seed: ALLDTGADDTV; note = HLAs: A0201 A0202 A0203 A0204 A0205 A0206 A0207 A0211 A0214 A02264 A0230 B1301 B1302 B1303
AVLDTGADDTL

SEQ ID NO: 1379 - protein, 11 aa, synthetic construct
  source 1..11: note = Seed: ALLDTGADDTV; note = HLAs: A0201 A0202 A0204 A0205 A0206 A0207 A0211 A0214 A0230 B1301 B1302 B1303
AVLDTGADDTM

SEQ ID NO: 1380 - protein, 11 aa, synthetic construct
  source 1..11: note = Seed: ALLDTGADDTV; note = HLAs: A0207 B1301 B1302 B1303
AVLDTGADDTF

SEQ ID NO: 1381 - protein, 11 aa, synthetic construct
  source 1..11: note = Seed: ALLDTGADDTV; note = HLAs: B1301 B1302 B1303
AVLDTGADDTW

SEQ ID NO: 1382 - protein, 11 aa, synthetic construct
  source 1..11: note = Seed: ALLDTGADDTV; note = HLAs: B1301
AVLDTGADDTY

SEQ ID NO: 1383 - protein, 11 aa, synthetic construct
  source 1..11: note = Seed: ALLDTGADDTV; note = HLAs: A0201 A0202 A0203 A0204 A0205 A0206 A0207 A0211 A0214 A02264 A0230 B1301 B1302 B1303
AVLDTGADDTV

SEQ ID NO: 1384 - protein, 8 aa, synthetic construct
  source 1..8: note = Seed: DIQKLVGK; note = HLAs: A3401 A6801
DAQKLVGR

SEQ ID NO: 1385 - protein, 8 aa, synthetic construct
  source 1..8: note = Seed: DIQKLVGK; note = HLAs: A3401 A3402 A6801 C0303
DAQKLVGK

SEQ ID NO: 1386 - protein, 8 aa, synthetic construct
  source 1..8: note = Seed: DIQKLVGK; note = HLAs: A3401
DQQKLVGR

SEQ ID NO: 1387 - protein, 8 aa, synthetic construct
  source 1..8: note = Seed: DIQKLVGK; note = HLAs: A3402
DQQKLVGK

SEQ ID NO: 1388 - protein, 8 aa, synthetic construct
  source 1..8: note = Seed: DIQKLVGK; note = HLAs: A3402
DGQKLVGK

SEQ ID NO: 1389 - protein, 8 aa, synthetic construct
  source 1..8: note = Seed: DIQKLVGK; note = HLAs: A3401 A3402 A6801
DIQKLVGR

SEQ ID NO: 1390 - protein, 8 aa, synthetic construct
  source 1..8: note = Seed: DIQKLVGK; note = HLAs: A3401
DLQKLVGR

SEQ ID NO: 1391 - protein, 8 aa, synthetic construct
  source 1..8: note = Seed: DIQKLVGK; note = HLAs: A3401 A3402 C0303
DLQKLVGK

SEQ ID NO: 1392 - protein, 8 aa, synthetic construct
  source 1..8: note = Seed: DIQKLVGK; note = HLAs: A3401
DMQKLVGR

SEQ ID NO: 1393 - protein, 8 aa, synthetic construct
  source 1..8: note = Seed: DIQKLVGK; note = HLAs: A3402
DMQKLVGK

SEQ ID NO: 1394 - protein, 8 aa, synthetic construct
  source 1..8: note = Seed: DIQKLVGK; note = HLAs: A3401 A6801
DSQKLVGR

SEQ ID NO: 1395 - protein, 8 aa, synthetic construct
  source 1..8: note = Seed: DIQKLVGK; note = HLAs: A3401 A3402
DSQKLVGK

SEQ ID NO: 1396 - protein, 8 aa, synthetic construct
  source 1..8: note = Seed: DIQKLVGK; note = HLAs: A3401 A3402 A6801
DTQKLVGR

SEQ ID NO: 1397 - protein, 8 aa, synthetic construct
  source 1..8: note = Seed: DIQKLVGK; note = HLAs: A3401 A3402 A6801
DTQKLVGK

SEQ ID NO: 1398 - protein, 8 aa, synthetic construct
  source 1..8: note = Seed: DIQKLVGK; note = HLAs: A3401 A3402 A6801
DVQKLVGR

SEQ ID NO: 1399 - protein, 8 aa, synthetic construct
  source 1..8: note = Seed: DIQKLVGK; note = HLAs: A3401 A3402 A6801 C0303
DVQKLVGK

SEQ ID NO: 1400 - protein, 9 aa, synthetic construct
  source 1..9: note = Seed: DIQKLVGKL; note = HLAs: A3401 A6601 A6602 A6603
DAQKLVGKR

SEQ ID NO: 1401 - protein, 9 aa, synthetic construct
  source 1..9: note = Seed: DIQKLVGKL; note = HLAs: A3401
DAQKLVGKH

SEQ ID NO: 1402 - protein, 9 aa, synthetic construct
  source 1..9: note = Seed: DIQKLVGKL; note = HLAs: A2501
DAQKLVGKI

SEQ ID NO: 1403 - protein, 9 aa, synthetic construct
  source 1..9: note = Seed: DIQKLVGKL; note = HLAs: A2501 A3401 A6601 A6602 A6603 B0801
DAQKLVGKL

SEQ ID NO: 1404 - protein, 9 aa, synthetic construct
  source 1..9: note = Seed: DIQKLVGKL; note = HLAs: A3401 A6601 A6602 A6603
DAQKLVGKK

SEQ ID NO: 1405 - protein, 9 aa, synthetic construct
  source 1..9: note = Seed: DIQKLVGKL; note = HLAs: A2501 A2601 A3401 A6601 A6603
DAQKLVGKM

SEQ ID NO: 1406 - protein, 9 aa, synthetic construct
  source 1..9: note = Seed: DIQKLVGKL; note = HLAs: A2501 A2601 A6603
DAQKLVGKF

SEQ ID NO: 1407 - protein, 9 aa, synthetic construct
  source 1..9: note = Seed: DIQKLVGKL; note = HLAs: A2501
DAQKLVGKW

SEQ ID NO: 1408 - protein, 9 aa, synthetic construct
  source 1..9: note = Seed: DIQKLVGKL; note = HLAs: A2501 A2601 A3401 A6601 A6602 A6603
DAQKLVGKY

SEQ ID NO: 1409 - protein, 9 aa, synthetic construct
  source 1..9: note = Seed: DIQKLVGKL; note = HLAs: A6802 A6827
DAQKLVGKV

SEQ ID NO: 1410 - protein, 9 aa, synthetic construct
  source 1..9: note = Seed: DIQKLVGKL; note = HLAs: A3401 A6601 A6602 A6603
DNQKLVGKR

SEQ ID NO: 1411 - protein, 9 aa, synthetic construct
  source 1..9: note = Seed: DIQKLVGKL; note = HLAs: A3401 A6601 A6602 A6603
DNQKLVGKK

SEQ ID NO: 1412 - protein, 9 aa, synthetic construct
  source 1..9: note = Seed: DIQKLVGKL; note = HLAs: A3401 A6601
DDQKLVGKR

SEQ ID NO: 1413 - protein, 9 aa, synthetic construct
  source 1..9: note = Seed: DIQKLVGKL; note = HLAs: A3401
DDQKLVGKK

SEQ ID NO: 1414 - protein, 9 aa, synthetic construct
  source 1..9: note = Seed: DIQKLVGKL; note = HLAs: A3401
DCQKLVGKR

SEQ ID NO: 1415 - protein, 9 aa, synthetic construct
  source 1..9: note = Seed: DIQKLVGKL; note = HLAs: A3401
DCQKLVGKK

SEQ ID NO: 1416 - protein, 9 aa, synthetic construct
  source 1..9: note = Seed: DIQKLVGKL; note = HLAs: A3401 A6601 A6602 A6603
DQQKLVGKR

SEQ ID NO: 1417 - protein, 9 aa, synthetic construct
  source 1..9: note = Seed: DIQKLVGKL; note = HLAs: A3401 A6601 A6602 A6603
DQQKLVGKK

SEQ ID NO: 1418 - protein, 9 aa, synthetic construct
  source 1..9: note = Seed: DIQKLVGKL; note = HLAs: A2501
DQQKLVGKF

SEQ ID NO: 1419 - protein, 9 aa, synthetic construct
  source 1..9: note = Seed: DIQKLVGKL; note = HLAs: A2501
DQQKLVGKW

SEQ ID NO: 1420 - protein, 9 aa, synthetic construct
  source 1..9: note = Seed: DIQKLVGKL; note = HLAs: A2501
DQQKLVGKY

SEQ ID NO: 1421 - protein, 9 aa, synthetic construct
  source 1..9: note = Seed: DIQKLVGKL; note = HLAs: A3401
DEQKLVGKR

SEQ ID NO: 1422 - protein, 9 aa, synthetic construct
  source 1..9: note = Seed: DIQKLVGKL; note = HLAs: A3401
DEQKLVGKK

SEQ ID NO: 1423 - protein, 9 aa, synthetic construct
  source 1..9: note = Seed: DIQKLVGKL; note = HLAs: A3401 A6601 A6602 A6603
DGQKLVGKR

SEQ ID NO: 1424 - protein, 9 aa, synthetic construct
  source 1..9: note = Seed: DIQKLVGKL; note = HLAs: A3401 A6601 A6602 A6603
DGQKLVGKK

SEQ ID NO: 1425 - protein, 9 aa, synthetic construct
  source 1..9: note = Seed: DIQKLVGKL; note = HLAs: A2501
DGQKLVGKW

SEQ ID NO: 1426 - protein, 9 aa, synthetic construct
  source 1..9: note = Seed: DIQKLVGKL; note = HLAs: A3401 A6601 A6602 A6603
DIQKLVGKR

SEQ ID NO: 1427 - protein, 9 aa, synthetic construct
  source 1..9: note = Seed: DIQKLVGKL; note = HLAs: A3401 A6601 A6602 A6603
DIQKLVGKH

SEQ ID NO: 1428 - protein, 9 aa, synthetic construct
  source 1..9: note = Seed: DIQKLVGKL; note = HLAs: A2501 A6603 A6802 A6827
DIQKLVGKI

SEQ ID NO: 1429 - protein, 9 aa, synthetic construct
  source 1..9: note = Seed: DIQKLVGKL; note = HLAs: A3401 A6601 A6602 A6603
DIQKLVGKK

SEQ ID NO: 1430 - protein, 9 aa, synthetic construct
  source 1..9: note = Seed: DIQKLVGKL; note = HLAs: A2501 A2601 A3401 A6601 A6602 A6603
DIQKLVGKM

SEQ ID NO: 1431 - protein, 9 aa, synthetic construct
  source 1..9: note = Seed: DIQKLVGKL; note = HLAs: A2501 A2601 A3401 A6601 A6602 A6603
DIQKLVGKF

SEQ ID NO: 1432 - protein, 9 aa, synthetic construct
  source 1..9: note = Seed: DIQKLVGKL; note = HLAs: A2501
DIQKLVGKW

SEQ ID NO: 1433 - protein, 9 aa, synthetic construct
  source 1..9: note = Seed: DIQKLVGKL; note = HLAs: A2501 A2601 A3401 A6601 A6602 A6603
DIQKLVGKY

SEQ ID NO: 1434 - protein, 9 aa, synthetic construct
  source 1..9: note = Seed: DIQKLVGKL; note = HLAs: A3401 A6603 A6802 A6827
DIQKLVGKV

SEQ ID NO: 1435 - protein, 9 aa, synthetic construct
  source 1..9: note = Seed: DIQKLVGKL; note = HLAs: A3401 A6601 A6602 A6603
DLQKLVGKR

SEQ ID NO: 1436 - protein, 9 aa, synthetic construct
  source 1..9: note = Seed: DIQKLVGKL; note = HLAs: A6603 B0801
DLQKLVGKL

SEQ ID NO: 1437 - protein, 9 aa, synthetic construct
  source 1..9: note = Seed: DIQKLVGKL; note = HLAs: A3401 A6601 A6602 A6603
DLQKLVGKK

SEQ ID NO: 1438 - protein, 9 aa, synthetic construct
  source 1..9: note = Seed: DIQKLVGKL; note = HLAs: A6603
DLQKLVGKM

SEQ ID NO: 1439 - protein, 9 aa, synthetic construct
  source 1..9: note = Seed: DIQKLVGKL; note = HLAs: A2501 A2601
DLQKLVGKF

SEQ ID NO: 1440 - protein, 9 aa, synthetic construct
  source 1..9: note = Seed: DIQKLVGKL; note = HLAs: A2501
DLQKLVGKW

SEQ ID NO: 1441 - protein, 9 aa, synthetic construct
  source 1..9: note = Seed: DIQKLVGKL; note = HLAs: A2501 A2601 A3401 A6601 A6602 A6603
DLQKLVGKY

SEQ ID NO: 1442 - protein, 9 aa, synthetic construct
  source 1..9: note = Seed: DIQKLVGKL; note = HLAs: A6802 A6827
DLQKLVGKV

SEQ ID NO: 1443 - protein, 9 aa, synthetic construct
  source 1..9: note = Seed: DIQKLVGKL; note = HLAs: A3401 A6601 A6602 A6603
DMQKLVGKR

SEQ ID NO: 1444 - protein, 9 aa, synthetic construct
  source 1..9: note = Seed: DIQKLVGKL; note = HLAs: A2501 B0801
DMQKLVGKL

SEQ ID NO: 1445 - protein, 9 aa, synthetic construct
  source 1..9: note = Seed: DIQKLVGKL; note = HLAs: A3401 A6601 A6602 A6603
DMQKLVGKK

SEQ ID NO: 1446 - protein, 9 aa, synthetic construct
  source 1..9: note = Seed: DIQKLVGKL; note = HLAs: A6603 B0801
DMQKLVGKM

SEQ ID NO: 1447 - protein, 9 aa, synthetic construct
  source 1..9: note = Seed: DIQKLVGKL; note = HLAs: A2501 A2601
DMQKLVGKF

SEQ ID NO: 1448 - protein, 9 aa, synthetic construct
  source 1..9: note = Seed: DIQKLVGKL; note = HLAs: A2501
DMQKLVGKW

SEQ ID NO: 1449 - protein, 9 aa, synthetic construct
  source 1..9: note = Seed: DIQKLVGKL; note = HLAs: A2501 A2601 A3401 A6601 A6602 A6603
DMQKLVGKY

SEQ ID NO: 1450 - protein, 9 aa, synthetic construct
  source 1..9: note = Seed: DIQKLVGKL; note = HLAs: A6802 A6827
DMQKLVGKV

SEQ ID NO: 1451 - protein, 9 aa, synthetic construct
  source 1..9: note = Seed: DIQKLVGKL; note = HLAs: A3401 A6601 A6602 A6603
DFQKLVGKR

SEQ ID NO: 1452 - protein, 9 aa, synthetic construct
  source 1..9: note = Seed: DIQKLVGKL; note = HLAs: B0801
DFQKLVGKL

SEQ ID NO: 1453 - protein, 9 aa, synthetic construct
  source 1..9: note = Seed: DIQKLVGKL; note = HLAs: A3401
DFQKLVGKK

SEQ ID NO: 1454 - protein, 9 aa, synthetic construct
  source 1..9: note = Seed: DIQKLVGKL; note = HLAs: A3401
DPQKLVGKR

SEQ ID NO: 1455 - protein, 9 aa, synthetic construct
  source 1..9: note = Seed: DIQKLVGKL; note = HLAs: B0801
DPQKLVGKL

SEQ ID NO: 1456 - protein, 9 aa, synthetic construct
  source 1..9: note = Seed: DIQKLVGKL; note = HLAs: A3401
DPQKLVGKK

SEQ ID NO: 1457 - protein, 9 aa, synthetic construct
  source 1..9: note = Seed: DIQKLVGKL; note = HLAs: A3401 A6601 A6602 A6603
DSQKLVGKR

SEQ ID NO: 1458 - protein, 9 aa, synthetic construct
  source 1..9: note = Seed: DIQKLVGKL; note = HLAs: A2501
DSQKLVGKI

SEQ ID NO: 1459 - protein, 9 aa, synthetic construct
  source 1..9: note = Seed: DIQKLVGKL; note = HLAs: A2501 A6603
DSQKLVGKL

SEQ ID NO: 1460 - protein, 9 aa, synthetic construct
  source 1..9: note = Seed: DIQKLVGKL; note = HLAs: A3401 A6601 A6602 A6603
DSQKLVGKK

SEQ ID NO: 1461 - protein, 9 aa, synthetic construct
  source 1..9: note = Seed: DIQKLVGKL; note = HLAs: A2501 A6603
DSQKLVGKM

SEQ ID NO: 1462 - protein, 9 aa, synthetic construct
  source 1..9: note = Seed: DIQKLVGKL; note = HLAs: A2501 A2601
DSQKLVGKF

SEQ ID NO: 1463 - protein, 9 aa, synthetic construct
  source 1..9: note = Seed: DIQKLVGKL; note = HLAs: A2501
DSQKLVGKW

SEQ ID NO: 1464 - protein, 9 aa, synthetic construct
  source 1..9: note = Seed: DIQKLVGKL; note = HLAs: A2501 A2601 A3401 A6601 A6603
DSQKLVGKY

SEQ ID NO: 1465 - protein, 9 aa, synthetic construct
  source 1..9: note = Seed: DIQKLVGKL; note = HLAs: A6802 A6827
DSQKLVGKV

SEQ ID NO: 1466 - protein, 9 aa, synthetic construct
  source 1..9: note = Seed: DIQKLVGKL; note = HLAs: A6802 A6827
DTQKLVGKA

SEQ ID NO: 1467 - protein, 9 aa, synthetic construct
  source 1..9: note = Seed: DIQKLVGKL; note = HLAs: A3401 A6601 A6602 A6603
DTQKLVGKR

SEQ ID NO: 1468 - protein, 9 aa, synthetic construct
  source 1..9: note = Seed: DIQKLVGKL; note = HLAs: A3401 A6601 A6602 A6603
DTQKLVGKH

SEQ ID NO: 1469 - protein, 9 aa, synthetic construct
  source 1..9: note = Seed: DIQKLVGKL; note = HLAs: A2501 A3401 A6603 A6802 A6827
DTQKLVGKI

SEQ ID NO: 1470 - protein, 9 aa, synthetic construct
  source 1..9: note = Seed: DIQKLVGKL; note = HLAs: A2501 A2601 A3401 A6601 A6602 A6603 A6802 A6827
DTQKLVGKL

SEQ ID NO: 1471 - protein, 9 aa, synthetic construct
  source 1..9: note = Seed: DIQKLVGKL; note = HLAs: A3401 A6601 A6602 A6603
DTQKLVGKK

SEQ ID NO: 1472 - protein, 9 aa, synthetic construct
  source 1..9: note = Seed: DIQKLVGKL; note = HLAs: A2501 A2601 A3401 A6601 A6602 A6603
DTQKLVGKM

SEQ ID NO: 1473 - protein, 9 aa, synthetic construct
  source 1..9: note = Seed: DIQKLVGKL; note = HLAs: A2501 A2601 A3401 A6601 A6602 A6603
DTQKLVGKF

SEQ ID NO: 1474 - protein, 9 aa, synthetic construct
  source 1..9: note = Seed: DIQKLVGKL; note = HLAs: A2501
DTQKLVGKW

SEQ ID NO: 1475 - protein, 9 aa, synthetic construct
  source 1..9: note = Seed: DIQKLVGKL; note = HLAs: A2501 A2601 A3401 A6601 A6602 A6603
DTQKLVGKY

SEQ ID NO: 1476 - protein, 9 aa, synthetic construct
  source 1..9: note = Seed: DIQKLVGKL; note = HLAs: A2501 A3401 A6601 A6603 A6802 A6827
DTQKLVGKV

SEQ ID NO: 1477 - protein, 9 aa, synthetic construct
  source 1..9: note = Seed: DIQKLVGKL; note = HLAs: A3401
DYQKLVGKR

SEQ ID NO: 1478 - protein, 9 aa, synthetic construct
  source 1..9: note = Seed: DIQKLVGKL; note = HLAs: A3401
DYQKLVGKK

SEQ ID NO: 1479 - protein, 9 aa, synthetic construct
  source 1..9: note = Seed: DIQKLVGKL; note = HLAs: A6802 A6827
DVQKLVGKA

SEQ ID NO: 1480 - protein, 9 aa, synthetic construct
  source 1..9: note = Seed: DIQKLVGKL; note = HLAs: A3401 A6601 A6602 A6603
DVQKLVGKR

SEQ ID NO: 1481 - protein, 9 aa, synthetic construct
  source 1..9: note = Seed: DIQKLVGKL; note = HLAs: A3401
DVQKLVGKQ

SEQ ID NO: 1482 - protein, 9 aa, synthetic construct
  source 1..9: note = Seed: DIQKLVGKL; note = HLAs: A2601 A3401 A6601 A6602 A6603
DVQKLVGKH

SEQ ID NO: 1483 - protein, 9 aa, synthetic construct
  source 1..9: note = Seed: DIQKLVGKL; note = HLAs: A2501 A2601 A3401 A6603 A6802 A6827
DVQKLVGKI

SEQ ID NO: 1484 - protein, 9 aa, synthetic construct
  source 1..9: note = Seed: DIQKLVGKL; note = HLAs: A2501 A2601 A3401 A6601 A6602 A6603 A6802 A6827
DVQKLVGKL

SEQ ID NO: 1485 - protein, 9 aa, synthetic construct
  source 1..9: note = Seed: DIQKLVGKL; note = HLAs: A3401 A6601 A6602 A6603
DVQKLVGKK

SEQ ID NO: 1486 - protein, 9 aa, synthetic construct
  source 1..9: note = Seed: DIQKLVGKL; note = HLAs: A2501 A2601 A3401 A6601 A6602 A6603
DVQKLVGKM

SEQ ID NO: 1487 - protein, 9 aa, synthetic construct
  source 1..9: note = Seed: DIQKLVGKL; note = HLAs: A2501 A2601 A3401 A6601 A6602 A6603
DVQKLVGKF

SEQ ID NO: 1488 - protein, 9 aa, synthetic construct
  source 1..9: note = Seed: DIQKLVGKL; note = HLAs: A2501 A2601
DVQKLVGKW

SEQ ID NO: 1489 - protein, 9 aa, synthetic construct
  source 1..9: note = Seed: DIQKLVGKL; note = HLAs: A2501 A2601 A3401 A6601 A6603 A6802 A6827
DVQKLVGKV

SEQ ID NO: 1490 - protein, 9 aa, synthetic construct
  source 1..9: note = Seed: ELHPDKWTV; note = HLAs: A6802 A6827 B5108
EAHPDKWTA

SEQ ID NO: 1491 - protein, 9 aa, synthetic construct
  source 1..9: note = Seed: ELHPDKWTV; note = HLAs: B5108
EAHPDKWTC

SEQ ID NO: 1492 - protein, 9 aa, synthetic construct
  source 1..9: note = Seed: ELHPDKWTV; note = HLAs: A6802 A6827 B1301 B1302 B5107 B5108 B5201 C1505
EAHPDKWTI

SEQ ID NO: 1493 - protein, 9 aa, synthetic construct
  source 1..9: note = Seed: ELHPDKWTV; note = HLAs: A6802 A6827 B1301 B5107 B5108 B5201 C1505
EAHPDKWTL

SEQ ID NO: 1494 - protein, 9 aa, synthetic construct
  source 1..9: note = Seed: ELHPDKWTV; note = HLAs: B5108 B5201 C1505
EAHPDKWTM

SEQ ID NO: 1495 - protein, 9 aa, synthetic construct
  source 1..9: note = Seed: ELHPDKWTV; note = HLAs: B1301 B5108 C1505
EAHPDKWTF

SEQ ID NO: 1496 - protein, 9 aa, synthetic construct
  source 1..9: note = Seed: ELHPDKWTV; note = HLAs: B5108
EAHPDKWTT

SEQ ID NO: 1497 - protein, 9 aa, synthetic construct
  source 1..9: note = Seed: ELHPDKWTV; note = HLAs: B1301
EAHPDKWTW

SEQ ID NO: 1498 - protein, 9 aa, synthetic construct
  source 1..9: note = Seed: ELHPDKWTV; note = HLAs: A6802 A6827 A6901 B1302 B1303 B5107 B5108 B5201 C1505
EAHPDKWTV

SEQ ID NO: 1499 - protein, 9 aa, synthetic construct
  source 1..9: note = Seed: ELHPDKWTV; note = HLAs: B1301
ERHPDKWTW

SEQ ID NO: 1500 - protein, 9 aa, synthetic construct
  source 1..9: note = Seed: ELHPDKWTV; note = HLAs: B5201
ENHPDKWTV

SEQ ID NO: 1501 - protein, 9 aa, synthetic construct
  source 1..9: note = Seed: ELHPDKWTV; note = HLAs: B5108
ECHPDKWTI

SEQ ID NO: 1502 - protein, 9 aa, synthetic construct
  source 1..9: note = Seed: ELHPDKWTV; note = HLAs: B5108
ECHPDKWTV

SEQ ID NO: 1503 - protein, 9 aa, synthetic construct
  source 1..9: note = Seed: ELHPDKWTV; note = HLAs: B1302 B1303 B5201
EQHPDKWTA

SEQ ID NO: 1504 - protein, 9 aa, synthetic construct
  source 1..9: note = Seed: ELHPDKWTV; note = HLAs: B1301 B1302 B1303 B5107 B5201
EQHPDKWTI

SEQ ID NO: 1505 - protein, 9 aa, synthetic construct
  source 1..9: note = Seed: ELHPDKWTV; note = HLAs: B1301 B1302 B1303 B5107 B5201
EQHPDKWTL

SEQ ID NO: 1506 - protein, 9 aa, synthetic construct
  source 1..9: note = Seed: ELHPDKWTV; note = HLAs: B1301 B1302 B1303 B5107 B5201
EQHPDKWTM

SEQ ID NO: 1507 - protein, 9 aa, synthetic construct
  source 1..9: note = Seed: ELHPDKWTV; note = HLAs: B1301 B1302 B1303 B5201
EQHPDKWTF

SEQ ID NO: 1508 - protein, 9 aa, synthetic construct
  source 1..9: note = Seed: ELHPDKWTV; note = HLAs: B1301 B1302 B1303
EQHPDKWTW

SEQ ID NO: 1509 - protein, 9 aa, synthetic construct
  source 1..9: note = Seed: ELHPDKWTV; note = HLAs: B1301 B1302 B1303
EQHPDKWTY

SEQ ID NO: 1510 - protein, 9 aa, synthetic construct
  source 1..9: note = Seed: ELHPDKWTV; note = HLAs: A0205 B1301 B1302 B1303 B5107 B5201
EQHPDKWTV

SEQ ID NO: 1511 - protein, 9 aa, synthetic construct
  source 1..9: note = Seed: ELHPDKWTV; note = HLAs: B1301 B1302 B1303 B5107 B5201
EEHPDKWTI

SEQ ID NO: 1512 - protein, 9 aa, synthetic construct
  source 1..9: note = Seed: ELHPDKWTV; note = HLAs: B1301 B1302 B1303 B5107 B5201
EEHPDKWTL

SEQ ID NO: 1513 - protein, 9 aa, synthetic construct
  source 1..9: note = Seed: ELHPDKWTV; note = HLAs: B1301
EEHPDKWTF

SEQ ID NO: 1514 - protein, 9 aa, synthetic construct
  source 1..9: note = Seed: ELHPDKWTV; note = HLAs: B1301
EEHPDKWTW

SEQ ID NO: 1515 - protein, 9 aa, synthetic construct
  source 1..9: note = Seed: ELHPDKWTV; note = HLAs: B1302 B1303 B5107 B5201
EEHPDKWTV

SEQ ID NO: 1516 - protein, 9 aa, synthetic construct
  source 1..9: note = Seed: ELHPDKWTV; note = HLAs: B5108
EGHPDKWTI

SEQ ID NO: 1517 - protein, 9 aa, synthetic construct
  source 1..9: note = Seed: ELHPDKWTV; note = HLAs: B5108
EGHPDKWTL

SEQ ID NO: 1518 - protein, 9 aa, synthetic construct
  source 1..9: note = Seed: ELHPDKWTV; note = HLAs: B5107 B5108 B5201
EGHPDKWTV

SEQ ID NO: 1519 - protein, 9 aa, synthetic construct
  source 1..9: note = Seed: ELHPDKWTV; note = HLAs: A6802 A6827
EIHPDKWTA

SEQ ID NO: 1520 - protein, 9 aa, synthetic construct
  source 1..9: note = Seed: ELHPDKWTV; note = HLAs: A6802 A6827 A6901 B1301 B1302 B1303 B5107 B5108 B5201
EIHPDKWTI

SEQ ID NO: 1521 - protein, 9 aa, synthetic construct
  source 1..9: note = Seed: ELHPDKWTV; note = HLAs: A6802 A6827 B1301 B1302 B1303 B5108 B5201 C1505
EIHPDKWTL

SEQ ID NO: 1522 - protein, 9 aa, synthetic construct
  source 1..9: note = Seed: ELHPDKWTV; note = HLAs: A6802 A6827 B1301 C1505
EIHPDKWTM

SEQ ID NO: 1523 - protein, 9 aa, synthetic construct
  source 1..9: note = Seed: ELHPDKWTV; note = HLAs: B1301
EIHPDKWTF

SEQ ID NO: 1524 - protein, 9 aa, synthetic construct
  source 1..9: note = Seed: ELHPDKWTV; note = HLAs: B1301
EIHPDKWTW

SEQ ID NO: 1525 - protein, 9 aa, synthetic construct
  source 1..9: note = Seed: ELHPDKWTV; note = HLAs: A0205
ELHPDKWTA

SEQ ID NO: 1526 - protein, 9 aa, synthetic construct
  source 1..9: note = Seed: ELHPDKWTV; note = HLAs: A0202 A0204 A0205 A0211 A6802 A6827 B1301 B1302 B1303 B5107 B5201
ELHPDKWTI

SEQ ID NO: 1527 - protein, 9 aa, synthetic construct
  source 1..9: note = Seed: ELHPDKWTV; note = HLAs: A0202 A0204 A0205 A0207 A0211 A6802 A6827 B1301 B1302 B1303 B5201 C1505
ELHPDKWTL

SEQ ID NO: 1528 - protein, 9 aa, synthetic construct
  source 1..9: note = Seed: ELHPDKWTV; note = HLAs: B1301 B1302 B1303
ELHPDKWTM

SEQ ID NO: 1529 - protein, 9 aa, synthetic construct
  source 1..9: note = Seed: ELHPDKWTV; note = HLAs: B1301
ELHPDKWTF

SEQ ID NO: 1530 - protein, 9 aa, synthetic construct
  source 1..9: note = Seed: ELHPDKWTV; note = HLAs: B1301
ELHPDKWTW

SEQ ID NO: 1531 - protein, 9 aa, synthetic construct
  source 1..9: note = Seed: ELHPDKWTV; note = HLAs: B1301
ELHPDKWTY

SEQ ID NO: 1532 - protein, 9 aa, synthetic construct
  source 1..9: note = Seed: ELHPDKWTV; note = HLAs: A0205
EMHPDKWTA

SEQ ID NO: 1533 - protein, 9 aa, synthetic construct
  source 1..9: note = Seed: ELHPDKWTV; note = HLAs: A0202 A0203 A0204 A0205 A0211 A02264 A6802 A6827 B1301 B1302 B1303 B5107 B5201
EMHPDKWTI

SEQ ID NO: 1534 - protein, 9 aa, synthetic construct
  source 1..9: note = Seed: ELHPDKWTV; note = HLAs: A0202 A0204 A0205 A0207 A0211 B1301 B1302 B1303 B5107 B5201 C1505
EMHPDKWTL

SEQ ID NO: 1535 - protein, 9 aa, synthetic construct
  source 1..9: note = Seed: ELHPDKWTV; note = HLAs: B1301 B1302 B1303 B5201
EMHPDKWTM

SEQ ID NO: 1536 - protein, 9 aa, synthetic construct
  source 1..9: note = Seed: ELHPDKWTV; note = HLAs: B1301 B1302 B1303
EMHPDKWTF

SEQ ID NO: 1537 - protein, 9 aa, synthetic construct
  source 1..9: note = Seed: ELHPDKWTV; note = HLAs: B1301
EMHPDKWTW

SEQ ID NO: 1538 - protein, 9 aa, synthetic construct
  source 1..9: note = Seed: ELHPDKWTV; note = HLAs: B1301
EMHPDKWTY

SEQ ID NO: 1539 - protein, 9 aa, synthetic construct
  source 1..9: note = Seed: ELHPDKWTV; note = HLAs: A0201 A0202 A0203 A0204 A0205 A0206 A0207 A0211 A0214 A02264 A0230 A6802 A6827 A6901 B1301 B1302 B1303 B5107 B5201 C1505
EMHPDKWTV

SEQ ID NO: 1540 - protein, 9 aa, synthetic construct
  source 1..9: note = Seed: ELHPDKWTV; note = HLAs: B5108
EPHPDKWTA

SEQ ID NO: 1541 - protein, 9 aa, synthetic construct
  source 1..9: note = Seed: ELHPDKWTV; note = HLAs: B5108
EPHPDKWTC

SEQ ID NO: 1542 - protein, 9 aa, synthetic construct
  source 1..9: note = Seed: ELHPDKWTV; note = HLAs: B5108
EPHPDKWTI

SEQ ID NO: 1543 - protein, 9 aa, synthetic construct
  source 1..9: note = Seed: ELHPDKWTV; note = HLAs: B5108
EPHPDKWTL

SEQ ID NO: 1544 - protein, 9 aa, synthetic construct
  source 1..9: note = Seed: ELHPDKWTV; note = HLAs: B5108
EPHPDKWTM

SEQ ID NO: 1545 - protein, 9 aa, synthetic construct
  source 1..9: note = Seed: ELHPDKWTV; note = HLAs: B5108
EPHPDKWTF

SEQ ID NO: 1546 - protein, 9 aa, synthetic construct
  source 1..9: note = Seed: ELHPDKWTV; note = HLAs: B5108
EPHPDKWTV

SEQ ID NO: 1547 - protein, 9 aa, synthetic construct
  source 1..9: note = Seed: ELHPDKWTV; note = HLAs: A6802 A6827 B5107 B5108 B5201 C1505
ESHPDKWTI

SEQ ID NO: 1548 - protein, 9 aa, synthetic construct
  source 1..9: note = Seed: ELHPDKWTV; note = HLAs: A6802 A6827 B1301 B5108 B5201 C1505
ESHPDKWTL

SEQ ID NO: 1549 - protein, 9 aa, synthetic construct
  source 1..9: note = Seed: ELHPDKWTV; note = HLAs: B5108 C1505
ESHPDKWTM

SEQ ID NO: 1550 - protein, 9 aa, synthetic construct
  source 1..9: note = Seed: ELHPDKWTV; note = HLAs: B1301
ESHPDKWTF

SEQ ID NO: 1551 - protein, 9 aa, synthetic construct
  source 1..9: note = Seed: ELHPDKWTV; note = HLAs: B1301
ESHPDKWTW

SEQ ID NO: 1552 - protein, 9 aa, synthetic construct
  source 1..9: note = Seed: ELHPDKWTV; note = HLAs: A6802 A6827 A6901 B1302 B5107 B5108 B5201 C1505
ESHPDKWTV

SEQ ID NO: 1553 - protein, 9 aa, synthetic construct
  source 1..9: note = Seed: ELHPDKWTV; note = HLAs: A6802 A6827 A6901
ETHPDKWTA

SEQ ID NO: 1554 - protein, 9 aa, synthetic construct
  source 1..9: note = Seed: ELHPDKWTV; note = HLAs: A6802 A6827 A6901 B5108 C1505
ETHPDKWTI

SEQ ID NO: 1555 - protein, 9 aa, synthetic construct
  source 1..9: note = Seed: ELHPDKWTV; note = HLAs: A6802 A6827 A6901 B1301 B5108 C1505
ETHPDKWTL

SEQ ID NO: 1556 - protein, 9 aa, synthetic construct
  source 1..9: note = Seed: ELHPDKWTV; note = HLAs: A6802 A6827 C1505
ETHPDKWTM

SEQ ID NO: 1557 - protein, 9 aa, synthetic construct
  source 1..9: note = Seed: ELHPDKWTV; note = HLAs: B1301
ETHPDKWTF

SEQ ID NO: 1558 - protein, 9 aa, synthetic construct
  source 1..9: note = Seed: ELHPDKWTV; note = HLAs: A6802 A6827
ETHPDKWTT

SEQ ID NO: 1559 - protein, 9 aa, synthetic construct
  source 1..9: note = Seed: ELHPDKWTV; note = HLAs: B1301
ETHPDKWTW

SEQ ID NO: 1560 - protein, 9 aa, synthetic construct
  source 1..9: note = Seed: ELHPDKWTV; note = HLAs: A6802 A6827
EVHPDKWTA

SEQ ID NO: 1561 - protein, 9 aa, synthetic construct
  source 1..9: note = Seed: ELHPDKWTV; note = HLAs: A6802 A6827 A6901 B1301 B1302 B1303 B5107 B5108 B5201 C1505
EVHPDKWTI

SEQ ID NO: 1562 - protein, 9 aa, synthetic construct
  source 1..9: note = Seed: ELHPDKWTV; note = HLAs: A6802 A6827 B1301 B1302 B5108 B5201 C1505
EVHPDKWTL

SEQ ID NO: 1563 - protein, 9 aa, synthetic construct
  source 1..9: note = Seed: ELHPDKWTV; note = HLAs: A6802 A6827 C1505
EVHPDKWTM

SEQ ID NO: 1564 - protein, 9 aa, synthetic construct
  source 1..9: note = Seed: ELHPDKWTV; note = HLAs: B1301
EVHPDKWTF

SEQ ID NO: 1565 - protein, 9 aa, synthetic construct
  source 1..9: note = Seed: ELHPDKWTV; note = HLAs: B1301
EVHPDKWTW

SEQ ID NO: 1566 - protein, 8 aa, synthetic construct
  source 1..8: note = Seed: IQKLVGKL; note = HLAs: B5107 B5201
IAKLVGKI

SEQ ID NO: 1567 - protein, 8 aa, synthetic construct
  source 1..8: note = Seed: IQKLVGKL; note = HLAs: B5107 B5201 C0704
IAKLVGKL

SEQ ID NO: 1568 - protein, 8 aa, synthetic construct
  source 1..8: note = Seed: IQKLVGKL; note = HLAs: B1502 B1525
IAKLVGKF

SEQ ID NO: 1569 - protein, 8 aa, synthetic construct
  source 1..8: note = Seed: IQKLVGKL; note = HLAs: B1501 B1502 B1525
IAKLVGKY

SEQ ID NO: 1570 - protein, 8 aa, synthetic construct
  source 1..8: note = Seed: IQKLVGKL; note = HLAs: B5107 B5201
IAKLVGKV

SEQ ID NO: 1571 - protein, 8 aa, synthetic construct
  source 1..8: note = Seed: IQKLVGKL; note = HLAs: B1401 B1402
IRKLVGKI

SEQ ID NO: 1572 - protein, 8 aa, synthetic construct
  source 1..8: note = Seed: IQKLVGKL; note = HLAs: B1401 B1402
IRKLVGKL

SEQ ID NO: 1573 - protein, 8 aa, synthetic construct
  source 1..8: note = Seed: IQKLVGKL; note = HLAs: B1503 B15220
IRKLVGKY

SEQ ID NO: 1574 - protein, 8 aa, synthetic construct
  source 1..8: note = Seed: IQKLVGKL; note = HLAs: B5201
INKLVGKI

SEQ ID NO: 1575 - protein, 8 aa, synthetic construct
  source 1..8: note = Seed: IQKLVGKL; note = HLAs: B5201 C0704
INKLVGKL

SEQ ID NO: 1576 - protein, 8 aa, synthetic construct
  source 1..8: note = Seed: IQKLVGKL; note = HLAs: B1502 B1525
INKLVGKY

SEQ ID NO: 1577 - protein, 8 aa, synthetic construct
  source 1..8: note = Seed: IQKLVGKL; note = HLAs: B5201
INKLVGKV

SEQ ID NO: 1578 - protein, 8 aa, synthetic construct
  source 1..8: note = Seed: IQKLVGKL; note = HLAs: B5107 B5201
IDKLVGKI

SEQ ID NO: 1579 - protein, 8 aa, synthetic construct
  source 1..8: note = Seed: IQKLVGKL; note = HLAs: B5201 C0704
IDKLVGKL

SEQ ID NO: 1580 - protein, 8 aa, synthetic construct
  source 1..8: note = Seed: IQKLVGKL; note = HLAs: B1502
IDKLVGKY

SEQ ID NO: 1581 - protein, 8 aa, synthetic construct
  source 1..8: note = Seed: IQKLVGKL; note = HLAs: B5107 B5201
IDKLVGKV

SEQ ID NO: 1582 - protein, 8 aa, synthetic construct
  source 1..8: note = Seed: IQKLVGKL; note = HLAs: B1302 B1303 B5107 B5201
IQKLVGKI

SEQ ID NO: 1583 - protein, 8 aa, synthetic construct
  source 1..8: note = Seed: IQKLVGKL; note = HLAs: B1501 B1502 B1503 B15220 B1525 B5201
IQKLVGKM

SEQ ID NO: 1584 - protein, 8 aa, synthetic construct
  source 1..8: note = Seed: IQKLVGKL; note = HLAs: B1501 B1502 B1503 B15220 B1525 B5201
IQKLVGKF

SEQ ID NO: 1585 - protein, 8 aa, synthetic construct
  source 1..8: note = Seed: IQKLVGKL; note = HLAs: B1501 B1502 B1503 B15220 B1525
IQKLVGKY

SEQ ID NO: 1586 - protein, 8 aa, synthetic construct
  source 1..8: note = Seed: IQKLVGKL; note = HLAs: B1302 B1303 B5107 B5201
IQKLVGKV

SEQ ID NO: 1587 - protein, 8 aa, synthetic construct
  source 1..8: note = Seed: IQKLVGKL; note = HLAs: B5107 B5201
IEKLVGKI

SEQ ID NO: 1588 - protein, 8 aa, synthetic construct
  source 1..8: note = Seed: IQKLVGKL; note = HLAs: B1401 B1402 B5107 B5201 C0704
IEKLVGKL

SEQ ID NO: 1589 - protein, 8 aa, synthetic construct
  source 1..8: note = Seed: IQKLVGKL; note = HLAs: B1502 B1503 B15220
IEKLVGKF

SEQ ID NO: 1590 - protein, 8 aa, synthetic construct
  source 1..8: note = Seed: IQKLVGKL; note = HLAs: B1502 B1503 B15220 B1525
IEKLVGKY

SEQ ID NO: 1591 - protein, 8 aa, synthetic construct
  source 1..8: note = Seed: IQKLVGKL; note = HLAs: B5107 B5201
IEKLVGKV

SEQ ID NO: 1592 - protein, 8 aa, synthetic construct
  source 1..8: note = Seed: IQKLVGKL; note = HLAs: B5201
IGKLVGKI

SEQ ID NO: 1593 - protein, 8 aa, synthetic construct
  source 1..8: note = Seed: IQKLVGKL; note = HLAs: B5201
IGKLVGKL

SEQ ID NO: 1594 - protein, 8 aa, synthetic construct
  source 1..8: note = Seed: IQKLVGKL; note = HLAs: B1502 B1525
IGKLVGKY

SEQ ID NO: 1595 - protein, 8 aa, synthetic construct
  source 1..8: note = Seed: IQKLVGKL; note = HLAs: B5201
IGKLVGKV

SEQ ID NO: 1596 - protein, 8 aa, synthetic construct
  source 1..8: note = Seed: IQKLVGKL; note = HLAs: B1401 B1402 B5201
IHKLVGKI

SEQ ID NO: 1597 - protein, 8 aa, synthetic construct
  source 1..8: note = Seed: IQKLVGKL; note = HLAs: B1401 B1402 C0704
IHKLVGKL

SEQ ID NO: 1598 - protein, 8 aa, synthetic construct
  source 1..8: note = Seed: IQKLVGKL; note = HLAs: B1401 B1402
IHKLVGKM

SEQ ID NO: 1599 - protein, 8 aa, synthetic construct
  source 1..8: note = Seed: IQKLVGKL; note = HLAs: B1502 B1503 B15220
IHKLVGKY

SEQ ID NO: 1600 - protein, 8 aa, synthetic construct
  source 1..8: note = Seed: IQKLVGKL; note = HLAs: B1401 B1402 B5201
IHKLVGKV

SEQ ID NO: 1601 - protein, 8 aa, synthetic construct
  source 1..8: note = Seed: IQKLVGKL; note = HLAs: B5201
IIKLVGKI

SEQ ID NO: 1602 - protein, 8 aa, synthetic construct
  source 1..8: note = Seed: IQKLVGKL; note = HLAs: B1502 B1525
IIKLVGKF

SEQ ID NO: 1603 - protein, 8 aa, synthetic construct
  source 1..8: note = Seed: IQKLVGKL; note = HLAs: B1502 B1525
IIKLVGKY

SEQ ID NO: 1604 - protein, 8 aa, synthetic construct
  source 1..8: note = Seed: IQKLVGKL; note = HLAs: B5201
IIKLVGKV

SEQ ID NO: 1605 - protein, 8 aa, synthetic construct
  source 1..8: note = Seed: IQKLVGKL; note = HLAs: B5201
ILKLVGKI

SEQ ID NO: 1606 - protein, 8 aa, synthetic construct
  source 1..8: note = Seed: IQKLVGKL; note = HLAs: B5201
ILKLVGKL

SEQ ID NO: 1607 - protein, 8 aa, synthetic construct
  source 1..8: note = Seed: IQKLVGKL; note = HLAs: B1525
ILKLVGKF

SEQ ID NO: 1608 - protein, 8 aa, synthetic construct
  source 1..8: note = Seed: IQKLVGKL; note = HLAs: B1501 B1502 B1525
ILKLVGKY

SEQ ID NO: 1609 - protein, 8 aa, synthetic construct
  source 1..8: note = Seed: IQKLVGKL; note = HLAs: B5201
ILKLVGKV

SEQ ID NO: 1610 - protein, 8 aa, synthetic construct
  source 1..8: note = Seed: IQKLVGKL; note = HLAs: B1503 B15220 B1525
IKKLVGKY

SEQ ID NO: 1611 - protein, 8 aa, synthetic construct
  source 1..8: note = Seed: IQKLVGKL; note = HLAs: B5201
IMKLVGKI

SEQ ID NO: 1612 - protein, 8 aa, synthetic construct
  source 1..8: note = Seed: IQKLVGKL; note = HLAs: B5201
IMKLVGKL

SEQ ID NO: 1613 - protein, 8 aa, synthetic construct
  source 1..8: note = Seed: IQKLVGKL; note = HLAs: B1502 B1525
IMKLVGKF

SEQ ID NO: 1614 - protein, 8 aa, synthetic construct
  source 1..8: note = Seed: IQKLVGKL; note = HLAs: B1501 B1502 B1525
IMKLVGKY

SEQ ID NO: 1615 - protein, 8 aa, synthetic construct
  source 1..8: note = Seed: IQKLVGKL; note = HLAs: B5201
IMKLVGKV

SEQ ID NO: 1616 - protein, 8 aa, synthetic construct
  source 1..8: note = Seed: IQKLVGKL; note = HLAs: B1502 B1525
IFKLVGKY

SEQ ID NO: 1617 - protein, 8 aa, synthetic construct
  source 1..8: note = Seed: IQKLVGKL; note = HLAs: B5107
IPKLVGKI

SEQ ID NO: 1618 - protein, 8 aa, synthetic construct
  source 1..8: note = Seed: IQKLVGKL; note = HLAs: B1502
IPKLVGKF

SEQ ID NO: 1619 - protein, 8 aa, synthetic construct
  source 1..8: note = Seed: IQKLVGKL; note = HLAs: B1502
IPKLVGKY

SEQ ID NO: 1620 - protein, 8 aa, synthetic construct
  source 1..8: note = Seed: IQKLVGKL; note = HLAs: B5107
IPKLVGKV

SEQ ID NO: 1621 - protein, 8 aa, synthetic construct
  source 1..8: note = Seed: IQKLVGKL; note = HLAs: B5107 B5201
ISKLVGKI

SEQ ID NO: 1622 - protein, 8 aa, synthetic construct
  source 1..8: note = Seed: IQKLVGKL; note = HLAs: B5201 C0704
ISKLVGKL

SEQ ID NO: 1623 - protein, 8 aa, synthetic construct
  source 1..8: note = Seed: IQKLVGKL; note = HLAs: B1502 B1525
ISKLVGKF

SEQ ID NO: 1624 - protein, 8 aa, synthetic construct
  source 1..8: note = Seed: IQKLVGKL; note = HLAs: B1501 B1502 B1525
ISKLVGKY

SEQ ID NO: 1625 - protein, 8 aa, synthetic construct
  source 1..8: note = Seed: IQKLVGKL; note = HLAs: B5201
ISKLVGKV

SEQ ID NO: 1626 - protein, 8 aa, synthetic construct
  source 1..8: note = Seed: IQKLVGKL; note = HLAs: B5201
ITKLVGKI

SEQ ID NO: 1627 - protein, 8 aa, synthetic construct
  source 1..8: note = Seed: IQKLVGKL; note = HLAs: B1502 B1525
ITKLVGKY

SEQ ID NO: 1628 - protein, 8 aa, synthetic construct
  source 1..8: note = Seed: IQKLVGKL; note = HLAs: B5201
ITKLVGKV

SEQ ID NO: 1629 - protein, 8 aa, synthetic construct
  source 1..8: note = Seed: IQKLVGKL; note = HLAs: B5201
IVKLVGKI

SEQ ID NO: 1630 - protein, 8 aa, synthetic construct
  source 1..8: note = Seed: IQKLVGKL; note = HLAs: B1502 B1525
IVKLVGKF

SEQ ID NO: 1631 - protein, 8 aa, synthetic construct
  source 1..8: note = Seed: IQKLVGKL; note = HLAs: B1502 B1525
IVKLVGKY

SEQ ID NO: 1632 - protein, 8 aa, synthetic construct
  source 1..8: note = Seed: IQKLVGKL; note = HLAs: B5201
IVKLVGKV

SEQ ID NO: 1633 - protein, 9 aa, synthetic construct
  source 1..9: note = Seed: KEPPFLWMG; note = HLAs: B4101
KEPPFLWMA

SEQ ID NO: 1634 - protein, 9 aa, synthetic construct
  source 1..9: note = Seed: KEPPFLWMG; note = HLAs: B4101
KEPPFLWMC

SEQ ID NO: 1635 - protein, 9 aa, synthetic construct
  source 1..9: note = Seed: KEPPFLWMG; note = HLAs: B4101
KEPPFLWMI

SEQ ID NO: 1636 - protein, 9 aa, synthetic construct
  source 1..9: note = Seed: KEPPFLWMG; note = HLAs: B4101
KEPPFLWML

SEQ ID NO: 1637 - protein, 9 aa, synthetic construct
  source 1..9: note = Seed: KEPPFLWMG; note = HLAs: B4101
KEPPFLWMM

SEQ ID NO: 1638 - protein, 9 aa, synthetic construct
  source 1..9: note = Seed: KEPPFLWMG; note = HLAs: B4101
KEPPFLWMF

SEQ ID NO: 1639 - protein, 9 aa, synthetic construct
  source 1..9: note = Seed: KEPPFLWMG; note = HLAs: B4101
KEPPFLWMP

SEQ ID NO: 1640 - protein, 9 aa, synthetic construct
  source 1..9: note = Seed: KEPPFLWMG; note = HLAs: B4101
KEPPFLWMS

SEQ ID NO: 1641 - protein, 9 aa, synthetic construct
  source 1..9: note = Seed: KEPPFLWMG; note = HLAs: B4101
KEPPFLWMT

SEQ ID NO: 1642 - protein, 9 aa, synthetic construct
  source 1..9: note = Seed: KEPPFLWMG; note = HLAs: B4101
KEPPFLWMV

SEQ ID NO: 1643 - protein, 9 aa, synthetic construct
  source 1..9: note = Seed: LDTGADDTV; note = HLAs: B4101
LDTGADDTA

SEQ ID NO: 1644 - protein, 9 aa, synthetic construct
  source 1..9: note = Seed: LDTGADDTV; note = HLAs: B4101
LDTGADDTL

SEQ ID NO: 1645 - protein, 9 aa, synthetic construct
  source 1..9: note = Seed: LDTGADDTV; note = HLAs: B4101
LETGADDTA

SEQ ID NO: 1646 - protein, 9 aa, synthetic construct
  source 1..9: note = Seed: LDTGADDTV; note = HLAs: B4101
LETGADDTC

SEQ ID NO: 1647 - protein, 9 aa, synthetic construct
  source 1..9: note = Seed: LDTGADDTV; note = HLAs: B4101
LETGADDTG

SEQ ID NO: 1648 - protein, 9 aa, synthetic construct
  source 1..9: note = Seed: LDTGADDTV; note = HLAs: B4101
LETGADDTI

SEQ ID NO: 1649 - protein, 9 aa, synthetic construct
  source 1..9: note = Seed: LDTGADDTV; note = HLAs: B4101
LETGADDTL

SEQ ID NO: 1650 - protein, 9 aa, synthetic construct
  source 1..9: note = Seed: LDTGADDTV; note = HLAs: B4101
LETGADDTM

SEQ ID NO: 1651 - protein, 9 aa, synthetic construct
  source 1..9: note = Seed: LDTGADDTV; note = HLAs: B4101
LETGADDTF

SEQ ID NO: 1652 - protein, 9 aa, synthetic construct
  source 1..9: note = Seed: LDTGADDTV; note = HLAs: B4101
LETGADDTP

SEQ ID NO: 1653 - protein, 9 aa, synthetic construct
  source 1..9: note = Seed: LDTGADDTV; note = HLAs: B4101
LETGADDTS

SEQ ID NO: 1654 - protein, 9 aa, synthetic construct
  source 1..9: note = Seed: LDTGADDTV; note = HLAs: B4101
LETGADDTT

SEQ ID NO: 1655 - protein, 9 aa, synthetic construct
  source 1..9: note = Seed: LDTGADDTV; note = HLAs: B4101
LETGADDTV

SEQ ID NO: 1656 - protein, 8 aa, synthetic construct
  source 1..8: note = Seed: LHPDKWTV; note = HLAs: B3906
LHPDKWTA

SEQ ID NO: 1657 - protein, 8 aa, synthetic construct
  source 1..8: note = Seed: LHPDKWTV; note = HLAs: B3906
LHPDKWTL

SEQ ID NO: 1658 - protein, 10 aa, synthetic construct
  source 1..10: note = Seed: LLDTGADDTV; note = HLAs: C0501 C0509 C0802
LADTGADDTA

SEQ ID NO: 1659 - protein, 10 aa, synthetic construct
  source 1..10: note = Seed: LLDTGADDTV; note = HLAs: C0403 C0501 C0509 C0802
LADTGADDTC

SEQ ID NO: 1660 - protein, 10 aa, synthetic construct
  source 1..10: note = Seed: LLDTGADDTV; note = HLAs: C0403 C0501 C0509 C0802
LADTGADDTI

SEQ ID NO: 1661 - protein, 10 aa, synthetic construct
  source 1..10: note = Seed: LLDTGADDTV; note = HLAs: A0207 C0403 C0501 C0509 C0802
LADTGADDTL

SEQ ID NO: 1662 - protein, 10 aa, synthetic construct
  source 1..10: note = Seed: LLDTGADDTV; note = HLAs: C0501 C0509
LADTGADDTK

SEQ ID NO: 1663 - protein, 10 aa, synthetic construct
  source 1..10: note = Seed: LLDTGADDTV; note = HLAs: C0403 C0501 C0509 C0802
LADTGADDTM

SEQ ID NO: 1664 - protein, 10 aa, synthetic construct
  source 1..10: note = Seed: LLDTGADDTV; note = HLAs: C0403 C0501 C0509 C0802
LADTGADDTF

SEQ ID NO: 1665 - protein, 10 aa, synthetic construct
  source 1..10: note = Seed: LLDTGADDTV; note = HLAs: C0501 C0509
LADTGADDTT

SEQ ID NO: 1666 - protein, 10 aa, synthetic construct
  source 1..10: note = Seed: LLDTGADDTV; note = HLAs: C0403 C0501 C0509 C0802
LADTGADDTW

SEQ ID NO: 1667 - protein, 10 aa, synthetic construct
  source 1..10: note = Seed: LLDTGADDTV; note = HLAs: C0403 C0501 C0509 C0802
LADTGADDTY

SEQ ID NO: 1668 - protein, 10 aa, synthetic construct
  source 1..10: note = Seed: LLDTGADDTV; note = HLAs: C0403 C0501 C0509 C0802
LADTGADDTV

SEQ ID NO: 1669 - protein, 10 aa, synthetic construct
  source 1..10: note = Seed: LLDTGADDTV; note = HLAs: C0501 C0509
LNDTGADDTI

SEQ ID NO: 1670 - protein, 10 aa, synthetic construct
  source 1..10: note = Seed: LLDTGADDTV; note = HLAs: C0403 C0501 C0509 C0802
LNDTGADDTL

SEQ ID NO: 1671 - protein, 10 aa, synthetic construct
  source 1..10: note = Seed: LLDTGADDTV; note = HLAs: C0403 C0501 C0509 C0802
LNDTGADDTM

SEQ ID NO: 1672 - protein, 10 aa, synthetic construct
  source 1..10: note = Seed: LLDTGADDTV; note = HLAs: C0403 C0501 C0509 C0802
LNDTGADDTF

SEQ ID NO: 1673 - protein, 10 aa, synthetic construct
  source 1..10: note = Seed: LLDTGADDTV; note = HLAs: C0403 C0501 C0509
LDDTGADDTL

SEQ ID NO: 1674 - protein, 10 aa, synthetic construct
  source 1..10: note = Seed: LLDTGADDTV; note = HLAs: C0501 C0509
LDDTGADDTF

SEQ ID NO: 1675 - protein, 10 aa, synthetic construct
  source 1..10: note = Seed: LLDTGADDTV; note = HLAs: C0403 C0501 C0509 C0802
LCDTGADDTI

SEQ ID NO: 1676 - protein, 10 aa, synthetic construct
  source 1..10: note = Seed: LLDTGADDTV; note = HLAs: C0403 C0501 C0509 C0802
LCDTGADDTL

SEQ ID NO: 1677 - protein, 10 aa, synthetic construct
  source 1..10: note = Seed: LLDTGADDTV; note = HLAs: C0403 C0501 C0509 C0802
LCDTGADDTM

SEQ ID NO: 1678 - protein, 10 aa, synthetic construct
  source 1..10: note = Seed: LLDTGADDTV; note = HLAs: C0403 C0501 C0509 C0802
LCDTGADDTF

SEQ ID NO: 1679 - protein, 10 aa, synthetic construct
  source 1..10: note = Seed: LLDTGADDTV; note = HLAs: C0501 C0509
LCDTGADDTY

SEQ ID NO: 1680 - protein, 10 aa, synthetic construct
  source 1..10: note = Seed: LLDTGADDTV; note = HLAs: C0403 C0501 C0509
LCDTGADDTV

SEQ ID NO: 1681 - protein, 10 aa, synthetic construct
  source 1..10: note = Seed: LLDTGADDTV; note = HLAs: C0403 C0501 C0509
LQDTGADDTI

SEQ ID NO: 1682 - protein, 10 aa, synthetic construct
  source 1..10: note = Seed: LLDTGADDTV; note = HLAs: A0207 C0403 C0501 C0509 C0802
LQDTGADDTL

SEQ ID NO: 1683 - protein, 10 aa, synthetic construct
  source 1..10: note = Seed: LLDTGADDTV; note = HLAs: C0403 C0501 C0509 C0802
LQDTGADDTM

SEQ ID NO: 1684 - protein, 10 aa, synthetic construct
  source 1..10: note = Seed: LLDTGADDTV; note = HLAs: C0403 C0501 C0509 C0802
LQDTGADDTF

SEQ ID NO: 1685 - protein, 10 aa, synthetic construct
  source 1..10: note = Seed: LLDTGADDTV; note = HLAs: C0501 C0509
LQDTGADDTV

SEQ ID NO: 1686 - protein, 10 aa, synthetic construct
  source 1..10: note = Seed: LLDTGADDTV; note = HLAs: C0403 C0501 C0509
LEDTGADDTL

SEQ ID NO: 1687 - protein, 10 aa, synthetic construct
  source 1..10: note = Seed: LLDTGADDTV; note = HLAs: C0501 C0509
LEDTGADDTM

SEQ ID NO: 1688 - protein, 10 aa, synthetic construct
  source 1..10: note = Seed: LLDTGADDTV; note = HLAs: C0501 C0509
LEDTGADDTF

SEQ ID NO: 1689 - protein, 10 aa, synthetic construct
  source 1..10: note = Seed: LLDTGADDTV; note = HLAs: C0403 C0501 C0509 C0802
LGDTGADDTI

SEQ ID NO: 1690 - protein, 10 aa, synthetic construct
  source 1..10: note = Seed: LLDTGADDTV; note = HLAs: C0403 C0501 C0509 C0802
LGDTGADDTL

SEQ ID NO: 1691 - protein, 10 aa, synthetic construct
  source 1..10: note = Seed: LLDTGADDTV; note = HLAs: C0403 C0501 C0509 C0802
LGDTGADDTM

SEQ ID NO: 1692 - protein, 10 aa, synthetic construct
  source 1..10: note = Seed: LLDTGADDTV; note = HLAs: C0403 C0501 C0509 C0802
LGDTGADDTF

SEQ ID NO: 1693 - protein, 10 aa, synthetic construct
  source 1..10: note = Seed: LLDTGADDTV; note = HLAs: C0403 C0501 C0509
LGDTGADDTY

SEQ ID NO: 1694 - protein, 10 aa, synthetic construct
  source 1..10: note = Seed: LLDTGADDTV; note = HLAs: C0403 C0501 C0509 C0802
LGDTGADDTV

SEQ ID NO: 1695 - protein, 10 aa, synthetic construct
  source 1..10: note = Seed: LLDTGADDTV; note = HLAs: C0501 C0509
LIDTGADDTC

SEQ ID NO: 1696 - protein, 10 aa, synthetic construct
  source 1..10: note = Seed: LLDTGADDTV; note = HLAs: A0207 C0403 C0501 C0509 C0802
LIDTGADDTI

SEQ ID NO: 1697 - protein, 10 aa, synthetic construct
  source 1..10: note = Seed: LLDTGADDTV; note = HLAs: A0207 C0403 C0501 C0509 C0802
LIDTGADDTL

SEQ ID NO: 1698 - protein, 10 aa, synthetic construct
  source 1..10: note = Seed: LLDTGADDTV; note = HLAs: C0501 C0509
LIDTGADDTK

SEQ ID NO: 1699 - protein, 10 aa, synthetic construct
  source 1..10: note = Seed: LLDTGADDTV; note = HLAs: A0207 C0403 C0501 C0509 C0802
LIDTGADDTM

SEQ ID NO: 1700 - protein, 10 aa, synthetic construct
  source 1..10: note = Seed: LLDTGADDTV; note = HLAs: A0207 C0403 C0501 C0509 C0802
LIDTGADDTF

SEQ ID NO: 1701 - protein, 10 aa, synthetic construct
  source 1..10: note = Seed: LLDTGADDTV; note = HLAs: C0403 C0501 C0509
LIDTGADDTW

SEQ ID NO: 1702 - protein, 10 aa, synthetic construct
  source 1..10: note = Seed: LLDTGADDTV; note = HLAs: C0403 C0501 C0509 C0802
LIDTGADDTY

SEQ ID NO: 1703 - protein, 10 aa, synthetic construct
  source 1..10: note = Seed: LLDTGADDTV; note = HLAs: A0207 C0403 C0501 C0509 C0802
LIDTGADDTV

SEQ ID NO: 1704 - protein, 10 aa, synthetic construct
  source 1..10: note = Seed: LLDTGADDTV; note = HLAs: A0207
LLDTGADDTA

SEQ ID NO: 1705 - protein, 10 aa, synthetic construct
  source 1..10: note = Seed: LLDTGADDTV; note = HLAs: C0501 C0509
LLDTGADDTC

SEQ ID NO: 1706 - protein, 10 aa, synthetic construct
  source 1..10: note = Seed: LLDTGADDTV; note = HLAs: A0201 A0202 A0207 A0230 C0403 C0501 C0509 C0802
LLDTGADDTI

SEQ ID NO: 1707 - protein, 10 aa, synthetic construct
  source 1..10: note = Seed: LLDTGADDTV; note = HLAs: A0201 A0202 A0204 A0205 A0206 A0207 A0211 A0214 A0230 C0403 C0501 C0509 C0802
LLDTGADDTL

SEQ ID NO: 1708 - protein, 10 aa, synthetic construct
  source 1..10: note = Seed: LLDTGADDTV; note = HLAs: A0201 A0202 A0204 A0207 A0230 C0403 C0501 C0509 C0802
LLDTGADDTM

SEQ ID NO: 1709 - protein, 10 aa, synthetic construct
  source 1..10: note = Seed: LLDTGADDTV; note = HLAs: A0207 C0403 C0501 C0509 C0802
LLDTGADDTF

SEQ ID NO: 1710 - protein, 10 aa, synthetic construct
  source 1..10: note = Seed: LLDTGADDTV; note = HLAs: C0403 C0501 C0509
LLDTGADDTW

SEQ ID NO: 1711 - protein, 10 aa, synthetic construct
  source 1..10: note = Seed: LLDTGADDTV; note = HLAs: A0207 C0403 C0501 C0509
LLDTGADDTY

SEQ ID NO: 1712 - protein, 10 aa, synthetic construct
  source 1..10: note = Seed: LLDTGADDTV; note = HLAs: A0207
LMDTGADDTA

SEQ ID NO: 1713 - protein, 10 aa, synthetic construct
  source 1..10: note = Seed: LLDTGADDTV; note = HLAs: C0403 C0501 C0509
LMDTGADDTC

SEQ ID NO: 1714 - protein, 10 aa, synthetic construct
  source 1..10: note = Seed: LLDTGADDTV; note = HLAs: A0201 A0202 A0204 A0205 A0207 A0230 C0403 C0501 C0509 C0802
LMDTGADDTI

SEQ ID NO: 1715 - protein, 10 aa, synthetic construct
  source 1..10: note = Seed: LLDTGADDTV; note = HLAs: A0201 A0202 A0204 A0205 A0206 A0207 A0211 A0214 A0230 C0403 C0501 C0509 C0802
LMDTGADDTL

SEQ ID NO: 1716 - protein, 10 aa, synthetic construct
  source 1..10: note = Seed: LLDTGADDTV; note = HLAs: A0201 A0202 A0204 A0207 A0211 A0230 C0403 C0501 C0509 C0802
LMDTGADDTM

SEQ ID NO: 1717 - protein, 10 aa, synthetic construct
  source 1..10: note = Seed: LLDTGADDTV; note = HLAs: A0207 C0403 C0501 C0509 C0802
LMDTGADDTF

SEQ ID NO: 1718 - protein, 10 aa, synthetic construct
  source 1..10: note = Seed: LLDTGADDTV; note = HLAs: C0403 C0501 C0509
LMDTGADDTW

SEQ ID NO: 1719 - protein, 10 aa, synthetic construct
  source 1..10: note = Seed: LLDTGADDTV; note = HLAs: C0403 C0501 C0509
LMDTGADDTY

SEQ ID NO: 1720 - protein, 10 aa, synthetic construct
  source 1..10: note = Seed: LLDTGADDTV; note = HLAs: A0201 A0202 A0204 A0205 A0206 A0207 A0211 A0214 A0230 C0403 C0501 C0509 C0802
LMDTGADDTV

SEQ ID NO: 1721 - protein, 10 aa, synthetic construct
  source 1..10: note = Seed: LLDTGADDTV; note = HLAs: C0403 C0501 C0509 C0802
LFDTGADDTI

SEQ ID NO: 1722 - protein, 10 aa, synthetic construct
  source 1..10: note = Seed: LLDTGADDTV; note = HLAs: C0403 C0501 C0509 C0802
LFDTGADDTL

SEQ ID NO: 1723 - protein, 10 aa, synthetic construct
  source 1..10: note = Seed: LLDTGADDTV; note = HLAs: C0403 C0501 C0509 C0802
LFDTGADDTM

SEQ ID NO: 1724 - protein, 10 aa, synthetic construct
  source 1..10: note = Seed: LLDTGADDTV; note = HLAs: C0403 C0501 C0509 C0802
LFDTGADDTF

SEQ ID NO: 1725 - protein, 10 aa, synthetic construct
  source 1..10: note = Seed: LLDTGADDTV; note = HLAs: C0403
LFDTGADDTW

SEQ ID NO: 1726 - protein, 10 aa, synthetic construct
  source 1..10: note = Seed: LLDTGADDTV; note = HLAs: C0403 C0501 C0509
LFDTGADDTY

SEQ ID NO: 1727 - protein, 10 aa, synthetic construct
  source 1..10: note = Seed: LLDTGADDTV; note = HLAs: C0403 C0501 C0509
LFDTGADDTV

SEQ ID NO: 1728 - protein, 10 aa, synthetic construct
  source 1..10: note = Seed: LLDTGADDTV; note = HLAs: C0501 C0509
LPDTGADDTI

SEQ ID NO: 1729 - protein, 10 aa, synthetic construct
  source 1..10: note = Seed: LLDTGADDTV; note = HLAs: C0403 C0501 C0509 C0802
LPDTGADDTL

SEQ ID NO: 1730 - protein, 10 aa, synthetic construct
  source 1..10: note = Seed: LLDTGADDTV; note = HLAs: C0403 C0501 C0509 C0802
LPDTGADDTM

SEQ ID NO: 1731 - protein, 10 aa, synthetic construct
  source 1..10: note = Seed: LLDTGADDTV; note = HLAs: C0403 C0501 C0509 C0802
LPDTGADDTF

SEQ ID NO: 1732 - protein, 10 aa, synthetic construct
  source 1..10: note = Seed: LLDTGADDTV; note = HLAs: C0501 C0509
LPDTGADDTV

SEQ ID NO: 1733 - protein, 10 aa, synthetic construct
  source 1..10: note = Seed: LLDTGADDTV; note = HLAs: C0501 C0509
LSDTGADDTA

SEQ ID NO: 1734 - protein, 10 aa, synthetic construct
  source 1..10: note = Seed: LLDTGADDTV; note = HLAs: C0501 C0509
LSDTGADDTC

SEQ ID NO: 1735 - protein, 10 aa, synthetic construct
  source 1..10: note = Seed: LLDTGADDTV; note = HLAs: C0403 C0501 C0509 C0802
LSDTGADDTI

SEQ ID NO: 1736 - protein, 10 aa, synthetic construct
  source 1..10: note = Seed: LLDTGADDTV; note = HLAs: C0403 C0501 C0509 C0802
LSDTGADDTL

SEQ ID NO: 1737 - protein, 10 aa, synthetic construct
  source 1..10: note = Seed: LLDTGADDTV; note = HLAs: C0403 C0501 C0509 C0802
LSDTGADDTM

SEQ ID NO: 1738 - protein, 10 aa, synthetic construct
  source 1..10: note = Seed: LLDTGADDTV; note = HLAs: C0403 C0501 C0509 C0802
LSDTGADDTF

SEQ ID NO: 1739 - protein, 10 aa, synthetic construct
  source 1..10: note = Seed: LLDTGADDTV; note = HLAs: C0403 C0501 C0509
LSDTGADDTW

SEQ ID NO: 1740 - protein, 10 aa, synthetic construct
  source 1..10: note = Seed: LLDTGADDTV; note = HLAs: C0403 C0501 C0509 C0802
LSDTGADDTY

SEQ ID NO: 1741 - protein, 10 aa, synthetic construct
  source 1..10: note = Seed: LLDTGADDTV; note = HLAs: C0403 C0501 C0509 C0802
LSDTGADDTV

SEQ ID NO: 1742 - protein, 10 aa, synthetic construct
  source 1..10: note = Seed: LLDTGADDTV; note = HLAs: C0501 C0509
LTDTGADDTA

SEQ ID NO: 1743 - protein, 10 aa, synthetic construct
  source 1..10: note = Seed: LLDTGADDTV; note = HLAs: C0403 C0501 C0509
LTDTGADDTC

SEQ ID NO: 1744 - protein, 10 aa, synthetic construct
  source 1..10: note = Seed: LLDTGADDTV; note = HLAs: C0403 C0501 C0509 C0802
LTDTGADDTI

SEQ ID NO: 1745 - protein, 10 aa, synthetic construct
  source 1..10: note = Seed: LLDTGADDTV; note = HLAs: A0207 C0403 C0501 C0509 C0802
LTDTGADDTL

SEQ ID NO: 1746 - protein, 10 aa, synthetic construct
  source 1..10: note = Seed: LLDTGADDTV; note = HLAs: C0403 C0501 C0509 C0802
LTDTGADDTM

SEQ ID NO: 1747 - protein, 10 aa, synthetic construct
  source 1..10: note = Seed: LLDTGADDTV; note = HLAs: C0403 C0501 C0509 C0802
LTDTGADDTF

SEQ ID NO: 1748 - protein, 10 aa, synthetic construct
  source 1..10: note = Seed: LLDTGADDTV; note = HLAs: C0403 C0501 C0509
LTDTGADDTW

SEQ ID NO: 1749 - protein, 10 aa, synthetic construct
  source 1..10: note = Seed: LLDTGADDTV; note = HLAs: C0403 C0501 C0509 C0802
LTDTGADDTY

SEQ ID NO: 1750 - protein, 10 aa, synthetic construct
  source 1..10: note = Seed: LLDTGADDTV; note = HLAs: C0403 C0501 C0509 C0802
LTDTGADDTV

SEQ ID NO: 1751 - protein, 10 aa, synthetic construct
  source 1..10: note = Seed: LLDTGADDTV; note = HLAs: C0403 C0501 C0509
LWDTGADDTI

SEQ ID NO: 1752 - protein, 10 aa, synthetic construct
  source 1..10: note = Seed: LLDTGADDTV; note = HLAs: C0403 C0501 C0509 C0802
LWDTGADDTL

SEQ ID NO: 1753 - protein, 10 aa, synthetic construct
  source 1..10: note = Seed: LLDTGADDTV; note = HLAs: C0403 C0501 C0509 C0802
LWDTGADDTM

SEQ ID NO: 1754 - protein, 10 aa, synthetic construct
  source 1..10: note = Seed: LLDTGADDTV; note = HLAs: C0403 C0501 C0509
LWDTGADDTF

SEQ ID NO: 1755 - protein, 10 aa, synthetic construct
  source 1..10: note = Seed: LLDTGADDTV; note = HLAs: C0403 C0501 C0509
LWDTGADDTV

SEQ ID NO: 1756 - protein, 10 aa, synthetic construct
  source 1..10: note = Seed: LLDTGADDTV; note = HLAs: C0403 C0501 C0509
LYDTGADDTI

SEQ ID NO: 1757 - protein, 10 aa, synthetic construct
  source 1..10: note = Seed: LLDTGADDTV; note = HLAs: C0403 C0501 C0509 C0802
LYDTGADDTL

SEQ ID NO: 1758 - protein, 10 aa, synthetic construct
  source 1..10: note = Seed: LLDTGADDTV; note = HLAs: C0403 C0501 C0509 C0802
LYDTGADDTM

SEQ ID NO: 1759 - protein, 10 aa, synthetic construct
  source 1..10: note = Seed: LLDTGADDTV; note = HLAs: C0403 C0501 C0509 C0802
LYDTGADDTF

SEQ ID NO: 1760 - protein, 10 aa, synthetic construct
  source 1..10: note = Seed: LLDTGADDTV; note = HLAs: C0403 C0501 C0509
LYDTGADDTV

SEQ ID NO: 1761 - protein, 10 aa, synthetic construct
  source 1..10: note = Seed: LLDTGADDTV; note = HLAs: C0501 C0509
LVDTGADDTC

SEQ ID NO: 1762 - protein, 10 aa, synthetic construct
  source 1..10: note = Seed: LLDTGADDTV; note = HLAs: A0207 C0403 C0501 C0509 C0802
LVDTGADDTI

SEQ ID NO: 1763 - protein, 10 aa, synthetic construct
  source 1..10: note = Seed: LLDTGADDTV; note = HLAs: A0207 C0403 C0501 C0509 C0802
LVDTGADDTL

SEQ ID NO: 1764 - protein, 10 aa, synthetic construct
  source 1..10: note = Seed: LLDTGADDTV; note = HLAs: C0501 C0509
LVDTGADDTK

SEQ ID NO: 1765 - protein, 10 aa, synthetic construct
  source 1..10: note = Seed: LLDTGADDTV; note = HLAs: A0207 C0403 C0501 C0509 C0802
LVDTGADDTM

SEQ ID NO: 1766 - protein, 10 aa, synthetic construct
  source 1..10: note = Seed: LLDTGADDTV; note = HLAs: A0207 C0403 C0501 C0509 C0802
LVDTGADDTF

SEQ ID NO: 1767 - protein, 10 aa, synthetic construct
  source 1..10: note = Seed: LLDTGADDTV; note = HLAs: C0403 C0501 C0509 C0802
LVDTGADDTW

SEQ ID NO: 1768 - protein, 10 aa, synthetic construct
  source 1..10: note = Seed: LLDTGADDTV; note = HLAs: C0403 C0501 C0509 C0802
LVDTGADDTY

SEQ ID NO: 1769 - protein, 10 aa, synthetic construct
  source 1..10: note = Seed: LLDTGADDTV; note = HLAs: A0205 A0207 C0403 C0501 C0509 C0802
LVDTGADDTV

SEQ ID NO: 1770 - protein, 9 aa, synthetic construct
  source 1..9: note = Seed: LPQGWKGSP; note = HLAs: B5401 B5501 B5502 B5601
LAQGWKGSA

SEQ ID NO: 1771 - protein, 9 aa, synthetic construct
  source 1..9: note = Seed: LPQGWKGSP; note = HLAs: B4201 B5610
LAQGWKGSL

SEQ ID NO: 1772 - protein, 9 aa, synthetic construct
  source 1..9: note = Seed: LPQGWKGSP; note = HLAs: B4201
LAQGWKGSM

SEQ ID NO: 1773 - protein, 9 aa, synthetic construct
  source 1..9: note = Seed: LPQGWKGSP; note = HLAs: B4201 B5401 B5501 B5502 B5601 B5610
LPQGWKGSA

SEQ ID NO: 1774 - protein, 9 aa, synthetic construct
  source 1..9: note = Seed: LPQGWKGSP; note = HLAs: B4201 B5501 B5502 B5601 B5610
LPQGWKGSC

SEQ ID NO: 1775 - protein, 9 aa, synthetic construct
  source 1..9: note = Seed: LPQGWKGSP; note = HLAs: B5501 B5502 B5601
LPQGWKGSG

SEQ ID NO: 1776 - protein, 9 aa, synthetic construct
  source 1..9: note = Seed: LPQGWKGSP; note = HLAs: B4201 B5401 B5501 B5502 B5601 B5610
LPQGWKGSI

SEQ ID NO: 1777 - protein, 9 aa, synthetic construct
  source 1..9: note = Seed: LPQGWKGSP; note = HLAs: B4201 B5501 B5502 B5601 B5610
LPQGWKGSL

SEQ ID NO: 1778 - protein, 9 aa, synthetic construct
  source 1..9: note = Seed: LPQGWKGSP; note = HLAs: B4201 B5501 B5502 B5601 B5610
LPQGWKGSM

SEQ ID NO: 1779 - protein, 9 aa, synthetic construct
  source 1..9: note = Seed: LPQGWKGSP; note = HLAs: B4201 B5501 B5502 B5601 B5610
LPQGWKGSF

SEQ ID NO: 1780 - protein, 9 aa, synthetic construct
  source 1..9: note = Seed: LPQGWKGSP; note = HLAs: B5501 B5502 B5601
LPQGWKGSS

SEQ ID NO: 1781 - protein, 9 aa, synthetic construct
  source 1..9: note = Seed: LPQGWKGSP; note = HLAs: B4201 B5401 B5501 B5502 B5601 B5610
LPQGWKGST

SEQ ID NO: 1782 - protein, 9 aa, synthetic construct
  source 1..9: note = Seed: LPQGWKGSP; note = HLAs: B4201
LPQGWKGSW

SEQ ID NO: 1783 - protein, 9 aa, synthetic construct
  source 1..9: note = Seed: LPQGWKGSP; note = HLAs: B4201 B5501 B5502 B5601 B5610
LPQGWKGSY

SEQ ID NO: 1784 - protein, 9 aa, synthetic construct
  source 1..9: note = Seed: LPQGWKGSP; note = HLAs: B4201 B5401 B5501 B5502 B5601 B5610
LPQGWKGSV

SEQ ID NO: 1785 - protein, 9 aa, synthetic construct
  source 1..9: note = Seed: LPQGWKGSP; note = HLAs: B4201
LVQGWKGSL

SEQ ID NO: 1786 - protein, 9 aa, synthetic construct
  source 1..9: note = Seed: NDIQKLVGK; note = HLAs: A3401 A3402 A6801 C0303 C1602
NAIQKLVGR

SEQ ID NO: 1787 - protein, 9 aa, synthetic construct
  source 1..9: note = Seed: NDIQKLVGK; note = HLAs: A3401 A3402
NAIQKLVGH

SEQ ID NO: 1788 - protein, 9 aa, synthetic construct
  source 1..9: note = Seed: NDIQKLVGK; note = HLAs: B2705 C0303 C1602
NAIQKLVGI

SEQ ID NO: 1789 - protein, 9 aa, synthetic construct
  source 1..9: note = Seed: NDIQKLVGK; note = HLAs: A3401 B2705 B3701 B4701 C0303 C1602
NAIQKLVGL

SEQ ID NO: 1790 - protein, 9 aa, synthetic construct
  source 1..9: note = Seed: NDIQKLVGK; note = HLAs: A3401 A3402 A3601 A6801 B2705 C0303 C1602
NAIQKLVGK

SEQ ID NO: 1791 - protein, 9 aa, synthetic construct
  source 1..9: note = Seed: NDIQKLVGK; note = HLAs: A3401 B2705 C0303 C1602
NAIQKLVGM

SEQ ID NO: 1792 - protein, 9 aa, synthetic construct
  source 1..9: note = Seed: NDIQKLVGK; note = HLAs: B2705 B4701 C0303 C1602
NAIQKLVGF

SEQ ID NO: 1793 - protein, 9 aa, synthetic construct
  source 1..9: note = Seed: NDIQKLVGK; note = HLAs: C1602
NAIQKLVGW

SEQ ID NO: 1794 - protein, 9 aa, synthetic construct
  source 1..9: note = Seed: NDIQKLVGK; note = HLAs: A3401 A3402 A3601 C0303 C1602
NAIQKLVGY

SEQ ID NO: 1795 - protein, 9 aa, synthetic construct
  source 1..9: note = Seed: NDIQKLVGK; note = HLAs: C0303 C1602
NAIQKLVGV

SEQ ID NO: 1796 - protein, 9 aa, synthetic construct
  source 1..9: note = Seed: NDIQKLVGK; note = HLAs: B2705
NRIQKLVGA

SEQ ID NO: 1797 - protein, 9 aa, synthetic construct
  source 1..9: note = Seed: NDIQKLVGK; note = HLAs: B2705
NRIQKLVGR

SEQ ID NO: 1798 - protein, 9 aa, synthetic construct
  source 1..9: note = Seed: NDIQKLVGK; note = HLAs: B2705
NRIQKLVGC

SEQ ID NO: 1799 - protein, 9 aa, synthetic construct
  source 1..9: note = Seed: NDIQKLVGK; note = HLAs: B2705
NRIQKLVGQ

SEQ ID NO: 1800 - protein, 9 aa, synthetic construct
  source 1..9: note = Seed: NDIQKLVGK; note = HLAs: B2705
NRIQKLVGH

SEQ ID NO: 1801 - protein, 9 aa, synthetic construct
  source 1..9: note = Seed: NDIQKLVGK; note = HLAs: B2705
NRIQKLVGI

SEQ ID NO: 1802 - protein, 9 aa, synthetic construct
  source 1..9: note = Seed: NDIQKLVGK; note = HLAs: B2705
NRIQKLVGL

SEQ ID NO: 1803 - protein, 9 aa, synthetic construct
  source 1..9: note = Seed: NDIQKLVGK; note = HLAs: B2705
NRIQKLVGK

SEQ ID NO: 1804 - protein, 9 aa, synthetic construct
  source 1..9: note = Seed: NDIQKLVGK; note = HLAs: B2705
NRIQKLVGM

SEQ ID NO: 1805 - protein, 9 aa, synthetic construct
  source 1..9: note = Seed: NDIQKLVGK; note = HLAs: B2705 B4701
NRIQKLVGF

SEQ ID NO: 1806 - protein, 9 aa, synthetic construct
  source 1..9: note = Seed: NDIQKLVGK; note = HLAs: B2705
NRIQKLVGW

SEQ ID NO: 1807 - protein, 9 aa, synthetic construct
  source 1..9: note = Seed: NDIQKLVGK; note = HLAs: B2705 B4701
NRIQKLVGY

SEQ ID NO: 1808 - protein, 9 aa, synthetic construct
  source 1..9: note = Seed: NDIQKLVGK; note = HLAs: B2705
NRIQKLVGV

SEQ ID NO: 1809 - protein, 9 aa, synthetic construct
  source 1..9: note = Seed: NDIQKLVGK; note = HLAs: A3401 A3402 A6801 B2705 C0303
NNIQKLVGR

SEQ ID NO: 1810 - protein, 9 aa, synthetic construct
  source 1..9: note = Seed: NDIQKLVGK; note = HLAs: B2705
NNIQKLVGI

SEQ ID NO: 1811 - protein, 9 aa, synthetic construct
  source 1..9: note = Seed: NDIQKLVGK; note = HLAs: B2705
NNIQKLVGL

SEQ ID NO: 1812 - protein, 9 aa, synthetic construct
  source 1..9: note = Seed: NDIQKLVGK; note = HLAs: A3401 A3402 A6801 B2705 C0303 C1602
NNIQKLVGK

SEQ ID NO: 1813 - protein, 9 aa, synthetic construct
  source 1..9: note = Seed: NDIQKLVGK; note = HLAs: B2705
NNIQKLVGM

SEQ ID NO: 1814 - protein, 9 aa, synthetic construct
  source 1..9: note = Seed: NDIQKLVGK; note = HLAs: B2705
NNIQKLVGF

SEQ ID NO: 1815 - protein, 9 aa, synthetic construct
  source 1..9: note = Seed: NDIQKLVGK; note = HLAs: B3701
NDIQKLVGA

SEQ ID NO: 1816 - protein, 9 aa, synthetic construct
  source 1..9: note = Seed: NDIQKLVGK; note = HLAs: A3401 A3402 A6801 C0303
NDIQKLVGR

SEQ ID NO: 1817 - protein, 9 aa, synthetic construct
  source 1..9: note = Seed: NDIQKLVGK; note = HLAs: B3701
NDIQKLVGC

SEQ ID NO: 1818 - protein, 9 aa, synthetic construct
  source 1..9: note = Seed: NDIQKLVGK; note = HLAs: B3701
NDIQKLVGI

SEQ ID NO: 1819 - protein, 9 aa, synthetic construct
  source 1..9: note = Seed: NDIQKLVGK; note = HLAs: B2705 B3701 B4701
NDIQKLVGL

SEQ ID NO: 1820 - protein, 9 aa, synthetic construct
  source 1..9: note = Seed: NDIQKLVGK; note = HLAs: B3701 B4701
NDIQKLVGM

SEQ ID NO: 1821 - protein, 9 aa, synthetic construct
  source 1..9: note = Seed: NDIQKLVGK; note = HLAs: B3701 B4701
NDIQKLVGF

SEQ ID NO: 1822 - protein, 9 aa, synthetic construct
  source 1..9: note = Seed: NDIQKLVGK; note = HLAs: B3701
NDIQKLVGW

SEQ ID NO: 1823 - protein, 9 aa, synthetic construct
  source 1..9: note = Seed: NDIQKLVGK; note = HLAs: A3601 B3701 B4701
NDIQKLVGY

SEQ ID NO: 1824 - protein, 9 aa, synthetic construct
  source 1..9: note = Seed: NDIQKLVGK; note = HLAs: B3701
NDIQKLVGV

SEQ ID NO: 1825 - protein, 9 aa, synthetic construct
  source 1..9: note = Seed: NDIQKLVGK; note = HLAs: A3401 A3402 A6801
NCIQKLVGR

SEQ ID NO: 1826 - protein, 9 aa, synthetic construct
  source 1..9: note = Seed: NDIQKLVGK; note = HLAs: B2705
NCIQKLVGI

SEQ ID NO: 1827 - protein, 9 aa, synthetic construct
  source 1..9: note = Seed: NDIQKLVGK; note = HLAs: B2705 C1602
NCIQKLVGL

SEQ ID NO: 1828 - protein, 9 aa, synthetic construct
  source 1..9: note = Seed: NDIQKLVGK; note = HLAs: A3402
NCIQKLVGK

SEQ ID NO: 1829 - protein, 9 aa, synthetic construct
  source 1..9: note = Seed: NDIQKLVGK; note = HLAs: C1602
NCIQKLVGM

SEQ ID NO: 1830 - protein, 9 aa, synthetic construct
  source 1..9: note = Seed: NDIQKLVGK; note = HLAs: B2705 C1602
NCIQKLVGF

SEQ ID NO: 1831 - protein, 9 aa, synthetic construct
  source 1..9: note = Seed: NDIQKLVGK; note = HLAs: A3401 A3402 A6801 B2705 B4701 C0303
NQIQKLVGR

SEQ ID NO: 1832 - protein, 9 aa, synthetic construct
  source 1..9: note = Seed: NDIQKLVGK; note = HLAs: B2705 B3701 B4701
NQIQKLVGI

SEQ ID NO: 1833 - protein, 9 aa, synthetic construct
  source 1..9: note = Seed: NDIQKLVGK; note = HLAs: B2705 B3701 B4701
NQIQKLVGL

SEQ ID NO: 1834 - protein, 9 aa, synthetic construct
  source 1..9: note = Seed: NDIQKLVGK; note = HLAs: A3401 A3402 A3601 A6801 B2705 B4701 C0303 C1602
NQIQKLVGK

SEQ ID NO: 1835 - protein, 9 aa, synthetic construct
  source 1..9: note = Seed: NDIQKLVGK; note = HLAs: B2705 B3701 B4701
NQIQKLVGM

SEQ ID NO: 1836 - protein, 9 aa, synthetic construct
  source 1..9: note = Seed: NDIQKLVGK; note = HLAs: B2705 B3701 B4701
NQIQKLVGF

SEQ ID NO: 1837 - protein, 9 aa, synthetic construct
  source 1..9: note = Seed: NDIQKLVGK; note = HLAs: B4701
NQIQKLVGW

SEQ ID NO: 1838 - protein, 9 aa, synthetic construct
  source 1..9: note = Seed: NDIQKLVGK; note = HLAs: B2705 B4701
NQIQKLVGY

SEQ ID NO: 1839 - protein, 9 aa, synthetic construct
  source 1..9: note = Seed: NDIQKLVGK; note = HLAs: B2705 B3701 B4701
NQIQKLVGV

SEQ ID NO: 1840 - protein, 9 aa, synthetic construct
  source 1..9: note = Seed: NDIQKLVGK; note = HLAs: B3701
NEIQKLVGA

SEQ ID NO: 1841 - protein, 9 aa, synthetic construct
  source 1..9: note = Seed: NDIQKLVGK; note = HLAs: A3401 A3402 A6801 B3701 B4701 C0303
NEIQKLVGR

SEQ ID NO: 1842 - protein, 9 aa, synthetic construct
  source 1..9: note = Seed: NDIQKLVGK; note = HLAs: B3701
NEIQKLVGC

SEQ ID NO: 1843 - protein, 9 aa, synthetic construct
  source 1..9: note = Seed: NDIQKLVGK; note = HLAs: B3701 B4701
NEIQKLVGI

SEQ ID NO: 1844 - protein, 9 aa, synthetic construct
  source 1..9: note = Seed: NDIQKLVGK; note = HLAs: B2705 B3701 B4701
NEIQKLVGL

SEQ ID NO: 1845 - protein, 9 aa, synthetic construct
  source 1..9: note = Seed: NDIQKLVGK; note = HLAs: A3402 B2705 B3701 B4701 C0303
NEIQKLVGK

SEQ ID NO: 1846 - protein, 9 aa, synthetic construct
  source 1..9: note = Seed: NDIQKLVGK; note = HLAs: B3701 B4701
NEIQKLVGM

SEQ ID NO: 1847 - protein, 9 aa, synthetic construct
  source 1..9: note = Seed: NDIQKLVGK; note = HLAs: B3701 B4701
NEIQKLVGF

SEQ ID NO: 1848 - protein, 9 aa, synthetic construct
  source 1..9: note = Seed: NDIQKLVGK; note = HLAs: B3701
NEIQKLVGP

SEQ ID NO: 1849 - protein, 9 aa, synthetic construct
  source 1..9: note = Seed: NDIQKLVGK; note = HLAs: B3701
NEIQKLVGT

SEQ ID NO: 1850 - protein, 9 aa, synthetic construct
  source 1..9: note = Seed: NDIQKLVGK; note = HLAs: B3701
NEIQKLVGW

SEQ ID NO: 1851 - protein, 9 aa, synthetic construct
  source 1..9: note = Seed: NDIQKLVGK; note = HLAs: B3701 B4701
NEIQKLVGY

SEQ ID NO: 1852 - protein, 9 aa, synthetic construct
  source 1..9: note = Seed: NDIQKLVGK; note = HLAs: B3701 B4701
NEIQKLVGV

SEQ ID NO: 1853 - protein, 9 aa, synthetic construct
  source 1..9: note = Seed: NDIQKLVGK; note = HLAs: A3401 A3402 A6801 B2705 C0303 C1602
NGIQKLVGR

SEQ ID NO: 1854 - protein, 9 aa, synthetic construct
  source 1..9: note = Seed: NDIQKLVGK; note = HLAs: B2705
NGIQKLVGI

SEQ ID NO: 1855 - protein, 9 aa, synthetic construct
  source 1..9: note = Seed: NDIQKLVGK; note = HLAs: B2705 B4701 C0303 C1602
NGIQKLVGL

SEQ ID NO: 1856 - protein, 9 aa, synthetic construct
  source 1..9: note = Seed: NDIQKLVGK; note = HLAs: A3401 A3402 A3601 A6801 B2705 C0303 C1602
NGIQKLVGK

SEQ ID NO: 1857 - protein, 9 aa, synthetic construct
  source 1..9: note = Seed: NDIQKLVGK; note = HLAs: B2705 C0303 C1602
NGIQKLVGM

SEQ ID NO: 1858 - protein, 9 aa, synthetic construct
  source 1..9: note = Seed: NDIQKLVGK; note = HLAs: B2705 B4701 C1602
NGIQKLVGF

SEQ ID NO: 1859 - protein, 9 aa, synthetic construct
  source 1..9: note = Seed: NDIQKLVGK; note = HLAs: C1602
NGIQKLVGY

SEQ ID NO: 1860 - protein, 9 aa, synthetic construct
  source 1..9: note = Seed: NDIQKLVGK; note = HLAs: A3401 A3402 A6801 C0303
NIIQKLVGR

SEQ ID NO: 1861 - protein, 9 aa, synthetic construct
  source 1..9: note = Seed: NDIQKLVGK; note = HLAs: A3401 A3402
NIIQKLVGH

SEQ ID NO: 1862 - protein, 9 aa, synthetic construct
  source 1..9: note = Seed: NDIQKLVGK; note = HLAs: B2705
NIIQKLVGI

SEQ ID NO: 1863 - protein, 9 aa, synthetic construct
  source 1..9: note = Seed: NDIQKLVGK; note = HLAs: A3401 B2705 B4701 C0303 C1602
NIIQKLVGL

SEQ ID NO: 1864 - protein, 9 aa, synthetic construct
  source 1..9: note = Seed: NDIQKLVGK; note = HLAs: A3401 A3402 A3601 A6801 C0303 C1602
NIIQKLVGK

SEQ ID NO: 1865 - protein, 9 aa, synthetic construct
  source 1..9: note = Seed: NDIQKLVGK; note = HLAs: A3401 C0303 C1602
NIIQKLVGM

SEQ ID NO: 1866 - protein, 9 aa, synthetic construct
  source 1..9: note = Seed: NDIQKLVGK; note = HLAs: B2705 B4701 C1602
NIIQKLVGF

SEQ ID NO: 1867 - protein, 9 aa, synthetic construct
  source 1..9: note = Seed: NDIQKLVGK; note = HLAs: A3401 A3402 A3601 C1602
NIIQKLVGY

SEQ ID NO: 1868 - protein, 9 aa, synthetic construct
  source 1..9: note = Seed: NDIQKLVGK; note = HLAs: A3401 A3402 A6801 C0303
NLIQKLVGR

SEQ ID NO: 1869 - protein, 9 aa, synthetic construct
  source 1..9: note = Seed: NDIQKLVGK; note = HLAs: A3402
NLIQKLVGH

SEQ ID NO: 1870 - protein, 9 aa, synthetic construct
  source 1..9: note = Seed: NDIQKLVGK; note = HLAs: B2705
NLIQKLVGI

SEQ ID NO: 1871 - protein, 9 aa, synthetic construct
  source 1..9: note = Seed: NDIQKLVGK; note = HLAs: B2705 B4701 C1602
NLIQKLVGL

SEQ ID NO: 1872 - protein, 9 aa, synthetic construct
  source 1..9: note = Seed: NDIQKLVGK; note = HLAs: A3401 A3402 A3601 A6801 C0303
NLIQKLVGK

SEQ ID NO: 1873 - protein, 9 aa, synthetic construct
  source 1..9: note = Seed: NDIQKLVGK; note = HLAs: B2705 C1602
NLIQKLVGM

SEQ ID NO: 1874 - protein, 9 aa, synthetic construct
  source 1..9: note = Seed: NDIQKLVGK; note = HLAs: B2705 B4701 C1602
NLIQKLVGF

SEQ ID NO: 1875 - protein, 9 aa, synthetic construct
  source 1..9: note = Seed: NDIQKLVGK; note = HLAs: A3402 A3601 C1602
NLIQKLVGY

SEQ ID NO: 1876 - protein, 9 aa, synthetic construct
  source 1..9: note = Seed: NDIQKLVGK; note = HLAs: B2705
NKIQKLVGI

SEQ ID NO: 1877 - protein, 9 aa, synthetic construct
  source 1..9: note = Seed: NDIQKLVGK; note = HLAs: B2705
NKIQKLVGL

SEQ ID NO: 1878 - protein, 9 aa, synthetic construct
  source 1..9: note = Seed: NDIQKLVGK; note = HLAs: B2705
NKIQKLVGK

SEQ ID NO: 1879 - protein, 9 aa, synthetic construct
  source 1..9: note = Seed: NDIQKLVGK; note = HLAs: B2705
NKIQKLVGF

SEQ ID NO: 1880 - protein, 9 aa, synthetic construct
  source 1..9: note = Seed: NDIQKLVGK; note = HLAs: A3401 A3402 A6801
NMIQKLVGR

SEQ ID NO: 1881 - protein, 9 aa, synthetic construct
  source 1..9: note = Seed: NDIQKLVGK; note = HLAs: A3402
NMIQKLVGH

SEQ ID NO: 1882 - protein, 9 aa, synthetic construct
  source 1..9: note = Seed: NDIQKLVGK; note = HLAs: B2705
NMIQKLVGI

SEQ ID NO: 1883 - protein, 9 aa, synthetic construct
  source 1..9: note = Seed: NDIQKLVGK; note = HLAs: B2705 B4701 C0303 C1602
NMIQKLVGL

SEQ ID NO: 1884 - protein, 9 aa, synthetic construct
  source 1..9: note = Seed: NDIQKLVGK; note = HLAs: A3401 A3402 A3601 A6801 C0303
NMIQKLVGK

SEQ ID NO: 1885 - protein, 9 aa, synthetic construct
  source 1..9: note = Seed: NDIQKLVGK; note = HLAs: B2705 C1602
NMIQKLVGM

SEQ ID NO: 1886 - protein, 9 aa, synthetic construct
  source 1..9: note = Seed: NDIQKLVGK; note = HLAs: B2705 B4701 C1602
NMIQKLVGF

SEQ ID NO: 1887 - protein, 9 aa, synthetic construct
  source 1..9: note = Seed: NDIQKLVGK; note = HLAs: A3402 A3601 C1602
NMIQKLVGY

SEQ ID NO: 1888 - protein, 9 aa, synthetic construct
  source 1..9: note = Seed: NDIQKLVGK; note = HLAs: A3401 A3402 A6801
NFIQKLVGR

SEQ ID NO: 1889 - protein, 9 aa, synthetic construct
  source 1..9: note = Seed: NDIQKLVGK; note = HLAs: B2705
NFIQKLVGI

SEQ ID NO: 1890 - protein, 9 aa, synthetic construct
  source 1..9: note = Seed: NDIQKLVGK; note = HLAs: B2705 C1602
NFIQKLVGL

SEQ ID NO: 1891 - protein, 9 aa, synthetic construct
  source 1..9: note = Seed: NDIQKLVGK; note = HLAs: A3402 A6801 C0303
NFIQKLVGK

SEQ ID NO: 1892 - protein, 9 aa, synthetic construct
  source 1..9: note = Seed: NDIQKLVGK; note = HLAs: C1602
NFIQKLVGM

SEQ ID NO: 1893 - protein, 9 aa, synthetic construct
  source 1..9: note = Seed: NDIQKLVGK; note = HLAs: B2705 C1602
NFIQKLVGF

SEQ ID NO: 1894 - protein, 9 aa, synthetic construct
  source 1..9: note = Seed: NDIQKLVGK; note = HLAs: C1602
NFIQKLVGY

SEQ ID NO: 1895 - protein, 9 aa, synthetic construct
  source 1..9: note = Seed: NDIQKLVGK; note = HLAs: A3401 A3402 A6801
NPIQKLVGR

SEQ ID NO: 1896 - protein, 9 aa, synthetic construct
  source 1..9: note = Seed: NDIQKLVGK; note = HLAs: B2705
NPIQKLVGL

SEQ ID NO: 1897 - protein, 9 aa, synthetic construct
  source 1..9: note = Seed: NDIQKLVGK; note = HLAs: A3401 A3402 A6801
NPIQKLVGK

SEQ ID NO: 1898 - protein, 9 aa, synthetic construct
  source 1..9: note = Seed: NDIQKLVGK; note = HLAs: A3401 A3402 A3601 A6801 C0303 C1602
NSIQKLVGR

SEQ ID NO: 1899 - protein, 9 aa, synthetic construct
  source 1..9: note = Seed: NDIQKLVGK; note = HLAs: A3401 A3402
NSIQKLVGH

SEQ ID NO: 1900 - protein, 9 aa, synthetic construct
  source 1..9: note = Seed: NDIQKLVGK; note = HLAs: B2705 C1602
NSIQKLVGI

SEQ ID NO: 1901 - protein, 9 aa, synthetic construct
  source 1..9: note = Seed: NDIQKLVGK; note = HLAs: B2705 B3701 B4701 C0303 C1602
NSIQKLVGL

SEQ ID NO: 1902 - protein, 9 aa, synthetic construct
  source 1..9: note = Seed: NDIQKLVGK; note = HLAs: A3401 A3402 A3601 A6801 B2705 C0303 C1602
NSIQKLVGK

SEQ ID NO: 1903 - protein, 9 aa, synthetic construct
  source 1..9: note = Seed: NDIQKLVGK; note = HLAs: B2705 C0303 C1602
NSIQKLVGM

SEQ ID NO: 1904 - protein, 9 aa, synthetic construct
  source 1..9: note = Seed: NDIQKLVGK; note = HLAs: B2705 B4701 C0303 C1602
NSIQKLVGF

SEQ ID NO: 1905 - protein, 9 aa, synthetic construct
  source 1..9: note = Seed: NDIQKLVGK; note = HLAs: A3401 A3402 A3601 C1602
NSIQKLVGY

SEQ ID NO: 1906 - protein, 9 aa, synthetic construct
  source 1..9: note = Seed: NDIQKLVGK; note = HLAs: C1602
NSIQKLVGV

SEQ ID NO: 1907 - protein, 9 aa, synthetic construct
  source 1..9: note = Seed: NDIQKLVGK; note = HLAs: A3401 A3402 A3601 A6801 C0303 C1602
NTIQKLVGR

SEQ ID NO: 1908 - protein, 9 aa, synthetic construct
  source 1..9: note = Seed: NDIQKLVGK; note = HLAs: A3402
NTIQKLVGQ

SEQ ID NO: 1909 - protein, 9 aa, synthetic construct
  source 1..9: note = Seed: NDIQKLVGK; note = HLAs: A3401 A3402 A6801
NTIQKLVGH

SEQ ID NO: 1910 - protein, 9 aa, synthetic construct
  source 1..9: note = Seed: NDIQKLVGK; note = HLAs: B2705 C1602
NTIQKLVGI

SEQ ID NO: 1911 - protein, 9 aa, synthetic construct
  source 1..9: note = Seed: NDIQKLVGK; note = HLAs: A3401 B2705 B4701 C0303 C1602
NTIQKLVGL

SEQ ID NO: 1912 - protein, 9 aa, synthetic construct
  source 1..9: note = Seed: NDIQKLVGK; note = HLAs: A3401 A3402 A3601 A6801 C0303 C1602
NTIQKLVGK

SEQ ID NO: 1913 - protein, 9 aa, synthetic construct
  source 1..9: note = Seed: NDIQKLVGK; note = HLAs: A3401 C0303 C1602
NTIQKLVGM

SEQ ID NO: 1914 - protein, 9 aa, synthetic construct
  source 1..9: note = Seed: NDIQKLVGK; note = HLAs: A3401 B2705 C1602
NTIQKLVGF

SEQ ID NO: 1915 - protein, 9 aa, synthetic construct
  source 1..9: note = Seed: NDIQKLVGK; note = HLAs: A3401 A3402 A3601 A6801 C1602
NTIQKLVGY

SEQ ID NO: 1916 - protein, 9 aa, synthetic construct
  source 1..9: note = Seed: NDIQKLVGK; note = HLAs: A3401 C1602
NTIQKLVGV

SEQ ID NO: 1917 - protein, 9 aa, synthetic construct
  source 1..9: note = Seed: NDIQKLVGK; note = HLAs: B2705
NWIQKLVGI

SEQ ID NO: 1918 - protein, 9 aa, synthetic construct
  source 1..9: note = Seed: NDIQKLVGK; note = HLAs: B2705
NWIQKLVGL

SEQ ID NO: 1919 - protein, 9 aa, synthetic construct
  source 1..9: note = Seed: NDIQKLVGK; note = HLAs: A3402
NWIQKLVGK

SEQ ID NO: 1920 - protein, 9 aa, synthetic construct
  source 1..9: note = Seed: NDIQKLVGK; note = HLAs: B2705
NWIQKLVGF

SEQ ID NO: 1921 - protein, 9 aa, synthetic construct
  source 1..9: note = Seed: NDIQKLVGK; note = HLAs: A3401 A3402 A6801
NYIQKLVGR

SEQ ID NO: 1922 - protein, 9 aa, synthetic construct
  source 1..9: note = Seed: NDIQKLVGK; note = HLAs: B2705 C1602
NYIQKLVGL

SEQ ID NO: 1923 - protein, 9 aa, synthetic construct
  source 1..9: note = Seed: NDIQKLVGK; note = HLAs: A3402
NYIQKLVGK

SEQ ID NO: 1924 - protein, 9 aa, synthetic construct
  source 1..9: note = Seed: NDIQKLVGK; note = HLAs: C1602
NYIQKLVGM

SEQ ID NO: 1925 - protein, 9 aa, synthetic construct
  source 1..9: note = Seed: NDIQKLVGK; note = HLAs: C1602
NYIQKLVGF

SEQ ID NO: 1926 - protein, 9 aa, synthetic construct
  source 1..9: note = Seed: NDIQKLVGK; note = HLAs: C1602
NYIQKLVGY

SEQ ID NO: 1927 - protein, 9 aa, synthetic construct
  source 1..9: note = Seed: NDIQKLVGK; note = HLAs: A3401 A3402 A6801 C0303 C1602
NVIQKLVGR

SEQ ID NO: 1928 - protein, 9 aa, synthetic construct
  source 1..9: note = Seed: NDIQKLVGK; note = HLAs: A3401 A3402 A6801
NVIQKLVGH

SEQ ID NO: 1929 - protein, 9 aa, synthetic construct
  source 1..9: note = Seed: NDIQKLVGK; note = HLAs: B2705 C1602
NVIQKLVGI

SEQ ID NO: 1930 - protein, 9 aa, synthetic construct
  source 1..9: note = Seed: NDIQKLVGK; note = HLAs: A3401 B2705 B4701 C0303 C1602
NVIQKLVGL

SEQ ID NO: 1931 - protein, 9 aa, synthetic construct
  source 1..9: note = Seed: NDIQKLVGK; note = HLAs: A3401 A3402 A3601 A6801 C0303 C1602
NVIQKLVGK

SEQ ID NO: 1932 - protein, 9 aa, synthetic construct
  source 1..9: note = Seed: NDIQKLVGK; note = HLAs: A3401 C0303 C1602
NVIQKLVGM

SEQ ID NO: 1933 - protein, 9 aa, synthetic construct
  source 1..9: note = Seed: NDIQKLVGK; note = HLAs: A3401 B2705 B4701 C1602
NVIQKLVGF

SEQ ID NO: 1934 - protein, 9 aa, synthetic construct
  source 1..9: note = Seed: NDIQKLVGK; note = HLAs: A3401 A3402 A3601 A6801 C1602
NVIQKLVGY

SEQ ID NO: 1935 - protein, 9 aa, synthetic construct
  source 1..9: note = Seed: NDIQKLVGK; note = HLAs: A3401 C1602
NVIQKLVGV

SEQ ID NO: 1936 - protein, 10 aa, synthetic construct
  source 1..10: note = Seed: NDIQKLVGKL; note = HLAs: B3701
NDIQKLVGKM

SEQ ID NO: 1937 - protein, 10 aa, synthetic construct
  source 1..10: note = Seed: NDIQKLVGKL; note = HLAs: B3701
NDIQKLVGKF

SEQ ID NO: 1938 - protein, 10 aa, synthetic construct
  source 1..10: note = Seed: NDIQKLVGKL; note = HLAs: B4102
NEIQKLVGKA

SEQ ID NO: 1939 - protein, 10 aa, synthetic construct
  source 1..10: note = Seed: NDIQKLVGKL; note = HLAs: B4102
NEIQKLVGKC

SEQ ID NO: 1940 - protein, 10 aa, synthetic construct
  source 1..10: note = Seed: NDIQKLVGKL; note = HLAs: B3701 B4102
NEIQKLVGKI

SEQ ID NO: 1941 - protein, 10 aa, synthetic construct
  source 1..10: note = Seed: NDIQKLVGKL; note = HLAs: B3701 B4102
NEIQKLVGKL

SEQ ID NO: 1942 - protein, 10 aa, synthetic construct
  source 1..10: note = Seed: NDIQKLVGKL; note = HLAs: B3701 B4102
NEIQKLVGKM

SEQ ID NO: 1943 - protein, 10 aa, synthetic construct
  source 1..10: note = Seed: NDIQKLVGKL; note = HLAs: B3701 B4102
NEIQKLVGKF

SEQ ID NO: 1944 - protein, 10 aa, synthetic construct
  source 1..10: note = Seed: NDIQKLVGKL; note = HLAs: B4102
NEIQKLVGKT

SEQ ID NO: 1945 - protein, 10 aa, synthetic construct
  source 1..10: note = Seed: NDIQKLVGKL; note = HLAs: B3701
NEIQKLVGKW

SEQ ID NO: 1946 - protein, 10 aa, synthetic construct
  source 1..10: note = Seed: NDIQKLVGKL; note = HLAs: B3701
NEIQKLVGKY

SEQ ID NO: 1947 - protein, 10 aa, synthetic construct
  source 1..10: note = Seed: NDIQKLVGKL; note = HLAs: B3701 B4102
NEIQKLVGKV

SEQ ID NO: 1948 - protein, 8 aa, synthetic construct
  source 1..8: note = Seed: NVLPQGWK; note = HLAs: A3402
NTLPQGWK

SEQ ID NO: 1949 - protein, 8 aa, synthetic construct
  source 1..8: note = Seed: TVNDIQKL; note = HLAs: C0303 C1202 C1602 C1646
TANDIQKR

SEQ ID NO: 1950 - protein, 8 aa, synthetic construct
  source 1..8: note = Seed: TVNDIQKL; note = HLAs: C1202
TANDIQKH

SEQ ID NO: 1951 - protein, 8 aa, synthetic construct
  source 1..8: note = Seed: TVNDIQKL; note = HLAs: C0102 C0144 C0202 C0210 C0229 C0302 C0303 C0304 C0305 C0317 C0403 C0501 C0509 C0704 C0801 C0803 C0804 C0812 C1202 C1203 C1502 C1504 C1505 C1509 C1601 C1602 C1604 C16112 C1646 C17 C1701 C1702 C1703 C1704 C1705 C1706 C1707
TANDIQKI

SEQ ID NO: 1952 - protein, 8 aa, synthetic construct
  source 1..8: note = Seed: TVNDIQKL; note = HLAs: C0102 C0144 C0202 C0210 C0229 C0302 C0303 C0304 C0305 C0317 C0403 C0501 C0509 C0704 C0801 C0803 C0804 C0812 C1202 C1203 C1502 C1504 C1505 C1509 C1601 C1602 C1604 C16112 C1646 C17 C1701 C1702 C1703 C1704 C1705 C1706 C1707
TANDIQKL

SEQ ID NO: 1953 - protein, 8 aa, synthetic construct
  source 1..8: note = Seed: TVNDIQKL; note = HLAs: C0202 C0210 C0229 C0303 C1202 C1504 C1509 C1601 C1602 C16112 C1646
TANDIQKK

SEQ ID NO: 1954 - protein, 8 aa, synthetic construct
  source 1..8: note = Seed: TVNDIQKL; note = HLAs: C0102 C0144 C0202 C0210 C0229 C0302 C0303 C0304 C0305 C0317 C0501 C0509 C0704 C0801 C0803 C0804 C0812 C1202 C1203 C1502 C1504 C1505 C1509 C1601 C1602 C1604 C16112 C1646 C17 C1701 C1702 C1703 C1704 C1705 C1706 C1707
TANDIQKM

SEQ ID NO: 1955 - protein, 8 aa, synthetic construct
  source 1..8: note = Seed: TVNDIQKL; note = HLAs: C0202 C0210 C0229 C0302 C0303 C0304 C0305 C0317 C0704 C0801 C0803 C1202 C1203 C1502 C1504 C1505 C1509 C1601 C1602 C1604 C16112 C1646 C17 C1701 C1702 C1703 C1704 C1705 C1706 C1707
TANDIQKF

SEQ ID NO: 1956 - protein, 8 aa, synthetic construct
  source 1..8: note = Seed: TVNDIQKL; note = HLAs: C1202 C1602 C1646
TANDIQKW

SEQ ID NO: 1957 - protein, 8 aa, synthetic construct
  source 1..8: note = Seed: TVNDIQKL; note = HLAs: C0202 C0210 C0229 C0302 C1202 C1203 C1504 C1509 C1601 C1602 C1604 C16112 C1646
TANDIQKY

SEQ ID NO: 1958 - protein, 8 aa, synthetic construct
  source 1..8: note = Seed: TVNDIQKL; note = HLAs: C0202 C0210 C0229 C0302 C0303 C0304 C0305 C0317 C0501 C0509 C0704 C0801 C0803 C0804 C1202 C1203 C1502 C1504 C1505 C1509 C1601 C1602 C1604 C16112 C1646 C17 C1701 C1702 C1703 C1704 C1705 C1706 C1707
TANDIQKV

SEQ ID NO: 1959 - protein, 8 aa, synthetic construct
  source 1..8: note = Seed: TVNDIQKL; note = HLAs: C0704
TRNDIQKI

SEQ ID NO: 1960 - protein, 8 aa, synthetic construct
  source 1..8: note = Seed: TVNDIQKL; note = HLAs: C0704
TRNDIQKL

SEQ ID NO: 1961 - protein, 8 aa, synthetic construct
  source 1..8: note = Seed: TVNDIQKL; note = HLAs: C0704
TRNDIQKM

SEQ ID NO: 1962 - protein, 8 aa, synthetic construct
  source 1..8: note = Seed: TVNDIQKL; note = HLAs: C0704
TRNDIQKF

SEQ ID NO: 1963 - protein, 8 aa, synthetic construct
  source 1..8: note = Seed: TVNDIQKL; note = HLAs: C0704
TRNDIQKV

SEQ ID NO: 1964 - protein, 8 aa, synthetic construct
  source 1..8: note = Seed: TVNDIQKL; note = HLAs: C0303 C1602 C1646
TNNDIQKR

SEQ ID NO: 1965 - protein, 8 aa, synthetic construct
  source 1..8: note = Seed: TVNDIQKL; note = HLAs: C0704 C1502 C1505 C1602 C1646 C1701 C1702 C1703 C1704 C1705
TNNDIQKL

SEQ ID NO: 1966 - protein, 8 aa, synthetic construct
  source 1..8: note = Seed: TVNDIQKL; note = HLAs: C0202 C0210 C0229 C0303 C1202 C1504 C1509 C1602 C1646
TNNDIQKK

SEQ ID NO: 1967 - protein, 8 aa, synthetic construct
  source 1..8: note = Seed: TVNDIQKL; note = HLAs: C0704
TNNDIQKM

SEQ ID NO: 1968 - protein, 8 aa, synthetic construct
  source 1..8: note = Seed: TVNDIQKL; note = HLAs: C1202
TNNDIQKY

SEQ ID NO: 1969 - protein, 8 aa, synthetic construct
  source 1..8: note = Seed: TVNDIQKL; note = HLAs: C0303 C1602
TDNDIQKR

SEQ ID NO: 1970 - protein, 8 aa, synthetic construct
  source 1..8: note = Seed: TVNDIQKL; note = HLAs: C0704
TDNDIQKL

SEQ ID NO: 1971 - protein, 8 aa, synthetic construct
  source 1..8: note = Seed: TVNDIQKL; note = HLAs: C0202 C0210 C0229 C0303 C1202 C1602 C1646
TDNDIQKK

SEQ ID NO: 1972 - protein, 8 aa, synthetic construct
  source 1..8: note = Seed: TVNDIQKL; note = HLAs: C0303
TCNDIQKR

SEQ ID NO: 1973 - protein, 8 aa, synthetic construct
  source 1..8: note = Seed: TVNDIQKL; note = HLAs: C0704 C1505 C1602 C1646
TCNDIQKL

SEQ ID NO: 1974 - protein, 8 aa, synthetic construct
  source 1..8: note = Seed: TVNDIQKL; note = HLAs: C0303
TCNDIQKK

SEQ ID NO: 1975 - protein, 8 aa, synthetic construct
  source 1..8: note = Seed: TVNDIQKL; note = HLAs: C0303 C1202 C1602 C1646
TQNDIQKR

SEQ ID NO: 1976 - protein, 8 aa, synthetic construct
  source 1..8: note = Seed: TVNDIQKL; note = HLAs: C0704
TQNDIQKI

SEQ ID NO: 1977 - protein, 8 aa, synthetic construct
  source 1..8: note = Seed: TVNDIQKL; note = HLAs: C0202 C0210 C0229 C0704 C0801 C0803 C1202 C1505 C1602 C1646 C17 C1701 C1702 C1703 C1704 C1705 C1706
TQNDIQKL

SEQ ID NO: 1978 - protein, 8 aa, synthetic construct
  source 1..8: note = Seed: TVNDIQKL; note = HLAs: C0202 C0210 C0229 C0303 C1202 C1602 C1646
TQNDIQKK

SEQ ID NO: 1979 - protein, 8 aa, synthetic construct
  source 1..8: note = Seed: TVNDIQKL; note = HLAs: C0704 C1202
TQNDIQKM

SEQ ID NO: 1980 - protein, 8 aa, synthetic construct
  source 1..8: note = Seed: TVNDIQKL; note = HLAs: C0202 C0210 C0229 C0704 C1202
TQNDIQKF

SEQ ID NO: 1981 - protein, 8 aa, synthetic construct
  source 1..8: note = Seed: TVNDIQKL; note = HLAs: C0202 C0210 C0229 C0302 C1202 C1504 C1509
TQNDIQKY

SEQ ID NO: 1982 - protein, 8 aa, synthetic construct
  source 1..8: note = Seed: TVNDIQKL; note = HLAs: C0704
TQNDIQKV

SEQ ID NO: 1983 - protein, 8 aa, synthetic construct
  source 1..8: note = Seed: TVNDIQKL; note = HLAs: C0303
TENDIQKR

SEQ ID NO: 1984 - protein, 8 aa, synthetic construct
  source 1..8: note = Seed: TVNDIQKL; note = HLAs: C0704
TENDIQKL

SEQ ID NO: 1985 - protein, 8 aa, synthetic construct
  source 1..8: note = Seed: TVNDIQKL; note = HLAs: C0303 C1202 C1602 C1646
TENDIQKK

SEQ ID NO: 1986 - protein, 8 aa, synthetic construct
  source 1..8: note = Seed: TVNDIQKL; note = HLAs: C0704
TENDIQKM

SEQ ID NO: 1987 - protein, 8 aa, synthetic construct
  source 1..8: note = Seed: TVNDIQKL; note = HLAs: C1202
TENDIQKY

SEQ ID NO: 1988 - protein, 8 aa, synthetic construct
  source 1..8: note = Seed: TVNDIQKL; note = HLAs: C0303 C1202 C1602 C1646
TGNDIQKR

SEQ ID NO: 1989 - protein, 8 aa, synthetic construct
  source 1..8: note = Seed: TVNDIQKL; note = HLAs: C0102 C0144 C0202 C0210 C0229 C0704 C0801 C0803 C1202 C1502 C1505 C1601 C1602 C16112 C1646 C17 C1701 C1702 C1703 C1704 C1705 C1706
TGNDIQKL

SEQ ID NO: 1990 - protein, 8 aa, synthetic construct
  source 1..8: note = Seed: TVNDIQKL; note = HLAs: C0202 C0210 C0229 C0303 C1202 C1504 C1509 C1601 C1602 C16112 C1646
TGNDIQKK

SEQ ID NO: 1991 - protein, 8 aa, synthetic construct
  source 1..8: note = Seed: TVNDIQKL; note = HLAs: C1202 C1601 C1602 C16112 C1646
TGNDIQKM

SEQ ID NO: 1992 - protein, 8 aa, synthetic construct
  source 1..8: note = Seed: TVNDIQKL; note = HLAs: C0202 C0210 C0229 C1202 C1601 C1602 C16112 C1646
TGNDIQKF

SEQ ID NO: 1993 - protein, 8 aa, synthetic construct
  source 1..8: note = Seed: TVNDIQKL; note = HLAs: C0202 C0210 C0229 C1202 C1504 C1509 C1601 C1602 C16112 C1646
TGNDIQKY

SEQ ID NO: 1994 - protein, 8 aa, synthetic construct
  source 1..8: note = Seed: TVNDIQKL; note = HLAs: C0704
THNDIQKL

SEQ ID NO: 1995 - protein, 8 aa, synthetic construct
  source 1..8: note = Seed: TVNDIQKL; note = HLAs: C0704
THNDIQKM

SEQ ID NO: 1996 - protein, 8 aa, synthetic construct
  source 1..8: note = Seed: TVNDIQKL; note = HLAs: C0704
THNDIQKF

SEQ ID NO: 1997 - protein, 8 aa, synthetic construct
  source 1..8: note = Seed: TVNDIQKL; note = HLAs: C0202 C0210 C0229 C0303 C1202 C1504 C1509 C1601 C1602 C16112 C1646
TINDIQKR

SEQ ID NO: 1998 - protein, 8 aa, synthetic construct
  source 1..8: note = Seed: TVNDIQKL; note = HLAs: C1202
TINDIQKH

SEQ ID NO: 1999 - protein, 8 aa, synthetic construct
  source 1..8: note = Seed: TVNDIQKL; note = HLAs: C1502 C1505 C1602 C1646 C17 C1701 C1702 C1703 C1704 C1705 C1706
TINDIQKI

SEQ ID NO: 2000 - protein, 8 aa, synthetic construct
  source 1..8: note = Seed: TVNDIQKL; note = HLAs: C0102 C0144 C0202 C0210 C0229 C0302 C0303 C0304 C0305 C0317 C0403 C0501 C0509 C0704 C0801 C0803 C0804 C0812 C1202 C1203 C1502 C1504 C1505 C1509 C1601 C1602 C1604 C16112 C1646 C17 C1701 C1702 C1703 C1704 C1705 C1706 C1707
TINDIQKL

SEQ ID NO: 2001 - protein, 8 aa, synthetic construct
  source 1..8: note = Seed: TVNDIQKL; note = HLAs: C0202 C0210 C0229 C0302 C0303 C1202 C1504 C1509 C1601 C1602 C16112 C1646
TINDIQKK

SEQ ID NO: 2002 - protein, 8 aa, synthetic construct
  source 1..8: note = Seed: TVNDIQKL; note = HLAs: C0202 C0210 C0229 C0302 C0704 C0801 C0803 C1202 C1504 C1505 C1509 C1601 C1602 C16112 C1646 C17 C1701 C1702 C1703 C1704 C1705 C1706
TINDIQKM

SEQ ID NO: 2003 - protein, 8 aa, synthetic construct
  source 1..8: note = Seed: TVNDIQKL; note = HLAs: C0202 C0210 C0229 C0302 C1202 C1203 C1504 C1509 C1601 C1602 C1604 C16112 C1646 C17 C1701 C1702 C1703 C1704 C1705 C1706
TINDIQKF

SEQ ID NO: 2004 - protein, 8 aa, synthetic construct
  source 1..8: note = Seed: TVNDIQKL; note = HLAs: C0202 C0210 C0229 C0302 C1202 C1203 C1504 C1509 C1601 C1602 C1604 C16112 C1646
TINDIQKY

SEQ ID NO: 2005 - protein, 8 aa, synthetic construct
  source 1..8: note = Seed: TVNDIQKL; note = HLAs: C1502 C1505 C1701 C1702 C1703 C1704 C1705
TINDIQKV

SEQ ID NO: 2006 - protein, 8 aa, synthetic construct
  source 1..8: note = Seed: TVNDIQKL; note = HLAs: C0202 C0210 C0229 C0303 C1202 C1602 C1646
TLNDIQKR

SEQ ID NO: 2007 - protein, 8 aa, synthetic construct
  source 1..8: note = Seed: TVNDIQKL; note = HLAs: C1701 C1702 C1703 C1704 C1705 C1706
TLNDIQKI

SEQ ID NO: 2008 - protein, 8 aa, synthetic construct
  source 1..8: note = Seed: TVNDIQKL; note = HLAs: C0102 C0144 C0202 C0210 C0229 C0304 C0403 C0501 C0509 C0704 C0801 C0803 C1202 C1502 C1504 C1505 C1509 C1601 C1602 C16112 C1646 C17 C1701 C1702 C1703 C1704 C1705 C1706 C1707
TLNDIQKL

SEQ ID NO: 2009 - protein, 8 aa, synthetic construct
  source 1..8: note = Seed: TVNDIQKL; note = HLAs: C0202 C0210 C0229 C0303 C1202 C1504 C1509 C1601 C1602 C16112 C1646
TLNDIQKK

SEQ ID NO: 2010 - protein, 8 aa, synthetic construct
  source 1..8: note = Seed: TVNDIQKL; note = HLAs: C0202 C0210 C0229 C1602 C1646 C17 C1701 C1702 C1703 C1704 C1705 C1706
TLNDIQKM

SEQ ID NO: 2011 - protein, 8 aa, synthetic construct
  source 1..8: note = Seed: TVNDIQKL; note = HLAs: C0202 C0210 C0229 C0302 C1202 C1602 C1646
TLNDIQKF

SEQ ID NO: 2012 - protein, 8 aa, synthetic construct
  source 1..8: note = Seed: TVNDIQKL; note = HLAs: C0202 C0210 C0229 C0302 C1202 C1504 C1509 C1602 C1646
TLNDIQKY

SEQ ID NO: 2013 - protein, 8 aa, synthetic construct
  source 1..8: note = Seed: TVNDIQKL; note = HLAs: C0704
TKNDIQKL

SEQ ID NO: 2014 - protein, 8 aa, synthetic construct
  source 1..8: note = Seed: TVNDIQKL; note = HLAs: C0303 C1202 C1602 C1646
TMNDIQKR

SEQ ID NO: 2015 - protein, 8 aa, synthetic construct
  source 1..8: note = Seed: TVNDIQKL; note = HLAs: C1701 C1702 C1703 C1704 C1705
TMNDIQKI

SEQ ID NO: 2016 - protein, 8 aa, synthetic construct
  source 1..8: note = Seed: TVNDIQKL; note = HLAs: C0102 C0144 C0202 C0210 C0229 C0304 C0501 C0509 C0704 C0801 C0803 C1202 C1502 C1504 C1505 C1509 C1601 C1602 C16112 C1646 C17 C1701 C1702 C1703 C1704 C1705 C1706 C1707
TMNDIQKL

SEQ ID NO: 2017 - protein, 8 aa, synthetic construct
  source 1..8: note = Seed: TVNDIQKL; note = HLAs: C0202 C0210 C0229 C0303 C1202 C1602 C1646
TMNDIQKK

SEQ ID NO: 2018 - protein, 8 aa, synthetic construct
  source 1..8: note = Seed: TVNDIQKL; note = HLAs: C0202 C0210 C0229 C1202 C1602 C1646 C1701 C1702 C1703 C1704 C1705
TMNDIQKM

SEQ ID NO: 2019 - protein, 8 aa, synthetic construct
  source 1..8: note = Seed: TVNDIQKL; note = HLAs: C0202 C0210 C0229 C0302 C1202 C1601 C1602 C16112 C1646
TMNDIQKF

SEQ ID NO: 2020 - protein, 8 aa, synthetic construct
  source 1..8: note = Seed: TVNDIQKL; note = HLAs: C0202 C0210 C0229 C0302 C1202 C1504 C1509 C1601 C1602 C16112 C1646
TMNDIQKY

SEQ ID NO: 2021 - protein, 8 aa, synthetic construct
  source 1..8: note = Seed: TVNDIQKL; note = HLAs: C0303 C1602 C1646
TFNDIQKR

SEQ ID NO: 2022 - protein, 8 aa, synthetic construct
  source 1..8: note = Seed: TVNDIQKL; note = HLAs: C0704
TFNDIQKI

SEQ ID NO: 2023 - protein, 8 aa, synthetic construct
  source 1..8: note = Seed: TVNDIQKL; note = HLAs: C0102 C0144 C0403 C0501 C0509 C0704 C0801 C0803 C0812 C1601 C1602 C16112 C1646 C17 C1701 C1702 C1703 C1704 C1705 C1706
TFNDIQKL

SEQ ID NO: 2024 - protein, 8 aa, synthetic construct
  source 1..8: note = Seed: TVNDIQKL; note = HLAs: C0303 C1602 C1646
TFNDIQKK

SEQ ID NO: 2025 - protein, 8 aa, synthetic construct
  source 1..8: note = Seed: TVNDIQKL; note = HLAs: C0704 C1601 C1602 C16112 C1646
TFNDIQKM

SEQ ID NO: 2026 - protein, 8 aa, synthetic construct
  source 1..8: note = Seed: TVNDIQKL; note = HLAs: C0704 C1601 C1602 C16112 C1646
TFNDIQKF

SEQ ID NO: 2027 - protein, 8 aa, synthetic construct
  source 1..8: note = Seed: TVNDIQKL; note = HLAs: C0302 C1202 C1601 C1602 C16112 C1646
TFNDIQKY

SEQ ID NO: 2028 - protein, 8 aa, synthetic construct
  source 1..8: note = Seed: TVNDIQKL; note = HLAs: C0704
TFNDIQKV

SEQ ID NO: 2029 - protein, 8 aa, synthetic construct
  source 1..8: note = Seed: TVNDIQKL; note = HLAs: C0704 C0801 C0803
TPNDIQKL

SEQ ID NO: 2030 - protein, 8 aa, synthetic construct
  source 1..8: note = Seed: TVNDIQKL; note = HLAs: C0303 C1202 C1602 C1646
TSNDIQKR

SEQ ID NO: 2031 - protein, 8 aa, synthetic construct
  source 1..8: note = Seed: TVNDIQKL; note = HLAs: C1202
TSNDIQKH

SEQ ID NO: 2032 - protein, 8 aa, synthetic construct
  source 1..8: note = Seed: TVNDIQKL; note = HLAs: C0202 C0210 C0229 C0501 C0509 C0704 C0801 C0803 C1202 C1203 C1502 C1504 C1505 C1509 C1601 C1602 C1604 C16112 C1646 C17 C1701 C1702 C1703 C1704 C1705 C1706
TSNDIQKI

SEQ ID NO: 2033 - protein, 8 aa, synthetic construct
  source 1..8: note = Seed: TVNDIQKL; note = HLAs: C0102 C0144 C0202 C0210 C0229 C0302 C0303 C0304 C0305 C0317 C0403 C0501 C0509 C0704 C0801 C0803 C0804 C0812 C1202 C1203 C1502 C1504 C1505 C1509 C1601 C1602 C1604 C16112 C1646 C17 C1701 C1702 C1703 C1704 C1705 C1706 C1707
TSNDIQKL

SEQ ID NO: 2034 - protein, 8 aa, synthetic construct
  source 1..8: note = Seed: TVNDIQKL; note = HLAs: C0202 C0210 C0229 C0303 C1202 C1504 C1509 C1601 C1602 C16112 C1646
TSNDIQKK

SEQ ID NO: 2035 - protein, 8 aa, synthetic construct
  source 1..8: note = Seed: TVNDIQKL; note = HLAs: C0202 C0210 C0229 C0302 C0303 C0304 C0704 C0801 C0803 C1202 C1203 C1502 C1504 C1505 C1509 C1601 C1602 C1604 C16112 C1646 C17 C1701 C1702 C1703 C1704 C1705 C1706
TSNDIQKM

SEQ ID NO: 2036 - protein, 8 aa, synthetic construct
  source 1..8: note = Seed: TVNDIQKL; note = HLAs: C0202 C0210 C0229 C0302 C1202 C1203 C1502 C1504 C1505 C1509 C1601 C1602 C1604 C16112 C1646 C1701 C1702 C1703 C1704 C1705
TSNDIQKF

SEQ ID NO: 2037 - protein, 8 aa, synthetic construct
  source 1..8: note = Seed: TVNDIQKL; note = HLAs: C0202 C0210 C0229 C0302 C1202 C1203 C1504 C1509 C1601 C1602 C1604 C16112 C1646
TSNDIQKY

SEQ ID NO: 2038 - protein, 8 aa, synthetic construct
  source 1..8: note = Seed: TVNDIQKL; note = HLAs: C0202 C0210 C0229 C0801 C0803 C1202 C1203 C1502 C1504 C1505 C1509 C1601 C1602 C1604 C16112 C1646
TSNDIQKV

SEQ ID NO: 2039 - protein, 8 aa, synthetic construct
  source 1..8: note = Seed: TVNDIQKL; note = HLAs: C0303 C1602 C1646
TTNDIQKR

SEQ ID NO: 2040 - protein, 8 aa, synthetic construct
  source 1..8: note = Seed: TVNDIQKL; note = HLAs: C0202 C0210 C0229 C1203 C1502 C1504 C1505 C1509 C1601 C1602 C1604 C16112 C1646 C17 C1701 C1702 C1703 C1704 C1705 C1706
TTNDIQKI

SEQ ID NO: 2041 - protein, 8 aa, synthetic construct
  source 1..8: note = Seed: TVNDIQKL; note = HLAs: C0102 C0144 C0202 C0210 C0229 C0302 C0303 C0304 C0305 C0317 C0403 C0501 C0509 C0704 C0801 C0803 C0804 C0812 C1202 C1203 C1502 C1504 C1505 C1509 C1601 C1602 C1604 C16112 C1646 C17 C1701 C1702 C1703 C1704 C1705 C1706 C1707
TTNDIQKL

SEQ ID NO: 2042 - protein, 8 aa, synthetic construct
  source 1..8: note = Seed: TVNDIQKL; note = HLAs: C0202 C0210 C0229 C0303 C1202 C1504 C1509 C1602 C1646
TTNDIQKK

SEQ ID NO: 2043 - protein, 8 aa, synthetic construct
  source 1..8: note = Seed: TVNDIQKL; note = HLAs: C0202 C0210 C0229 C0302 C1202 C1203 C1502 C1504 C1505 C1509 C1601 C1602 C1604 C16112 C1646 C17 C1701 C1702 C1703 C1704 C1705 C1706
TTNDIQKM

SEQ ID NO: 2044 - protein, 8 aa, synthetic construct
  source 1..8: note = Seed: TVNDIQKL; note = HLAs: C0202 C0210 C0229 C0302 C1202 C1203 C1504 C1505 C1509 C1601 C1602 C1604 C16112 C1646
TTNDIQKF

SEQ ID NO: 2045 - protein, 8 aa, synthetic construct
  source 1..8: note = Seed: TVNDIQKL; note = HLAs: C0202 C0210 C0229 C0302 C1202 C1203 C1504 C1509 C1601 C1602 C1604 C16112 C1646
TTNDIQKY

SEQ ID NO: 2046 - protein, 8 aa, synthetic construct
  source 1..8: note = Seed: TVNDIQKL; note = HLAs: C1502 C1505 C1602 C1646
TTNDIQKV

SEQ ID NO: 2047 - protein, 8 aa, synthetic construct
  source 1..8: note = Seed: TVNDIQKL; note = HLAs: C0704 C1602
TWNDIQKL

SEQ ID NO: 2048 - protein, 8 aa, synthetic construct
  source 1..8: note = Seed: TVNDIQKL; note = HLAs: C0303 C1602
TWNDIQKK

SEQ ID NO: 2049 - protein, 8 aa, synthetic construct
  source 1..8: note = Seed: TVNDIQKL; note = HLAs: C1602
TYNDIQKR

SEQ ID NO: 2050 - protein, 8 aa, synthetic construct
  source 1..8: note = Seed: TVNDIQKL; note = HLAs: C0704
TYNDIQKI

SEQ ID NO: 2051 - protein, 8 aa, synthetic construct
  source 1..8: note = Seed: TVNDIQKL; note = HLAs: C0102 C0144 C0704 C1601 C1602 C16112 C1646
TYNDIQKL

SEQ ID NO: 2052 - protein, 8 aa, synthetic construct
  source 1..8: note = Seed: TVNDIQKL; note = HLAs: C0303 C1602 C1646
TYNDIQKK

SEQ ID NO: 2053 - protein, 8 aa, synthetic construct
  source 1..8: note = Seed: TVNDIQKL; note = HLAs: C0704
TYNDIQKM

SEQ ID NO: 2054 - protein, 8 aa, synthetic construct
  source 1..8: note = Seed: TVNDIQKL; note = HLAs: C0704 C1601 C1602 C16112 C1646
TYNDIQKF

SEQ ID NO: 2055 - protein, 8 aa, synthetic construct
  source 1..8: note = Seed: TVNDIQKL; note = HLAs: C1601 C1602 C16112 C1646
TYNDIQKY

SEQ ID NO: 2056 - protein, 8 aa, synthetic construct
  source 1..8: note = Seed: TVNDIQKL; note = HLAs: C0704
TYNDIQKV

SEQ ID NO: 2057 - protein, 8 aa, synthetic construct
  source 1..8: note = Seed: TVNDIQKL; note = HLAs: C0202 C0210 C0229 C0303 C1202 C1601 C1602 C16112 C1646
TVNDIQKR

SEQ ID NO: 2058 - protein, 8 aa, synthetic construct
  source 1..8: note = Seed: TVNDIQKL; note = HLAs: C1202
TVNDIQKH

SEQ ID NO: 2059 - protein, 8 aa, synthetic construct
  source 1..8: note = Seed: TVNDIQKL; note = HLAs: C0202 C0210 C0229 C1502 C1505 C1602 C1646 C17 C1701 C1702 C1703 C1704 C1705 C1706
TVNDIQKI

SEQ ID NO: 2060 - protein, 8 aa, synthetic construct
  source 1..8: note = Seed: TVNDIQKL; note = HLAs: C0202 C0210 C0229 C0302 C0303 C1202 C1504 C1509 C1601 C1602 C16112 C1646
TVNDIQKK

SEQ ID NO: 2061 - protein, 8 aa, synthetic construct
  source 1..8: note = Seed: TVNDIQKL; note = HLAs: C0202 C0210 C0229 C0302 C0303 C0304 C0801 C0803 C1202 C1203 C1504 C1505 C1509 C1601 C1602 C1604 C16112 C1646 C17 C1701 C1702 C1703 C1704 C1705 C1706
TVNDIQKM

SEQ ID NO: 2062 - protein, 8 aa, synthetic construct
  source 1..8: note = Seed: TVNDIQKL; note = HLAs: C0202 C0210 C0229 C0302 C1202 C1203 C1504 C1509 C1601 C1602 C1604 C16112 C1646 C1701 C1702 C1703 C1704 C1705
TVNDIQKF

SEQ ID NO: 2063 - protein, 8 aa, synthetic construct
  source 1..8: note = Seed: TVNDIQKL; note = HLAs: C0202 C0210 C0229 C0302 C1202 C1203 C1504 C1509 C1601 C1602 C1604 C16112 C1646
TVNDIQKY

SEQ ID NO: 2064 - protein, 8 aa, synthetic construct
  source 1..8: note = Seed: TVNDIQKL; note = HLAs: C1502 C1505 C1602 C1646
TVNDIQKV

SEQ ID NO: 2065 - protein, 9 aa, synthetic construct
  source 1..9: note = Seed: TVNDIQKLV; note = HLAs: C0202 C0210 C0229 C0303 C0801 C0803 C1202 C1203 C1502 C1505 C1601 C1602 C1604 C16112 C1646
TANDIQKLA

SEQ ID NO: 2066 - protein, 9 aa, synthetic construct
  source 1..9: note = Seed: TVNDIQKLV; note = HLAs: C0202 C0210 C0214 C0229 C0303 C0602 C1202 C1504 C1509 C1601 C1602 C1604 C16112 C1646
TANDIQKLR

SEQ ID NO: 2067 - protein, 9 aa, synthetic construct
  source 1..9: note = Seed: TVNDIQKLV; note = HLAs: B5108 C0801 C0803 C1202 C1203 C1505 C1601 C1602 C16112 C1646
TANDIQKLC

SEQ ID NO: 2068 - protein, 9 aa, synthetic construct
  source 1..9: note = Seed: TVNDIQKLV; note = HLAs: C1202
TANDIQKLQ

SEQ ID NO: 2069 - protein, 9 aa, synthetic construct
  source 1..9: note = Seed: TVNDIQKLV; note = HLAs: C0202 C0210 C0229 C1202 C1203 C1504 C1509 C1601 C1602 C1604 C16112 C1646
TANDIQKLH

SEQ ID NO: 2070 - protein, 9 aa, synthetic construct
  source 1..9: note = Seed: TVNDIQKLV; note = HLAs: A6802 A6827 B1301 B1302 B1303 B5108 B5201 C0102 C0144 C0202 C0210 C0214 C0217 C0229 C0303 C0304 C0305 C0317 C0403 C0501 C0509 C0602 C0704 C0801 C0803 C0804 C0812 C1202 C1203 C1502 C1504 C1505 C1509 C1601 C1602 C1604 C16112 C1646 C17 C1701 C1702 C1703 C1704 C1705 C1706 C1707
TANDIQKLI

SEQ ID NO: 2071 - protein, 9 aa, synthetic construct
  source 1..9: note = Seed: TVNDIQKLV; note = HLAs: C0202 C0210 C0214 C0229 C0303 C0602 C1202 C1504 C1509 C1601 C1602 C1604 C16112 C1646
TANDIQKLK

SEQ ID NO: 2072 - protein, 9 aa, synthetic construct
  source 1..9: note = Seed: TVNDIQKLV; note = HLAs: C1202
TANDIQKLT

SEQ ID NO: 2073 - protein, 9 aa, synthetic construct
  source 1..9: note = Seed: TVNDIQKLV; note = HLAs: B1301 C0202 C0210 C0214 C0217 C0229 C0303 C1202 C1203 C1502 C1504 C1505 C1509 C1601 C1602 C1604 C16112 C1646
TANDIQKLW

SEQ ID NO: 2074 - protein, 9 aa, synthetic construct
  source 1..9: note = Seed: TVNDIQKLV; note = HLAs: A0204 A0205 A6802 A6827 B1302 B1303 B5108 B5201 C0102 C0144 C0202 C0210 C0214 C0217 C0229 C0303 C0304 C0305 C0317 C0403 C0501 C0509 C0602 C0704 C0801 C0803 C0804 C0812 C1202 C1203 C1502 C1504 C1505 C1509 C1601 C1602 C1604 C16112 C1646 C17 C1701 C1702 C1703 C1704 C1705 C1706 C1707
TANDIQKLV

SEQ ID NO: 2075 - protein, 9 aa, synthetic construct
  source 1..9: note = Seed: TVNDIQKLV; note = HLAs: C0602 C0704
TRNDIQKLA

SEQ ID NO: 2076 - protein, 9 aa, synthetic construct
  source 1..9: note = Seed: TVNDIQKLV; note = HLAs: C0602
TRNDIQKLR

SEQ ID NO: 2077 - protein, 9 aa, synthetic construct
  source 1..9: note = Seed: TVNDIQKLV; note = HLAs: C0704
TRNDIQKLC

SEQ ID NO: 2078 - protein, 9 aa, synthetic construct
  source 1..9: note = Seed: TVNDIQKLV; note = HLAs: C0214 C0602 C0704
TRNDIQKLI

SEQ ID NO: 2079 - protein, 9 aa, synthetic construct
  source 1..9: note = Seed: TVNDIQKLV; note = HLAs: C0602
TRNDIQKLK

SEQ ID NO: 2080 - protein, 9 aa, synthetic construct
  source 1..9: note = Seed: TVNDIQKLV; note = HLAs: C0214 C0602 C0704
TRNDIQKLM

SEQ ID NO: 2081 - protein, 9 aa, synthetic construct
  source 1..9: note = Seed: TVNDIQKLV; note = HLAs: C0214 C0602 C0704
TRNDIQKLF

SEQ ID NO: 2082 - protein, 9 aa, synthetic construct
  source 1..9: note = Seed: TVNDIQKLV; note = HLAs: C0602
TRNDIQKLW

SEQ ID NO: 2083 - protein, 9 aa, synthetic construct
  source 1..9: note = Seed: TVNDIQKLV; note = HLAs: C0214 C0602 C0704 C1202
TRNDIQKLY

SEQ ID NO: 2084 - protein, 9 aa, synthetic construct
  source 1..9: note = Seed: TVNDIQKLV; note = HLAs: C0303 C0602 C1202 C1504 C1509 C1601 C1602 C16112 C1646
TNNDIQKLR

SEQ ID NO: 2085 - protein, 9 aa, synthetic construct
  source 1..9: note = Seed: TVNDIQKLV; note = HLAs: C0602 C0704 C1502 C1505 C1602 C1646
TNNDIQKLI

SEQ ID NO: 2086 - protein, 9 aa, synthetic construct
  source 1..9: note = Seed: TVNDIQKLV; note = HLAs: B1301 C0102 C0144 C0202 C0210 C0214 C0229 C0303 C0501 C0509 C0602 C0704 C0801 C0803 C1202 C1203 C1502 C1504 C1505 C1509 C1601 C1602 C1604 C16112 C1646 C17 C1701 C1702 C1703 C1704 C1705 C1706 C1707
TNNDIQKLL

SEQ ID NO: 2087 - protein, 9 aa, synthetic construct
  source 1..9: note = Seed: TVNDIQKLV; note = HLAs: C0202 C0210 C0214 C0229 C0303 C0602 C1202 C1504 C1509 C1601 C1602 C16112 C1646
TNNDIQKLK

SEQ ID NO: 2088 - protein, 9 aa, synthetic construct
  source 1..9: note = Seed: TVNDIQKLV; note = HLAs: C0202 C0210 C0214 C0229 C0602 C0704 C0801 C0803 C1202 C1203 C1502 C1504 C1505 C1509 C1601 C1602 C1604 C16112 C1646 C17 C1701 C1702 C1703 C1704 C1705 C1706
TNNDIQKLM

SEQ ID NO: 2089 - protein, 9 aa, synthetic construct
  source 1..9: note = Seed: TVNDIQKLV; note = HLAs: B1301 C0202 C0210 C0214 C0229 C0602 C0704 C1202 C1203 C1502 C1504 C1505 C1509 C1601 C1602 C1604 C16112 C1646
TNNDIQKLF

SEQ ID NO: 2090 - protein, 9 aa, synthetic construct
  source 1..9: note = Seed: TVNDIQKLV; note = HLAs: B1301
TNNDIQKLW

SEQ ID NO: 2091 - protein, 9 aa, synthetic construct
  source 1..9: note = Seed: TVNDIQKLV; note = HLAs: C0202 C0210 C0214 C0229 C0602 C1202 C1203 C1504 C1509 C1601 C1602 C1604 C16112 C1646
TNNDIQKLY

SEQ ID NO: 2092 - protein, 9 aa, synthetic construct
  source 1..9: note = Seed: TVNDIQKLV; note = HLAs: C0602 C0704 C1502 C1505 C1602 C1646
TNNDIQKLV

SEQ ID NO: 2093 - protein, 9 aa, synthetic construct
  source 1..9: note = Seed: TVNDIQKLV; note = HLAs: C0202 C0210 C0214 C0229 C0303 C0602 C1202 C1602 C1646
TDNDIQKLR

SEQ ID NO: 2094 - protein, 9 aa, synthetic construct
  source 1..9: note = Seed: TVNDIQKLV; note = HLAs: C0704
TDNDIQKLI

SEQ ID NO: 2095 - protein, 9 aa, synthetic construct
  source 1..9: note = Seed: TVNDIQKLV; note = HLAs: C0403 C0501 C0509 C0704
TDNDIQKLL

SEQ ID NO: 2096 - protein, 9 aa, synthetic construct
  source 1..9: note = Seed: TVNDIQKLV; note = HLAs: C0202 C0210 C0214 C0229 C0303 C0602 C1202 C1504 C1509 C1601 C1602 C16112 C1646
TDNDIQKLK

SEQ ID NO: 2097 - protein, 9 aa, synthetic construct
  source 1..9: note = Seed: TVNDIQKLV; note = HLAs: C0704
TDNDIQKLM

SEQ ID NO: 2098 - protein, 9 aa, synthetic construct
  source 1..9: note = Seed: TVNDIQKLV; note = HLAs: C0704 C1202
TDNDIQKLF

SEQ ID NO: 2099 - protein, 9 aa, synthetic construct
  source 1..9: note = Seed: TVNDIQKLV; note = HLAs: C1202
TDNDIQKLY

SEQ ID NO: 2100 - protein, 9 aa, synthetic construct
  source 1..9: note = Seed: TVNDIQKLV; note = HLAs: C0704
TDNDIQKLV

SEQ ID NO: 2101 - protein, 9 aa, synthetic construct
  source 1..9: note = Seed: TVNDIQKLV; note = HLAs: C0303 C1602 C1646
TCNDIQKLR

SEQ ID NO: 2102 - protein, 9 aa, synthetic construct
  source 1..9: note = Seed: TVNDIQKLV; note = HLAs: C0501 C0509 C1505 C1602 C1646
TCNDIQKLI

SEQ ID NO: 2103 - protein, 9 aa, synthetic construct
  source 1..9: note = Seed: TVNDIQKLV; note = HLAs: C0102 C0144 C0202 C0210 C0214 C0229 C0303 C0304 C0403 C0501 C0509 C0602 C0704 C0801 C0803 C0804 C0812 C1202 C1203 C1502 C1504 C1505 C1509 C1601 C1602 C1604 C16112 C1646 C17 C1701 C1702 C1703 C1704 C1705 C1706 C1707
TCNDIQKLL

SEQ ID NO: 2104 - protein, 9 aa, synthetic construct
  source 1..9: note = Seed: TVNDIQKLV; note = HLAs: C0303 C1602 C1646
TCNDIQKLK

SEQ ID NO: 2105 - protein, 9 aa, synthetic construct
  source 1..9: note = Seed: TVNDIQKLV; note = HLAs: C0102 C0144 C0202 C0210 C0214 C0229 C0303 C0304 C0403 C0501 C0509 C0602 C0704 C0801 C0803 C0812 C1202 C1203 C1502 C1504 C1505 C1509 C1601 C1602 C1604 C16112 C1646 C17 C1701 C1702 C1703 C1704 C1705 C1706
TCNDIQKLM

SEQ ID NO: 2106 - protein, 9 aa, synthetic construct
  source 1..9: note = Seed: TVNDIQKLV; note = HLAs: C0202 C0210 C0214 C0229 C0501 C0509 C1202 C1203 C1504 C1505 C1509 C1601 C1602 C1604 C16112 C1646
TCNDIQKLF

SEQ ID NO: 2107 - protein, 9 aa, synthetic construct
  source 1..9: note = Seed: TVNDIQKLV; note = HLAs: C0202 C0210 C0229 C1202 C1203 C1504 C1509 C1601 C1602 C1604 C16112 C1646
TCNDIQKLY

SEQ ID NO: 2108 - protein, 9 aa, synthetic construct
  source 1..9: note = Seed: TVNDIQKLV; note = HLAs: C0501 C0509 C1502 C1505 C1602 C1646
TCNDIQKLV

SEQ ID NO: 2109 - protein, 9 aa, synthetic construct
  source 1..9: note = Seed: TVNDIQKLV; note = HLAs: A0205 B1302 B1303 B5201
TQNDIQKLA

SEQ ID NO: 2110 - protein, 9 aa, synthetic construct
  source 1..9: note = Seed: TVNDIQKLV; note = HLAs: C0202 C0210 C0214 C0229 C0303 C0602 C1202 C1504 C1509 C1602 C1646
TQNDIQKLR

SEQ ID NO: 2111 - protein, 9 aa, synthetic construct
  source 1..9: note = Seed: TVNDIQKLV; note = HLAs: B1301 B1302 B1303 B5201
TQNDIQKLC

SEQ ID NO: 2112 - protein, 9 aa, synthetic construct
  source 1..9: note = Seed: TVNDIQKLV; note = HLAs: C1202
TQNDIQKLH

SEQ ID NO: 2113 - protein, 9 aa, synthetic construct
  source 1..9: note = Seed: TVNDIQKLV; note = HLAs: A0202 A0204 A0205 A0206 A0214 B1301 B1302 B1303 B5201 C0202 C0210 C0229 C0602 C0704 C0801 C0803 C1202 C1203 C1502 C1504 C1505 C1509 C1602 C1646 C17 C1701 C1702 C1703 C1704 C1705 C1706
TQNDIQKLI

SEQ ID NO: 2114 - protein, 9 aa, synthetic construct
  source 1..9: note = Seed: TVNDIQKLV; note = HLAs: A0202 A0204 A0205 A0206 A0207 A0211 A0214 B1301 B1302 B1303 B5201 C0102 C0144 C0202 C0210 C0214 C0217 C0229 C0303 C0304 C0305 C0317 C0403 C0501 C0509 C0602 C0704 C0801 C0803 C0804 C0812 C1202 C1203 C1502 C1504 C1505 C1509 C1601 C1602 C1604 C16112 C1646 C17 C1701 C1702 C1703 C1704 C1705 C1706 C1707
TQNDIQKLL

SEQ ID NO: 2115 - protein, 9 aa, synthetic construct
  source 1..9: note = Seed: TVNDIQKLV; note = HLAs: C0202 C0210 C0214 C0229 C0303 C0602 C1202 C1504 C1509 C1601 C1602 C16112 C1646
TQNDIQKLK

SEQ ID NO: 2116 - protein, 9 aa, synthetic construct
  source 1..9: note = Seed: TVNDIQKLV; note = HLAs: A0204 A0205 B1301 B1302 B1303 B5201 C0102 C0144 C0202 C0210 C0214 C0229 C0303 C0304 C0501 C0509 C0602 C0704 C0801 C0803 C0804 C1202 C1203 C1502 C1504 C1505 C1509 C1601 C1602 C1604 C16112 C1646 C17 C1701 C1702 C1703 C1704 C1705 C1706 C1707
TQNDIQKLM

SEQ ID NO: 2117 - protein, 9 aa, synthetic construct
  source 1..9: note = Seed: TVNDIQKLV; note = HLAs: B1301 B1302 B1303 B5201 C0202 C0210 C0214 C0229 C0602 C0704 C0801 C0803 C1202 C1203 C1502 C1504 C1505 C1509 C1601 C1602 C1604 C16112 C1646 C17 C1701 C1702 C1703 C1704 C1705 C1706
TQNDIQKLF

SEQ ID NO: 2118 - protein, 9 aa, synthetic construct
  source 1..9: note = Seed: TVNDIQKLV; note = HLAs: B1302 B1303
TQNDIQKLT

SEQ ID NO: 2119 - protein, 9 aa, synthetic construct
  source 1..9: note = Seed: TVNDIQKLV; note = HLAs: B1301 B1302 B1303 C0202 C0210 C0229 C1202 C1504 C1509 C1602 C1646
TQNDIQKLW

SEQ ID NO: 2120 - protein, 9 aa, synthetic construct
  source 1..9: note = Seed: TVNDIQKLV; note = HLAs: B1301 B1302 B1303 C0202 C0210 C0214 C0217 C0229 C0602 C1202 C1203 C1504 C1509 C1601 C1602 C1604 C16112 C1646
TQNDIQKLY

SEQ ID NO: 2121 - protein, 9 aa, synthetic construct
  source 1..9: note = Seed: TVNDIQKLV; note = HLAs: A0201 A0202 A0203 A0204 A0205 A0206 A0207 A0211 A0214 A02264 A0230 B1301 B1302 B1303 B5201 C0202 C0210 C0229 C0602 C0704 C0801 C0803 C1202 C1203 C1502 C1504 C1505 C1509 C1602 C1646 C17 C1701 C1702 C1703 C1704 C1705 C1706
TQNDIQKLV

SEQ ID NO: 2122 - protein, 9 aa, synthetic construct
  source 1..9: note = Seed: TVNDIQKLV; note = HLAs: C0303 C0602 C1202 C1602 C1646
TENDIQKLR

SEQ ID NO: 2123 - protein, 9 aa, synthetic construct
  source 1..9: note = Seed: TVNDIQKLV; note = HLAs: B1301 B1302 B1303 B5201 C0704
TENDIQKLI

SEQ ID NO: 2124 - protein, 9 aa, synthetic construct
  source 1..9: note = Seed: TVNDIQKLV; note = HLAs: B1301 B1302 B1303 B5201 C0704 C1202
TENDIQKLL

SEQ ID NO: 2125 - protein, 9 aa, synthetic construct
  source 1..9: note = Seed: TVNDIQKLV; note = HLAs: C0202 C0210 C0214 C0229 C0303 C0602 C1202 C1504 C1509 C1601 C1602 C16112 C1646
TENDIQKLK

SEQ ID NO: 2126 - protein, 9 aa, synthetic construct
  source 1..9: note = Seed: TVNDIQKLV; note = HLAs: B1301 B1303 B5201 C0704 C1202
TENDIQKLM

SEQ ID NO: 2127 - protein, 9 aa, synthetic construct
  source 1..9: note = Seed: TVNDIQKLV; note = HLAs: B1301 B1303 C0202 C0210 C0229 C0704 C1202
TENDIQKLF

SEQ ID NO: 2128 - protein, 9 aa, synthetic construct
  source 1..9: note = Seed: TVNDIQKLV; note = HLAs: B1301 C1202
TENDIQKLW

SEQ ID NO: 2129 - protein, 9 aa, synthetic construct
  source 1..9: note = Seed: TVNDIQKLV; note = HLAs: C0202 C0210 C0229 C1202 C1203 C1504 C1509
TENDIQKLY

SEQ ID NO: 2130 - protein, 9 aa, synthetic construct
  source 1..9: note = Seed: TVNDIQKLV; note = HLAs: B1301 B1302 B1303 B5201 C0704
TENDIQKLV

SEQ ID NO: 2131 - protein, 9 aa, synthetic construct
  source 1..9: note = Seed: TVNDIQKLV; note = HLAs: C0202 C0210 C0214 C0229 C0303 C0602 C1202 C1504 C1509 C1601 C1602 C16112 C1646
TGNDIQKLR

SEQ ID NO: 2132 - protein, 9 aa, synthetic construct
  source 1..9: note = Seed: TVNDIQKLV; note = HLAs: C1202
TGNDIQKLH

SEQ ID NO: 2133 - protein, 9 aa, synthetic construct
  source 1..9: note = Seed: TVNDIQKLV; note = HLAs: B5108 B5201 C0602 C0704 C0801 C0803 C1203 C1502 C1504 C1505 C1509 C1601 C1602 C16112 C1646 C17 C1701 C1702 C1703 C1704 C1705 C1706
TGNDIQKLI

SEQ ID NO: 2134 - protein, 9 aa, synthetic construct
  source 1..9: note = Seed: TVNDIQKLV; note = HLAs: C0102 C0144 C0202 C0210 C0214 C0217 C0229 C0303 C0304 C0305 C0317 C0403 C0501 C0509 C0602 C0704 C0801 C0803 C0804 C0812 C1202 C1203 C1502 C1504 C1505 C1509 C1601 C1602 C1604 C16112 C1646 C17 C1701 C1702 C1703 C1704 C1705 C1706 C1707
TGNDIQKLL

SEQ ID NO: 2135 - protein, 9 aa, synthetic construct
  source 1..9: note = Seed: TVNDIQKLV; note = HLAs: C0202 C0210 C0214 C0229 C0303 C0602 C1202 C1504 C1509 C1601 C1602 C1604 C16112 C1646
TGNDIQKLK

SEQ ID NO: 2136 - protein, 9 aa, synthetic construct
  source 1..9: note = Seed: TVNDIQKLV; note = HLAs: C0102 C0144 C0202 C0210 C0214 C0229 C0303 C0304 C0305 C0317 C0403 C0501 C0509 C0602 C0704 C0801 C0803 C0804 C0812 C1202 C1203 C1502 C1504 C1505 C1509 C1601 C1602 C1604 C16112 C1646 C17 C1701 C1702 C1703 C1704 C1705 C1706 C1707
TGNDIQKLM

SEQ ID NO: 2137 - protein, 9 aa, synthetic construct
  source 1..9: note = Seed: TVNDIQKLV; note = HLAs: C0202 C0210 C0214 C0217 C0229 C0303 C0602 C0704 C0801 C0803 C1202 C1203 C1502 C1504 C1505 C1509 C1601 C1602 C1604 C16112 C1646 C17 C1701 C1702 C1703 C1704 C1705 C1706
TGNDIQKLF

SEQ ID NO: 2138 - protein, 9 aa, synthetic construct
  source 1..9: note = Seed: TVNDIQKLV; note = HLAs: B1301 C1602 C1646
TGNDIQKLW

SEQ ID NO: 2139 - protein, 9 aa, synthetic construct
  source 1..9: note = Seed: TVNDIQKLV; note = HLAs: C0202 C0210 C0214 C0217 C0229 C0602 C1202 C1203 C1504 C1509 C1601 C1602 C1604 C16112 C1646
TGNDIQKLY

SEQ ID NO: 2140 - protein, 9 aa, synthetic construct
  source 1..9: note = Seed: TVNDIQKLV; note = HLAs: B5108 B5201 C0602 C0704 C0801 C0803 C1202 C1203 C1502 C1504 C1505 C1509 C1601 C1602 C16112 C1646 C17 C1701 C1702 C1703 C1704 C1705 C1706
TGNDIQKLV

SEQ ID NO: 2141 - protein, 9 aa, synthetic construct
  source 1..9: note = Seed: TVNDIQKLV; note = HLAs: C1602
THNDIQKLR

SEQ ID NO: 2142 - protein, 9 aa, synthetic construct
  source 1..9: note = Seed: TVNDIQKLV; note = HLAs: C0602 C0704
THNDIQKLI

SEQ ID NO: 2143 - protein, 9 aa, synthetic construct
  source 1..9: note = Seed: TVNDIQKLV; note = HLAs: C0214 C0602 C0704
THNDIQKLL

SEQ ID NO: 2144 - protein, 9 aa, synthetic construct
  source 1..9: note = Seed: TVNDIQKLV; note = HLAs: C0214 C0303 C0602 C1602 C1646
THNDIQKLK

SEQ ID NO: 2145 - protein, 9 aa, synthetic construct
  source 1..9: note = Seed: TVNDIQKLV; note = HLAs: C0214 C0602 C0704
THNDIQKLM

SEQ ID NO: 2146 - protein, 9 aa, synthetic construct
  source 1..9: note = Seed: TVNDIQKLV; note = HLAs: C0214 C0602 C0704
THNDIQKLF

SEQ ID NO: 2147 - protein, 9 aa, synthetic construct
  source 1..9: note = Seed: TVNDIQKLV; note = HLAs: C0214 C0602
THNDIQKLY

SEQ ID NO: 2148 - protein, 9 aa, synthetic construct
  source 1..9: note = Seed: TVNDIQKLV; note = HLAs: C0602 C0704
THNDIQKLV

SEQ ID NO: 2149 - protein, 9 aa, synthetic construct
  source 1..9: note = Seed: TVNDIQKLV; note = HLAs: A0205
TINDIQKLA

SEQ ID NO: 2150 - protein, 9 aa, synthetic construct
  source 1..9: note = Seed: TVNDIQKLV; note = HLAs: C0202 C0210 C0214 C0229 C0303 C0602 C1202 C1504 C1509 C1601 C1602 C16112 C1646
TINDIQKLR

SEQ ID NO: 2151 - protein, 9 aa, synthetic construct
  source 1..9: note = Seed: TVNDIQKLV; note = HLAs: C1202
TINDIQKLH

SEQ ID NO: 2152 - protein, 9 aa, synthetic construct
  source 1..9: note = Seed: TVNDIQKLV; note = HLAs: A0202 A0203 A0204 A0205 A0207 A02264 A6802 A6827 B1301 B1302 B1303 B5201 C0102 C0144 C0202 C0210 C0214 C0217 C0229 C0303 C0304 C0305 C0317 C0403 C0501 C0509 C0602 C0704 C0801 C0803 C0804 C0812 C1202 C1203 C1502 C1504 C1505 C1509 C1601 C1602 C1604 C16112 C1646 C17 C1701 C1702 C1703 C1704 C1705 C1706 C1707
TINDIQKLI

SEQ ID NO: 2153 - protein, 9 aa, synthetic construct
  source 1..9: note = Seed: TVNDIQKLV; note = HLAs: A0202 A0203 A0204 A0205 A0206 A0207 A0211 A0214 A02264 B1301 B1302 B1303 B5201 C0102 C0144 C0202 C0210 C0214 C0217 C0229 C0303 C0304 C0305 C0317 C0403 C0501 C0509 C0602 C0704 C0801 C0803 C0804 C0812 C1202 C1203 C1502 C1504 C1505 C1509 C1601 C1602 C1604 C16112 C1646 C17 C1701 C1702 C1703 C1704 C1705 C1706 C1707
TINDIQKLL

SEQ ID NO: 2154 - protein, 9 aa, synthetic construct
  source 1..9: note = Seed: TVNDIQKLV; note = HLAs: C0202 C0210 C0214 C0229 C0303 C0602 C1202 C1504 C1509 C1601 C1602 C1604 C16112 C1646
TINDIQKLK

SEQ ID NO: 2155 - protein, 9 aa, synthetic construct
  source 1..9: note = Seed: TVNDIQKLV; note = HLAs: A0204 A0205 A0207 B1301 C0102 C0144 C0202 C0210 C0214 C0217 C0229 C0303 C0304 C0305 C0317 C0403 C0501 C0509 C0602 C0704 C0801 C0803 C0804 C0812 C1202 C1203 C1502 C1504 C1505 C1509 C1601 C1602 C1604 C16112 C1646 C17 C1701 C1702 C1703 C1704 C1705 C1706 C1707
TINDIQKLM

SEQ ID NO: 2156 - protein, 9 aa, synthetic construct
  source 1..9: note = Seed: TVNDIQKLV; note = HLAs: B1301 C0102 C0144 C0202 C0210 C0214 C0217 C0229 C0303 C0304 C0305 C0317 C0403 C0501 C0509 C0602 C0704 C0801 C0803 C0804 C0812 C1202 C1203 C1502 C1504 C1505 C1509 C1601 C1602 C1604 C16112 C1646 C17 C1701 C1702 C1703 C1704 C1705 C1706 C1707
TINDIQKLF

SEQ ID NO: 2157 - protein, 9 aa, synthetic construct
  source 1..9: note = Seed: TVNDIQKLV; note = HLAs: B1301 C0202 C0210 C0229 C1202 C1203 C1504 C1509 C1601 C1602 C1604 C16112 C1646
TINDIQKLW

SEQ ID NO: 2158 - protein, 9 aa, synthetic construct
  source 1..9: note = Seed: TVNDIQKLV; note = HLAs: C0202 C0210 C0214 C0217 C0229 C0303 C0602 C1202 C1203 C1502 C1504 C1509 C1601 C1602 C1604 C16112 C1646 C1701 C1702 C1703 C1704 C1705
TINDIQKLY

SEQ ID NO: 2159 - protein, 9 aa, synthetic construct
  source 1..9: note = Seed: TVNDIQKLV; note = HLAs: A0201 A0202 A0203 A0204 A0205 A0206 A0207 A0211 A0214 A02264 A0230 A6802 A6827 A6901 B1301 B1302 B1303 B5201 C0102 C0144 C0202 C0210 C0214 C0217 C0229 C0303 C0304 C0317 C0403 C0501 C0509 C0602 C0704 C0801 C0803 C0804 C0812 C1202 C1203 C1502 C1504 C1505 C1509 C1601 C1602 C1604 C16112 C1646 C17 C1701 C1702 C1703 C1704 C1705 C1706 C1707
TINDIQKLV

SEQ ID NO: 2160 - protein, 9 aa, synthetic construct
  source 1..9: note = Seed: TVNDIQKLV; note = HLAs: A0201 A0202 A0203 A0204 A0205 A0206 A0207 A0211 A0214 A02264 A0230
TLNDIQKLA

SEQ ID NO: 2161 - protein, 9 aa, synthetic construct
  source 1..9: note = Seed: TVNDIQKLV; note = HLAs: C0202 C0210 C0229 C0303 C0602 C1202 C1504 C1509 C1602 C1646
TLNDIQKLR

SEQ ID NO: 2162 - protein, 9 aa, synthetic construct
  source 1..9: note = Seed: TVNDIQKLV; note = HLAs: C1202
TLNDIQKLH

SEQ ID NO: 2163 - protein, 9 aa, synthetic construct
  source 1..9: note = Seed: TVNDIQKLV; note = HLAs: A0201 A0202 A0203 A0204 A0205 A0206 A0207 A0211 A0214 A02264 A0230 B1301 B1302 B1303 B5201 C0102 C0144 C0202 C0210 C0214 C0229 C0403 C0501 C0509 C0602 C0704 C0801 C0803 C0812 C1202 C1203 C1502 C1504 C1505 C1509 C1601 C1602 C16112 C1646 C17 C1701 C1702 C1703 C1704 C1705 C1706 C1707
TLNDIQKLI

SEQ ID NO: 2164 - protein, 9 aa, synthetic construct
  source 1..9: note = Seed: TVNDIQKLV; note = HLAs: C0202 C0210 C0214 C0229 C0303 C0602 C1202 C1504 C1509 C1601 C1602 C16112 C1646
TLNDIQKLK

SEQ ID NO: 2165 - protein, 9 aa, synthetic construct
  source 1..9: note = Seed: TVNDIQKLV; note = HLAs: A0201 A0202 A0203 A0204 A0205 A0206 A0207 A0211 A0214 A02264 A0230 B1301 B1302 B1303 C0102 C0144 C0202 C0210 C0214 C0217 C0229 C0303 C0304 C0305 C0317 C0403 C0501 C0509 C0602 C0704 C0801 C0803 C0804 C0812 C1202 C1203 C1502 C1504 C1505 C1509 C1601 C1602 C1604 C16112 C1646 C17 C1701 C1702 C1703 C1704 C1705 C1706 C1707
TLNDIQKLM

SEQ ID NO: 2166 - protein, 9 aa, synthetic construct
  source 1..9: note = Seed: TVNDIQKLV; note = HLAs: A0204 A0207 B1301 B1302 B1303 C0102 C0144 C0202 C0210 C0214 C0217 C0229 C0303 C0304 C0317 C0403 C0501 C0509 C0602 C0704 C0801 C0803 C0812 C1202 C1203 C1502 C1504 C1505 C1509 C1601 C1602 C1604 C16112 C1646 C17 C1701 C1702 C1703 C1704 C1705 C1706 C1707
TLNDIQKLF

SEQ ID NO: 2167 - protein, 9 aa, synthetic construct
  source 1..9: note = Seed: TVNDIQKLV; note = HLAs: A0202 A0204
TLNDIQKLT

SEQ ID NO: 2168 - protein, 9 aa, synthetic construct
  source 1..9: note = Seed: TVNDIQKLV; note = HLAs: B1301 C0202 C0210 C0229 C1202 C1504 C1509 C1601 C1602 C16112 C1646
TLNDIQKLW

SEQ ID NO: 2169 - protein, 9 aa, synthetic construct
  source 1..9: note = Seed: TVNDIQKLV; note = HLAs: B1301 C0202 C0210 C0214 C0217 C0229 C0602 C1202 C1203 C1504 C1509 C1601 C1602 C1604 C16112 C1646
TLNDIQKLY

SEQ ID NO: 2170 - protein, 9 aa, synthetic construct
  source 1..9: note = Seed: TVNDIQKLV; note = HLAs: C0602 C0704
TKNDIQKLI

SEQ ID NO: 2171 - protein, 9 aa, synthetic construct
  source 1..9: note = Seed: TVNDIQKLV; note = HLAs: C0602 C0704
TKNDIQKLL

SEQ ID NO: 2172 - protein, 9 aa, synthetic construct
  source 1..9: note = Seed: TVNDIQKLV; note = HLAs: C0602 C0704
TKNDIQKLM

SEQ ID NO: 2173 - protein, 9 aa, synthetic construct
  source 1..9: note = Seed: TVNDIQKLV; note = HLAs: C0214 C0602 C0704
TKNDIQKLF

SEQ ID NO: 2174 - protein, 9 aa, synthetic construct
  source 1..9: note = Seed: TVNDIQKLV; note = HLAs: B1301
TKNDIQKLW

SEQ ID NO: 2175 - protein, 9 aa, synthetic construct
  source 1..9: note = Seed: TVNDIQKLV; note = HLAs: C0214 C0602 C1202
TKNDIQKLY

SEQ ID NO: 2176 - protein, 9 aa, synthetic construct
  source 1..9: note = Seed: TVNDIQKLV; note = HLAs: C0602 C0704
TKNDIQKLV

SEQ ID NO: 2177 - protein, 9 aa, synthetic construct
  source 1..9: note = Seed: TVNDIQKLV; note = HLAs: A0201 A0202 A0203 A0204 A0205 A0206 A0207 A0211 A0214 A02264 A0230 B1302
TMNDIQKLA

SEQ ID NO: 2178 - protein, 9 aa, synthetic construct
  source 1..9: note = Seed: TVNDIQKLV; note = HLAs: C0303 C1602 C1646
TMNDIQKLR

SEQ ID NO: 2179 - protein, 9 aa, synthetic construct
  source 1..9: note = Seed: TVNDIQKLV; note = HLAs: B1302
TMNDIQKLC

SEQ ID NO: 2180 - protein, 9 aa, synthetic construct
  source 1..9: note = Seed: TVNDIQKLV; note = HLAs: C1202
TMNDIQKLH

SEQ ID NO: 2181 - protein, 9 aa, synthetic construct
  source 1..9: note = Seed: TVNDIQKLV; note = HLAs: C0303 C0602 C1202 C1504 C1509 C1602 C1646
TMNDIQKLK

SEQ ID NO: 2182 - protein, 9 aa, synthetic construct
  source 1..9: note = Seed: TVNDIQKLV; note = HLAs: A0201 A0202 A0203 A0204 A0205 A0207 A0211 A0214 A02264 A0230 B1301 B1302 B1303 C0102 C0144 C0202 C0210 C0214 C0217 C0229 C0303 C0304 C0305 C0317 C0403 C0501 C0509 C0602 C0704 C0801 C0803 C0804 C0812 C1202 C1203 C1502 C1504 C1505 C1509 C1601 C1602 C1604 C16112 C1646 C17 C1701 C1702 C1703 C1704 C1705 C1706 C1707
TMNDIQKLM

SEQ ID NO: 2183 - protein, 9 aa, synthetic construct
  source 1..9: note = Seed: TVNDIQKLV; note = HLAs: B1301 B1302 B1303 C0102 C0144 C0202 C0210 C0214 C0217 C0229 C0303 C0304 C0403 C0501 C0509 C0602 C0704 C0801 C0803 C1202 C1203 C1502 C1504 C1505 C1509 C1601 C1602 C1604 C16112 C1646 C17 C1701 C1702 C1703 C1704 C1705 C1706 C1707
TMNDIQKLF

SEQ ID NO: 2184 - protein, 9 aa, synthetic construct
  source 1..9: note = Seed: TVNDIQKLV; note = HLAs: A0202 A0204 A0205
TMNDIQKLT

SEQ ID NO: 2185 - protein, 9 aa, synthetic construct
  source 1..9: note = Seed: TVNDIQKLV; note = HLAs: B1301 C0202 C0210 C0229 C1202 C1504 C1509 C1601 C1602 C16112 C1646
TMNDIQKLW

SEQ ID NO: 2186 - protein, 9 aa, synthetic construct
  source 1..9: note = Seed: TVNDIQKLV; note = HLAs: B1301 C0202 C0210 C0214 C0217 C0229 C0602 C1202 C1203 C1504 C1509 C1601 C1602 C1604 C16112 C1646
TMNDIQKLY

SEQ ID NO: 2187 - protein, 9 aa, synthetic construct
  source 1..9: note = Seed: TVNDIQKLV; note = HLAs: C0303 C0602 C1602 C1646
TFNDIQKLR

SEQ ID NO: 2188 - protein, 9 aa, synthetic construct
  source 1..9: note = Seed: TVNDIQKLV; note = HLAs: C0704
TFNDIQKLC

SEQ ID NO: 2189 - protein, 9 aa, synthetic construct
  source 1..9: note = Seed: TVNDIQKLV; note = HLAs: C0102 C0144 C0214 C0403 C0501 C0509 C0602 C0704 C0801 C0803 C0812 C1505 C1601 C1602 C16112 C1646 C1701 C1702 C1703 C1704 C1705
TFNDIQKLI

SEQ ID NO: 2190 - protein, 9 aa, synthetic construct
  source 1..9: note = Seed: TVNDIQKLV; note = HLAs: C0102 C0144 C0202 C0210 C0214 C0229 C0303 C0304 C0305 C0317 C0403 C0501 C0509 C0602 C0704 C0801 C0803 C0804 C0812 C1203 C1502 C1504 C1505 C1509 C1601 C1602 C1604 C16112 C1646 C17 C1701 C1702 C1703 C1704 C1705 C1706 C1707
TFNDIQKLL

SEQ ID NO: 2191 - protein, 9 aa, synthetic construct
  source 1..9: note = Seed: TVNDIQKLV; note = HLAs: C0214 C0303 C0602 C1601 C1602 C16112 C1646
TFNDIQKLK

SEQ ID NO: 2192 - protein, 9 aa, synthetic construct
  source 1..9: note = Seed: TVNDIQKLV; note = HLAs: C0102 C0144 C0202 C0210 C0214 C0229 C0303 C0304 C0305 C0317 C0403 C0501 C0509 C0602 C0704 C0801 C0803 C0804 C0812 C1202 C1203 C1502 C1504 C1505 C1509 C1601 C1602 C1604 C16112 C1646 C17 C1701 C1702 C1703 C1704 C1705 C1706 C1707
TFNDIQKLM

SEQ ID NO: 2193 - protein, 9 aa, synthetic construct
  source 1..9: note = Seed: TVNDIQKLV; note = HLAs: C0102 C0144 C0202 C0210 C0214 C0229 C0403 C0501 C0509 C0602 C0704 C0801 C0803 C0812 C1202 C1203 C1504 C1509 C1601 C1602 C1604 C16112 C1646 C17 C1701 C1702 C1703 C1704 C1705 C1706
TFNDIQKLF

SEQ ID NO: 2194 - protein, 9 aa, synthetic construct
  source 1..9: note = Seed: TVNDIQKLV; note = HLAs: C0214 C1601 C1602 C16112 C1646
TFNDIQKLW

SEQ ID NO: 2195 - protein, 9 aa, synthetic construct
  source 1..9: note = Seed: TVNDIQKLV; note = HLAs: C0202 C0210 C0214 C0217 C0229 C0602 C1202 C1203 C1504 C1509 C1601 C1602 C1604 C16112 C1646
TFNDIQKLY

SEQ ID NO: 2196 - protein, 9 aa, synthetic construct
  source 1..9: note = Seed: TVNDIQKLV; note = HLAs: C0102 C0144 C0214 C0403 C0501 C0509 C0602 C0704 C0812 C1502 C1505 C1601 C1602 C16112 C1646
TFNDIQKLV

SEQ ID NO: 2197 - protein, 9 aa, synthetic construct
  source 1..9: note = Seed: TVNDIQKLV; note = HLAs: B5108
TPNDIQKLA

SEQ ID NO: 2198 - protein, 9 aa, synthetic construct
  source 1..9: note = Seed: TVNDIQKLV; note = HLAs: C1602
TPNDIQKLR

SEQ ID NO: 2199 - protein, 9 aa, synthetic construct
  source 1..9: note = Seed: TVNDIQKLV; note = HLAs: B5108
TPNDIQKLC

SEQ ID NO: 2200 - protein, 9 aa, synthetic construct
  source 1..9: note = Seed: TVNDIQKLV; note = HLAs: B5108 C0704 C0801 C0803
TPNDIQKLI

SEQ ID NO: 2201 - protein, 9 aa, synthetic construct
  source 1..9: note = Seed: TVNDIQKLV; note = HLAs: B5108 C0102 C0144 C0303 C0704 C0801 C0803 C1505 C1602 C1646 C17 C1701 C1702 C1703 C1704 C1705 C1706
TPNDIQKLL

SEQ ID NO: 2202 - protein, 9 aa, synthetic construct
  source 1..9: note = Seed: TVNDIQKLV; note = HLAs: C0303 C1602 C1646
TPNDIQKLK

SEQ ID NO: 2203 - protein, 9 aa, synthetic construct
  source 1..9: note = Seed: TVNDIQKLV; note = HLAs: B5108 C0704 C0801 C0803 C1505 C1601 C1602 C16112 C1646
TPNDIQKLM

SEQ ID NO: 2204 - protein, 9 aa, synthetic construct
  source 1..9: note = Seed: TVNDIQKLV; note = HLAs: B5108 C0704 C1202 C1601 C1602 C16112 C1646
TPNDIQKLF

SEQ ID NO: 2205 - protein, 9 aa, synthetic construct
  source 1..9: note = Seed: TVNDIQKLV; note = HLAs: C0202 C0210 C0229 C1202 C1601 C1602 C1604 C16112 C1646
TPNDIQKLY

SEQ ID NO: 2206 - protein, 9 aa, synthetic construct
  source 1..9: note = Seed: TVNDIQKLV; note = HLAs: B5108 C0801 C0803
TPNDIQKLV

SEQ ID NO: 2207 - protein, 9 aa, synthetic construct
  source 1..9: note = Seed: TVNDIQKLV; note = HLAs: C1202
TSNDIQKLA

SEQ ID NO: 2208 - protein, 9 aa, synthetic construct
  source 1..9: note = Seed: TVNDIQKLV; note = HLAs: C0202 C0210 C0229 C0303 C0602 C1202 C1504 C1509 C1601 C1602 C16112 C1646
TSNDIQKLR

SEQ ID NO: 2209 - protein, 9 aa, synthetic construct
  source 1..9: note = Seed: TVNDIQKLV; note = HLAs: C0202 C0210 C0229 C1202
TSNDIQKLH

SEQ ID NO: 2210 - protein, 9 aa, synthetic construct
  source 1..9: note = Seed: TVNDIQKLV; note = HLAs: B1301 B1302 B1303 B5108 B5201 C0102 C0144 C0202 C0210 C0214 C0217 C0229 C0303 C0304 C0305 C0317 C0403 C0501 C0509 C0602 C0704 C0801 C0803 C0804 C0812 C1202 C1203 C1502 C1504 C1505 C1509 C1601 C1602 C1604 C16112 C1646 C17 C1701 C1702 C1703 C1704 C1705 C1706 C1707
TSNDIQKLI

SEQ ID NO: 2211 - protein, 9 aa, synthetic construct
  source 1..9: note = Seed: TVNDIQKLV; note = HLAs: C0202 C0210 C0214 C0229 C0303 C0602 C1202 C1504 C1509 C1601 C1602 C16112 C1646
TSNDIQKLK

SEQ ID NO: 2212 - protein, 9 aa, synthetic construct
  source 1..9: note = Seed: TVNDIQKLV; note = HLAs: C0102 C0144 C0202 C0210 C0214 C0217 C0229 C0303 C0304 C0305 C0317 C0403 C0501 C0509 C0602 C0704 C0801 C0803 C0804 C0812 C1202 C1203 C1502 C1504 C1505 C1509 C1601 C1602 C1604 C16112 C1646 C17 C1701 C1702 C1703 C1704 C1705 C1706 C1707
TSNDIQKLM

SEQ ID NO: 2213 - protein, 9 aa, synthetic construct
  source 1..9: note = Seed: TVNDIQKLV; note = HLAs: B1301 C0102 C0144 C0202 C0210 C0214 C0217 C0229 C0303 C0304 C0305 C0317 C0403 C0501 C0509 C0602 C0704 C0801 C0803 C0804 C0812 C1202 C1203 C1502 C1504 C1505 C1509 C1601 C1602 C1604 C16112 C1646 C17 C1701 C1702 C1703 C1704 C1705 C1706 C1707
TSNDIQKLF

SEQ ID NO: 2214 - protein, 9 aa, synthetic construct
  source 1..9: note = Seed: TVNDIQKLV; note = HLAs: B1301 C0202 C0210 C0229 C1202 C1203 C1504 C1509 C1601 C1602 C1604 C16112 C1646
TSNDIQKLW

SEQ ID NO: 2215 - protein, 9 aa, synthetic construct
  source 1..9: note = Seed: TVNDIQKLV; note = HLAs: C0202 C0210 C0214 C0217 C0229 C0303 C0602 C1202 C1203 C1502 C1504 C1505 C1509 C1601 C1602 C1604 C16112 C1646 C1701 C1702 C1703 C1704 C1705
TSNDIQKLY

SEQ ID NO: 2216 - protein, 9 aa, synthetic construct
  source 1..9: note = Seed: TVNDIQKLV; note = HLAs: A0205 A6802 A6827 B1302 B1303 B5108 B5201 C0102 C0144 C0202 C0210 C0214 C0217 C0229 C0303 C0304 C0305 C0317 C0403 C0501 C0509 C0602 C0704 C0801 C0803 C0804 C0812 C1202 C1203 C1502 C1504 C1505 C1509 C1601 C1602 C1604 C16112 C1646 C17 C1701 C1702 C1703 C1704 C1705 C1706 C1707
TSNDIQKLV

SEQ ID NO: 2217 - protein, 9 aa, synthetic construct
  source 1..9: note = Seed: TVNDIQKLV; note = HLAs: A6802 A6827
TTNDIQKLA

SEQ ID NO: 2218 - protein, 9 aa, synthetic construct
  source 1..9: note = Seed: TVNDIQKLV; note = HLAs: C0303 C0602 C1202 C1504 C1509 C1601 C1602 C16112 C1646
TTNDIQKLR

SEQ ID NO: 2219 - protein, 9 aa, synthetic construct
  source 1..9: note = Seed: TVNDIQKLV; note = HLAs: C0202 C0210 C0229 C1202
TTNDIQKLH

SEQ ID NO: 2220 - protein, 9 aa, synthetic construct
  source 1..9: note = Seed: TVNDIQKLV; note = HLAs: A0205 A6802 A6827 B1301 B1302 B1303 C0102 C0144 C0202 C0210 C0214 C0217 C0229 C0303 C0304 C0305 C0317 C0403 C0501 C0509 C0602 C0704 C0801 C0803 C0804 C0812 C1202 C1203 C1502 C1504 C1505 C1509 C1601 C1602 C1604 C16112 C1646 C17 C1701 C1702 C1703 C1704 C1705 C1706 C1707
TTNDIQKLI

SEQ ID NO: 2221 - protein, 9 aa, synthetic construct
  source 1..9: note = Seed: TVNDIQKLV; note = HLAs: A0205 A6802 A6827 B1301 C0102 C0144 C0202 C0210 C0214 C0217 C0229 C0303 C0304 C0305 C0317 C0403 C0501 C0509 C0602 C0704 C0801 C0803 C0804 C0812 C1202 C1203 C1502 C1504 C1505 C1509 C1601 C1602 C1604 C16112 C1646 C17 C1701 C1702 C1703 C1704 C1705 C1706 C1707
TTNDIQKLL

SEQ ID NO: 2222 - protein, 9 aa, synthetic construct
  source 1..9: note = Seed: TVNDIQKLV; note = HLAs: C0202 C0210 C0229 C0303 C0602 C1202 C1504 C1509 C1601 C1602 C16112 C1646
TTNDIQKLK

SEQ ID NO: 2223 - protein, 9 aa, synthetic construct
  source 1..9: note = Seed: TVNDIQKLV; note = HLAs: A6802 A6827 C0102 C0144 C0202 C0210 C0214 C0217 C0229 C0303 C0304 C0305 C0317 C0403 C0501 C0509 C0602 C0704 C0801 C0803 C0804 C0812 C1202 C1203 C1502 C1504 C1505 C1509 C1601 C1602 C1604 C16112 C1646 C17 C1701 C1702 C1703 C1704 C1705 C1706 C1707
TTNDIQKLM

SEQ ID NO: 2224 - protein, 9 aa, synthetic construct
  source 1..9: note = Seed: TVNDIQKLV; note = HLAs: B1301 C0102 C0144 C0202 C0210 C0214 C0217 C0229 C0303 C0304 C0305 C0317 C0403 C0501 C0509 C0602 C0704 C0801 C0803 C0804 C0812 C1202 C1203 C1502 C1504 C1505 C1509 C1601 C1602 C1604 C16112 C1646 C17 C1701 C1702 C1703 C1704 C1705 C1706 C1707
TTNDIQKLF

SEQ ID NO: 2225 - protein, 9 aa, synthetic construct
  source 1..9: note = Seed: TVNDIQKLV; note = HLAs: B1301 C0202 C0210 C0229 C1202 C1203 C1504 C1509 C1601 C1602 C1604 C16112 C1646
TTNDIQKLW

SEQ ID NO: 2226 - protein, 9 aa, synthetic construct
  source 1..9: note = Seed: TVNDIQKLV; note = HLAs: C0202 C0210 C0214 C0217 C0229 C0602 C1202 C1203 C1502 C1504 C1505 C1509 C1601 C1602 C1604 C16112 C1646
TTNDIQKLY

SEQ ID NO: 2227 - protein, 9 aa, synthetic construct
  source 1..9: note = Seed: TVNDIQKLV; note = HLAs: C1602
TWNDIQKLR

SEQ ID NO: 2228 - protein, 9 aa, synthetic construct
  source 1..9: note = Seed: TVNDIQKLV; note = HLAs: C0214 C0602 C0704 C1602
TWNDIQKLI

SEQ ID NO: 2229 - protein, 9 aa, synthetic construct
  source 1..9: note = Seed: TVNDIQKLV; note = HLAs: C0102 C0144 C0214 C0403 C0501 C0509 C0602 C0704 C0812 C1601 C1602 C16112 C1646
TWNDIQKLL

SEQ ID NO: 2230 - protein, 9 aa, synthetic construct
  source 1..9: note = Seed: TVNDIQKLV; note = HLAs: C0303 C1602 C1646
TWNDIQKLK

SEQ ID NO: 2231 - protein, 9 aa, synthetic construct
  source 1..9: note = Seed: TVNDIQKLV; note = HLAs: C0102 C0144 C0214 C0403 C0602 C0704 C1601 C1602 C16112 C1646
TWNDIQKLM

SEQ ID NO: 2232 - protein, 9 aa, synthetic construct
  source 1..9: note = Seed: TVNDIQKLV; note = HLAs: C0214 C0602 C0704 C1601 C1602 C16112 C1646
TWNDIQKLF

SEQ ID NO: 2233 - protein, 9 aa, synthetic construct
  source 1..9: note = Seed: TVNDIQKLV; note = HLAs: C0214 C0602 C1202 C1601 C1602 C16112 C1646
TWNDIQKLY

SEQ ID NO: 2234 - protein, 9 aa, synthetic construct
  source 1..9: note = Seed: TVNDIQKLV; note = HLAs: C0214 C0602 C0704 C1602
TWNDIQKLV

SEQ ID NO: 2235 - protein, 9 aa, synthetic construct
  source 1..9: note = Seed: TVNDIQKLV; note = HLAs: C0303 C0602 C1602 C1646
TYNDIQKLR

SEQ ID NO: 2236 - protein, 9 aa, synthetic construct
  source 1..9: note = Seed: TVNDIQKLV; note = HLAs: C0704
TYNDIQKLC

SEQ ID NO: 2237 - protein, 9 aa, synthetic construct
  source 1..9: note = Seed: TVNDIQKLV; note = HLAs: C0102 C0144 C0214 C0602 C0704 C1602 C1646
TYNDIQKLI

SEQ ID NO: 2238 - protein, 9 aa, synthetic construct
  source 1..9: note = Seed: TVNDIQKLV; note = HLAs: C0214 C0303 C0602 C1602 C1646
TYNDIQKLK

SEQ ID NO: 2239 - protein, 9 aa, synthetic construct
  source 1..9: note = Seed: TVNDIQKLV; note = HLAs: C0102 C0144 C0214 C0305 C0403 C0602 C0704 C0801 C0803 C0812 C1203 C1504 C1509 C1601 C1602 C1604 C16112 C1646
TYNDIQKLM

SEQ ID NO: 2240 - protein, 9 aa, synthetic construct
  source 1..9: note = Seed: TVNDIQKLV; note = HLAs: C0102 C0144 C0214 C0602 C0704 C1202 C1203 C1504 C1509 C1601 C1602 C1604 C16112 C1646
TYNDIQKLF

SEQ ID NO: 2241 - protein, 9 aa, synthetic construct
  source 1..9: note = Seed: TVNDIQKLV; note = HLAs: C0214 C1602 C1646
TYNDIQKLW

SEQ ID NO: 2242 - protein, 9 aa, synthetic construct
  source 1..9: note = Seed: TVNDIQKLV; note = HLAs: C0202 C0210 C0214 C0229 C0602 C1202 C1203 C1504 C1509 C1601 C1602 C1604 C16112 C1646
TYNDIQKLY

SEQ ID NO: 2243 - protein, 9 aa, synthetic construct
  source 1..9: note = Seed: TVNDIQKLV; note = HLAs: C0214 C0602 C0704 C1602 C1646
TYNDIQKLV

SEQ ID NO: 2244 - protein, 9 aa, synthetic construct
  source 1..9: note = Seed: TVNDIQKLV; note = HLAs: A0205 A6802 A6827 C1202
TVNDIQKLA

SEQ ID NO: 2245 - protein, 9 aa, synthetic construct
  source 1..9: note = Seed: TVNDIQKLV; note = HLAs: C0202 C0210 C0214 C0229 C0303 C0602 C1202 C1504 C1509 C1601 C1602 C16112 C1646
TVNDIQKLR

SEQ ID NO: 2246 - protein, 9 aa, synthetic construct
  source 1..9: note = Seed: TVNDIQKLV; note = HLAs: C0202 C0210 C0229 C1202
TVNDIQKLH

SEQ ID NO: 2247 - protein, 9 aa, synthetic construct
  source 1..9: note = Seed: TVNDIQKLV; note = HLAs: A0204 A0205 A0207 A6802 A6827 B1301 B1302 B1303 B5108 B5201 C0102 C0144 C0202 C0210 C0214 C0217 C0229 C0303 C0304 C0305 C0317 C0403 C0501 C0509 C0602 C0704 C0801 C0803 C0804 C0812 C1202 C1203 C1502 C1504 C1505 C1509 C1601 C1602 C1604 C16112 C1646 C17 C1701 C1702 C1703 C1704 C1705 C1706 C1707
TVNDIQKLI

SEQ ID NO: 2248 - protein, 9 aa, synthetic construct
  source 1..9: note = Seed: TVNDIQKLV; note = HLAs: A0202 A0204 A0205 A0207 A6802 A6827 B1301 B1302 B1303 B5108 B5201 C0102 C0144 C0202 C0210 C0214 C0217 C0229 C0303 C0304 C0305 C0317 C0403 C0501 C0509 C0602 C0704 C0801 C0803 C0804 C0812 C1202 C1203 C1502 C1504 C1505 C1509 C1601 C1602 C1604 C16112 C1646 C17 C1701 C1702 C1703 C1704 C1705 C1706 C1707
TVNDIQKLL

SEQ ID NO: 2249 - protein, 9 aa, synthetic construct
  source 1..9: note = Seed: TVNDIQKLV; note = HLAs: C0202 C0210 C0214 C0229 C0303 C0602 C1202 C1504 C1509 C1601 C1602 C1604 C16112 C1646
TVNDIQKLK

SEQ ID NO: 2250 - protein, 9 aa, synthetic construct
  source 1..9: note = Seed: TVNDIQKLV; note = HLAs: B1301 C0102 C0144 C0202 C0210 C0214 C0217 C0229 C0303 C0304 C0305 C0317 C0403 C0501 C0509 C0602 C0704 C0801 C0803 C0804 C0812 C1202 C1203 C1502 C1504 C1505 C1509 C1601 C1602 C1604 C16112 C1646 C17 C1701 C1702 C1703 C1704 C1705 C1706 C1707
TVNDIQKLM

SEQ ID NO: 2251 - protein, 9 aa, synthetic construct
  source 1..9: note = Seed: TVNDIQKLV; note = HLAs: B1301 C0102 C0144 C0202 C0210 C0214 C0217 C0229 C0303 C0304 C0305 C0317 C0403 C0501 C0509 C0602 C0704 C0801 C0803 C0804 C0812 C1202 C1203 C1502 C1504 C1505 C1509 C1601 C1602 C1604 C16112 C1646 C17 C1701 C1702 C1703 C1704 C1705 C1706 C1707
TVNDIQKLF

SEQ ID NO: 2252 - protein, 9 aa, synthetic construct
  source 1..9: note = Seed: TVNDIQKLV; note = HLAs: B1301 C0202 C0210 C0229 C1202 C1203 C1504 C1509 C1601 C1602 C1604 C16112 C1646
TVNDIQKLW

SEQ ID NO: 2253 - protein, 9 aa, synthetic construct
  source 1..9: note = Seed: TVNDIQKLV; note = HLAs: C0202 C0210 C0214 C0217 C0229 C0303 C0602 C1202 C1203 C1502 C1504 C1509 C1601 C1602 C1604 C16112 C1646 C1701 C1702 C1703 C1704 C1705
TVNDIQKLY

SEQ ID NO: 2254 - protein, 11 aa, synthetic construct
  source 1..11: note = Seed: TVNDIQKLVGK; note = HLAs: A3104 A3303 A3401 A3402 A3601 A6601 A6602 A6603 A6801 A7401 A7402 A7403 A7404 A7405 A7408 A7409 A7411 A7413 C0202 C0210 C0214 C0229 C0302 C0303 C0602 C1202 C1504 C1509 C1601 C1602 C1604 C16112 C1646
TANDIQKLVGR

SEQ ID NO: 2255 - protein, 11 aa, synthetic construct
  source 1..11: note = Seed: TVNDIQKLVGK; note = HLAs: C1202
TANDIQKLVGH

SEQ ID NO: 2256 - protein, 11 aa, synthetic construct
  source 1..11: note = Seed: TVNDIQKLVGK; note = HLAs: C0303 C1502 C1602 C1646
TANDIQKLVGI

SEQ ID NO: 2257 - protein, 11 aa, synthetic construct
  source 1..11: note = Seed: TVNDIQKLVGK; note = HLAs: C0202 C0210 C0229 C0302 C0303 C1202 C1203 C1502 C1504 C1509 C1601 C1602 C1604 C16112 C1646
TANDIQKLVGL

SEQ ID NO: 2258 - protein, 11 aa, synthetic construct
  source 1..11: note = Seed: TVNDIQKLVGK; note = HLAs: A0301 A0302 A0305 A1101 A1102 A3401 A3402 A3601 A6601 A6602 A6603 A6801 A7401 A7402 A7403 A7404 A7405 A7408 A7409 A7411 A7413 C0202 C0210 C0214 C0229 C0302 C0303 C0602 C1202 C1502 C1504 C1509 C1601 C1602 C1604 C16112 C1646
TANDIQKLVGK

SEQ ID NO: 2259 - protein, 11 aa, synthetic construct
  source 1..11: note = Seed: TVNDIQKLVGK; note = HLAs: C0202 C0210 C0229 C0302 C0303 C1202 C1203 C1502 C1504 C1509 C1601 C1602 C1604 C16112 C1646
TANDIQKLVGM

SEQ ID NO: 2260 - protein, 11 aa, synthetic construct
  source 1..11: note = Seed: TVNDIQKLVGK; note = HLAs: C0202 C0210 C0214 C0229 C0302 C0303 C1202 C1203 C1502 C1504 C1509 C1601 C1602 C1604 C16112 C1646
TANDIQKLVGF

SEQ ID NO: 2261 - protein, 11 aa, synthetic construct
  source 1..11: note = Seed: TVNDIQKLVGK; note = HLAs: C0202 C0210 C0229 C1202 C1203 C1504 C1509 C1601 C1602 C1604 C16112 C1646
TANDIQKLVGW

SEQ ID NO: 2262 - protein, 11 aa, synthetic construct
  source 1..11: note = Seed: TVNDIQKLVGK; note = HLAs: A3601 C0202 C0210 C0214 C0229 C0302 C0303 C1202 C1203 C1504 C1509 C1601 C1602 C1604 C16112 C1646
TANDIQKLVGY

SEQ ID NO: 2263 - protein, 11 aa, synthetic construct
  source 1..11: note = Seed: TVNDIQKLVGK; note = HLAs: C1502 C1602 C1646
TANDIQKLVGV

SEQ ID NO: 2264 - protein, 11 aa, synthetic construct
  source 1..11: note = Seed: TVNDIQKLVGK; note = HLAs: C0602
TRNDIQKLVGL

SEQ ID NO: 2265 - protein, 11 aa, synthetic construct
  source 1..11: note = Seed: TVNDIQKLVGK; note = HLAs: C0602
TRNDIQKLVGM

SEQ ID NO: 2266 - protein, 11 aa, synthetic construct
  source 1..11: note = Seed: TVNDIQKLVGK; note = HLAs: C0214 C0602
TRNDIQKLVGF

SEQ ID NO: 2267 - protein, 11 aa, synthetic construct
  source 1..11: note = Seed: TVNDIQKLVGK; note = HLAs: C0214 C0602
TRNDIQKLVGY

SEQ ID NO: 2268 - protein, 11 aa, synthetic construct
  source 1..11: note = Seed: TVNDIQKLVGK; note = HLAs: A3303 A3401 A3402 A3601 A6801 A7404 A7405 A7408 C0202 C0210 C0214 C0229 C0303 C0602 C1202 C1504 C1509 C1602 C1646
TNNDIQKLVGR

SEQ ID NO: 2269 - protein, 11 aa, synthetic construct
  source 1..11: note = Seed: TVNDIQKLVGK; note = HLAs: A0302 A1101 A1102 A3402 A3601 A7404 A7405 C0202 C0210 C0214 C0229 C0303 C0602 C1202 C1504 C1509 C1601 C1602 C16112 C1646
TNNDIQKLVGK

SEQ ID NO: 2270 - protein, 11 aa, synthetic construct
  source 1..11: note = Seed: TVNDIQKLVGK; note = HLAs: A3601
TNNDIQKLVGY

SEQ ID NO: 2271 - protein, 11 aa, synthetic construct
  source 1..11: note = Seed: TVNDIQKLVGK; note = HLAs: A3303 A3401 A3402 A3601 A6801 C0202 C0210 C0229 C0303 C0602 C1202 C1602 C1646
TDNDIQKLVGR

SEQ ID NO: 2272 - protein, 11 aa, synthetic construct
  source 1..11: note = Seed: TVNDIQKLVGK; note = HLAs: A3402 A3601 C0202 C0210 C0214 C0229 C0303 C0602 C1202 C1504 C1509 C1601 C1602 C16112 C1646
TDNDIQKLVGK

SEQ ID NO: 2273 - protein, 11 aa, synthetic construct
  source 1..11: note = Seed: TVNDIQKLVGK; note = HLAs: A3601
TDNDIQKLVGY

SEQ ID NO: 2274 - protein, 11 aa, synthetic construct
  source 1..11: note = Seed: TVNDIQKLVGK; note = HLAs: A3303 A3401 A3402 A3601 A6801 A7404 C0303 C1602 C1646
TCNDIQKLVGR

SEQ ID NO: 2275 - protein, 11 aa, synthetic construct
  source 1..11: note = Seed: TVNDIQKLVGK; note = HLAs: A3402 A3601 A7404 C0202 C0210 C0229 C0303 C0602 C1202 C1602 C1646
TCNDIQKLVGK

SEQ ID NO: 2276 - protein, 11 aa, synthetic construct
  source 1..11: note = Seed: TVNDIQKLVGK; note = HLAs: C1602
TCNDIQKLVGF

SEQ ID NO: 2277 - protein, 11 aa, synthetic construct
  source 1..11: note = Seed: TVNDIQKLVGK; note = HLAs: A3601
TCNDIQKLVGY

SEQ ID NO: 2278 - protein, 11 aa, synthetic construct
  source 1..11: note = Seed: TVNDIQKLVGK; note = HLAs: A3104 A3303 A3401 A3402 A3601 A6602 A6801 A7401 A7402 A7403 A7404 A7405 A7408 A7409 A7411 A7413 C0202 C0210 C0214 C0229 C0303 C0602 C1202 C1504 C1509 C1602 C1646
TQNDIQKLVGR

SEQ ID NO: 2279 - protein, 11 aa, synthetic construct
  source 1..11: note = Seed: TVNDIQKLVGK; note = HLAs: C1202
TQNDIQKLVGH

SEQ ID NO: 2280 - protein, 11 aa, synthetic construct
  source 1..11: note = Seed: TVNDIQKLVGK; note = HLAs: A0301 A0302 A0305 A1101 A1102 A3402 A3601 A7401 A7402 A7403 A7404 A7405 A7408 A7409 A7411 A7413 C0202 C0210 C0214 C0229 C0302 C0303 C0602 C1202 C1504 C1509 C1601 C1602 C16112 C1646
TQNDIQKLVGK

SEQ ID NO: 2281 - protein, 11 aa, synthetic construct
  source 1..11: note = Seed: TVNDIQKLVGK; note = HLAs: C0202 C0210 C0229 C1202
TQNDIQKLVGF

SEQ ID NO: 2282 - protein, 11 aa, synthetic construct
  source 1..11: note = Seed: TVNDIQKLVGK; note = HLAs: A3601 C0202 C0210 C0229 C1202
TQNDIQKLVGY

SEQ ID NO: 2283 - protein, 11 aa, synthetic construct
  source 1..11: note = Seed: TVNDIQKLVGK; note = HLAs: A3303 A3401 A3601 A6801 A7404 C0202 C0210 C0229 C0303 C0602 C1202 C1602 C1646
TENDIQKLVGR

SEQ ID NO: 2284 - protein, 11 aa, synthetic construct
  source 1..11: note = Seed: TVNDIQKLVGK; note = HLAs: A3402 A3601 A7404 C0202 C0210 C0214 C0229 C0303 C0602 C1202 C1504 C1509 C1601 C1602 C16112 C1646
TENDIQKLVGK

SEQ ID NO: 2285 - protein, 11 aa, synthetic construct
  source 1..11: note = Seed: TVNDIQKLVGK; note = HLAs: A3601 C1202
TENDIQKLVGY

SEQ ID NO: 2286 - protein, 11 aa, synthetic construct
  source 1..11: note = Seed: TVNDIQKLVGK; note = HLAs: A3303 A3401 A3402 A3601 A6602 A6801 A7401 A7402 A7403 A7404 A7405 A7408 A7409 A7411 C0202 C0210 C0214 C0229 C0302 C0303 C0602 C1202 C1504 C1509 C1601 C1602 C1604 C16112 C1646
TGNDIQKLVGR

SEQ ID NO: 2287 - protein, 11 aa, synthetic construct
  source 1..11: note = Seed: TVNDIQKLVGK; note = HLAs: C0303
TGNDIQKLVGQ

SEQ ID NO: 2288 - protein, 11 aa, synthetic construct
  source 1..11: note = Seed: TVNDIQKLVGK; note = HLAs: C1202
TGNDIQKLVGH

SEQ ID NO: 2289 - protein, 11 aa, synthetic construct
  source 1..11: note = Seed: TVNDIQKLVGK; note = HLAs: C1502 C1602 C1646
TGNDIQKLVGL

SEQ ID NO: 2290 - protein, 11 aa, synthetic construct
  source 1..11: note = Seed: TVNDIQKLVGK; note = HLAs: A0302 A1101 A1102 A3402 A3601 A7404 A7405 C0202 C0210 C0214 C0229 C0302 C0303 C0602 C1202 C1502 C1504 C1509 C1601 C1602 C1604 C16112 C1646
TGNDIQKLVGK

SEQ ID NO: 2291 - protein, 11 aa, synthetic construct
  source 1..11: note = Seed: TVNDIQKLVGK; note = HLAs: C1602 C1646
TGNDIQKLVGM

SEQ ID NO: 2292 - protein, 11 aa, synthetic construct
  source 1..11: note = Seed: TVNDIQKLVGK; note = HLAs: C0202 C0210 C0229 C1202 C1504 C1509 C1602 C1646
TGNDIQKLVGF

SEQ ID NO: 2293 - protein, 11 aa, synthetic construct
  source 1..11: note = Seed: TVNDIQKLVGK; note = HLAs: A3601 C0202 C0210 C0229 C1202 C1504 C1509 C1601 C1602 C16112 C1646
TGNDIQKLVGY

SEQ ID NO: 2294 - protein, 11 aa, synthetic construct
  source 1..11: note = Seed: TVNDIQKLVGK; note = HLAs: A3303
THNDIQKLVGR

SEQ ID NO: 2295 - protein, 11 aa, synthetic construct
  source 1..11: note = Seed: TVNDIQKLVGK; note = HLAs: C0303 C0602 C1602 C1646
THNDIQKLVGK

SEQ ID NO: 2296 - protein, 11 aa, synthetic construct
  source 1..11: note = Seed: TVNDIQKLVGK; note = HLAs: A0302 A1101 A1102 A3104 A3303 A3401 A3402 A3601 A6601 A6602 A6603 A6801 A74 A7401 A7402 A7403 A7404 A7405 A7408 A7409 A7411 A7413 C0202 C0210 C0214 C0229 C0302 C0303 C0602 C1202 C1504 C1509 C1601 C1602 C1604 C16112 C1646
TINDIQKLVGR

SEQ ID NO: 2297 - protein, 11 aa, synthetic construct
  source 1..11: note = Seed: TVNDIQKLVGK; note = HLAs: C0303
TINDIQKLVGQ

SEQ ID NO: 2298 - protein, 11 aa, synthetic construct
  source 1..11: note = Seed: TVNDIQKLVGK; note = HLAs: C1202
TINDIQKLVGH

SEQ ID NO: 2299 - protein, 11 aa, synthetic construct
  source 1..11: note = Seed: TVNDIQKLVGK; note = HLAs: C0202 C0210 C0229 C0303 C1502 C1602 C1646
TINDIQKLVGL

SEQ ID NO: 2300 - protein, 11 aa, synthetic construct
  source 1..11: note = Seed: TVNDIQKLVGK; note = HLAs: A0301 A0302 A0305 A1101 A1102 A3104 A3303 A3401 A3402 A3601 A6601 A6602 A6603 A6801 A74 A7401 A7402 A7403 A7404 A7405 A7408 A7409 A7411 A7413 C0202 C0210 C0214 C0229 C0302 C0303 C0602 C1202 C1203 C1504 C1509 C1601 C1602 C1604 C16112 C1646
TINDIQKLVGK

SEQ ID NO: 2301 - protein, 11 aa, synthetic construct
  source 1..11: note = Seed: TVNDIQKLVGK; note = HLAs: C0202 C0210 C0229 C1202 C1602 C1646
TINDIQKLVGM

SEQ ID NO: 2302 - protein, 11 aa, synthetic construct
  source 1..11: note = Seed: TVNDIQKLVGK; note = HLAs: C0202 C0210 C0229 C1202 C1504 C1509 C1602 C1646
TINDIQKLVGF

SEQ ID NO: 2303 - protein, 11 aa, synthetic construct
  source 1..11: note = Seed: TVNDIQKLVGK; note = HLAs: A3601 C0202 C0210 C0229 C1202 C1504 C1509 C1602 C1646
TINDIQKLVGY

SEQ ID NO: 2304 - protein, 11 aa, synthetic construct
  source 1..11: note = Seed: TVNDIQKLVGK; note = HLAs: A0302 A1101 A1102 A3104 A3303 A3401 A3402 A3601 A6601 A6602 A6603 A6801 A74 A7401 A7402 A7403 A7404 A7405 A7408 A7409 A7411 A7413 C0202 C0210 C0214 C0229 C0303 C0602 C1202 C1504 C1509 C1602 C1646
TLNDIQKLVGR

SEQ ID NO: 2305 - protein, 11 aa, synthetic construct
  source 1..11: note = Seed: TVNDIQKLVGK; note = HLAs: C1602
TLNDIQKLVGL

SEQ ID NO: 2306 - protein, 11 aa, synthetic construct
  source 1..11: note = Seed: TVNDIQKLVGK; note = HLAs: A0301 A0302 A0305 A1101 A1102 A3401 A3402 A3601 A6801 A74 A7401 A7402 A7403 A7404 A7405 A7408 A7409 A7411 A7413 C0202 C0210 C0214 C0229 C0302 C0303 C0602 C1202 C1504 C1509 C1601 C1602 C16112 C1646
TLNDIQKLVGK

SEQ ID NO: 2307 - protein, 11 aa, synthetic construct
  source 1..11: note = Seed: TVNDIQKLVGK; note = HLAs: C1602
TLNDIQKLVGM

SEQ ID NO: 2308 - protein, 11 aa, synthetic construct
  source 1..11: note = Seed: TVNDIQKLVGK; note = HLAs: C0202 C0210 C0229 C1202 C1602 C1646
TLNDIQKLVGF

SEQ ID NO: 2309 - protein, 11 aa, synthetic construct
  source 1..11: note = Seed: TVNDIQKLVGK; note = HLAs: A3601 A7404 C0202 C0210 C0229 C1202 C1602
TLNDIQKLVGY

SEQ ID NO: 2310 - protein, 11 aa, synthetic construct
  source 1..11: note = Seed: TVNDIQKLVGK; note = HLAs: C0303 C1602
TKNDIQKLVGK

SEQ ID NO: 2311 - protein, 11 aa, synthetic construct
  source 1..11: note = Seed: TVNDIQKLVGK; note = HLAs: A0301 A0302 A0305 A1101 A1102 A3104 A3303 A3401 A3402 A3601 A6601 A6602 A6603 A6801 A74 A7401 A7402 A7403 A7404 A7405 A7408 A7409 A7411 A7413 C0202 C0210 C0229 C0303 C0602 C1202 C1602 C1646
TMNDIQKLVGR

SEQ ID NO: 2312 - protein, 11 aa, synthetic construct
  source 1..11: note = Seed: TVNDIQKLVGK; note = HLAs: C1202
TMNDIQKLVGH

SEQ ID NO: 2313 - protein, 11 aa, synthetic construct
  source 1..11: note = Seed: TVNDIQKLVGK; note = HLAs: C1602
TMNDIQKLVGL

SEQ ID NO: 2314 - protein, 11 aa, synthetic construct
  source 1..11: note = Seed: TVNDIQKLVGK; note = HLAs: A0301 A0302 A0305 A1101 A1102 A3001 A3104 A3401 A3402 A3601 A6801 A74 A7401 A7402 A7403 A7404 A7405 A7408 A7409 A7411 A7413 C0202 C0210 C0214 C0229 C0302 C0303 C0602 C1202 C1504 C1509 C1601 C1602 C16112 C1646
TMNDIQKLVGK

SEQ ID NO: 2315 - protein, 11 aa, synthetic construct
  source 1..11: note = Seed: TVNDIQKLVGK; note = HLAs: C0202 C0210 C0229 C1202 C1602 C1646
TMNDIQKLVGF

SEQ ID NO: 2316 - protein, 11 aa, synthetic construct
  source 1..11: note = Seed: TVNDIQKLVGK; note = HLAs: A3601 A7404 C0202 C0210 C0229 C0302 C1202 C1504 C1509 C1602 C1646
TMNDIQKLVGY

SEQ ID NO: 2317 - protein, 11 aa, synthetic construct
  source 1..11: note = Seed: TVNDIQKLVGK; note = HLAs: A3104 A3303 A7401 A7402 A7403 A7404 A7405 A7408 A7409 A7411 C0303 C1602 C1646
TFNDIQKLVGR

SEQ ID NO: 2318 - protein, 11 aa, synthetic construct
  source 1..11: note = Seed: TVNDIQKLVGK; note = HLAs: A0302 A3104 A3303 A3402 A3601 A7401 A7402 A7403 A7404 A7405 A7408 A7409 A7411 C0214 C0303 C0602 C1202 C1601 C1602 C16112 C1646
TFNDIQKLVGK

SEQ ID NO: 2319 - protein, 11 aa, synthetic construct
  source 1..11: note = Seed: TVNDIQKLVGK; note = HLAs: C0214 C1602
TFNDIQKLVGF

SEQ ID NO: 2320 - protein, 11 aa, synthetic construct
  source 1..11: note = Seed: TVNDIQKLVGK; note = HLAs: A3601 C0214 C1602
TFNDIQKLVGY

SEQ ID NO: 2321 - protein, 11 aa, synthetic construct
  source 1..11: note = Seed: TVNDIQKLVGK; note = HLAs: A3303 A3401 A6801 C0303
TPNDIQKLVGR

SEQ ID NO: 2322 - protein, 11 aa, synthetic construct
  source 1..11: note = Seed: TVNDIQKLVGK; note = HLAs: A3402 C0303 C1602 C1646
TPNDIQKLVGK

SEQ ID NO: 2323 - protein, 11 aa, synthetic construct
  source 1..11: note = Seed: TVNDIQKLVGK; note = HLAs: A3601 C1202
TSNDIQKLVGH

SEQ ID NO: 2324 - protein, 11 aa, synthetic construct
  source 1..11: note = Seed: TVNDIQKLVGK; note = HLAs: C1502
TSNDIQKLVGI

SEQ ID NO: 2325 - protein, 11 aa, synthetic construct
  source 1..11: note = Seed: TVNDIQKLVGK; note = HLAs: C0202 C0210 C0229 C0303 C1202 C1502 C1504 C1509 C1601 C1602 C16112 C1646
TSNDIQKLVGL

SEQ ID NO: 2326 - protein, 11 aa, synthetic construct
  source 1..11: note = Seed: TVNDIQKLVGK; note = HLAs: A0301 A0302 A0305 A1101 A1102 A3401 A3402 A3601 A6602 A6603 A6801 A7401 A7402 A7403 A7404 A7405 A7408 A7409 A7411 A7413 C0202 C0210 C0214 C0229 C0302 C0303 C0602 C1202 C1504 C1509 C1601 C1602 C1604 C16112 C1646
TSNDIQKLVGK

SEQ ID NO: 2327 - protein, 11 aa, synthetic construct
  source 1..11: note = Seed: TVNDIQKLVGK; note = HLAs: C0202 C0210 C0229 C1202 C1502 C1504 C1509 C1601 C1602 C16112 C1646
TSNDIQKLVGM

SEQ ID NO: 2328 - protein, 11 aa, synthetic construct
  source 1..11: note = Seed: TVNDIQKLVGK; note = HLAs: C0202 C0210 C0229 C0302 C1202 C1203 C1502 C1504 C1509 C1601 C1602 C1604 C16112 C1646
TSNDIQKLVGF

SEQ ID NO: 2329 - protein, 11 aa, synthetic construct
  source 1..11: note = Seed: TVNDIQKLVGK; note = HLAs: C1602 C1646
TSNDIQKLVGW

SEQ ID NO: 2330 - protein, 11 aa, synthetic construct
  source 1..11: note = Seed: TVNDIQKLVGK; note = HLAs: A3601 C0202 C0210 C0229 C0302 C1202 C1203 C1504 C1509 C1601 C1602 C1604 C16112 C1646
TSNDIQKLVGY

SEQ ID NO: 2331 - protein, 11 aa, synthetic construct
  source 1..11: note = Seed: TVNDIQKLVGK; note = HLAs: A3601
TTNDIQKLVGQ

SEQ ID NO: 2332 - protein, 11 aa, synthetic construct
  source 1..11: note = Seed: TVNDIQKLVGK; note = HLAs: A3402 A3601 C1202
TTNDIQKLVGH

SEQ ID NO: 2333 - protein, 11 aa, synthetic construct
  source 1..11: note = Seed: TVNDIQKLVGK; note = HLAs: C1502
TTNDIQKLVGI

SEQ ID NO: 2334 - protein, 11 aa, synthetic construct
  source 1..11: note = Seed: TVNDIQKLVGK; note = HLAs: C0202 C0210 C0229 C0303 C1502 C1504 C1509 C1601 C1602 C16112 C1646
TTNDIQKLVGL

SEQ ID NO: 2335 - protein, 11 aa, synthetic construct
  source 1..11: note = Seed: TVNDIQKLVGK; note = HLAs: C0202 C0210 C0229 C1202 C1502 C1504 C1509 C1601 C1602 C16112 C1646
TTNDIQKLVGM

SEQ ID NO: 2336 - protein, 11 aa, synthetic construct
  source 1..11: note = Seed: TVNDIQKLVGK; note = HLAs: A3601 C0202 C0210 C0229 C0302 C1202 C1203 C1502 C1504 C1509 C1601 C1602 C1604 C16112 C1646
TTNDIQKLVGF

SEQ ID NO: 2337 - protein, 11 aa, synthetic construct
  source 1..11: note = Seed: TVNDIQKLVGK; note = HLAs: A3601 C1504 C1509 C1602 C1646
TTNDIQKLVGW

SEQ ID NO: 2338 - protein, 11 aa, synthetic construct
  source 1..11: note = Seed: TVNDIQKLVGK; note = HLAs: A3402 A3601 C0202 C0210 C0229 C0302 C1202 C1203 C1504 C1509 C1601 C1602 C1604 C16112 C1646
TTNDIQKLVGY

SEQ ID NO: 2339 - protein, 11 aa, synthetic construct
  source 1..11: note = Seed: TVNDIQKLVGK; note = HLAs: C1502
TTNDIQKLVGV

SEQ ID NO: 2340 - protein, 11 aa, synthetic construct
  source 1..11: note = Seed: TVNDIQKLVGK; note = HLAs: A3104 A3303 A7404 A7405 C0303 C1602 C1646
TWNDIQKLVGR

SEQ ID NO: 2341 - protein, 11 aa, synthetic construct
  source 1..11: note = Seed: TVNDIQKLVGK; note = HLAs: A3303 A3601 A7404 C0303 C0602 C1602 C1646
TWNDIQKLVGK

SEQ ID NO: 2342 - protein, 11 aa, synthetic construct
  source 1..11: note = Seed: TVNDIQKLVGK; note = HLAs: A3601
TWNDIQKLVGY

SEQ ID NO: 2343 - protein, 11 aa, synthetic construct
  source 1..11: note = Seed: TVNDIQKLVGK; note = HLAs: A3104 A3303 A3402 A3601 A7404 A7405 C0214 C0303 C0602 C1602 C1646
TYNDIQKLVGK

SEQ ID NO: 2344 - protein, 11 aa, synthetic construct
  source 1..11: note = Seed: TVNDIQKLVGK; note = HLAs: C0214
TYNDIQKLVGF

SEQ ID NO: 2345 - protein, 11 aa, synthetic construct
  source 1..11: note = Seed: TVNDIQKLVGK; note = HLAs: C0214
TYNDIQKLVGY

SEQ ID NO: 2346 - protein, 11 aa, synthetic construct
  source 1..11: note = Seed: TVNDIQKLVGK; note = HLAs: C0303
TVNDIQKLVGQ

SEQ ID NO: 2347 - protein, 11 aa, synthetic construct
  source 1..11: note = Seed: TVNDIQKLVGK; note = HLAs: A3401 A3402 A3601 C1202
TVNDIQKLVGH

SEQ ID NO: 2348 - protein, 11 aa, synthetic construct
  source 1..11: note = Seed: TVNDIQKLVGK; note = HLAs: C0202 C0210 C0229 C0303 C1202 C1502 C1504 C1509 C1602 C1646
TVNDIQKLVGL

SEQ ID NO: 2349 - protein, 11 aa, synthetic construct
  source 1..11: note = Seed: TVNDIQKLVGK; note = HLAs: C0202 C0210 C0229 C0303 C1202 C1502 C1504 C1509 C1602 C1646
TVNDIQKLVGM

SEQ ID NO: 2350 - protein, 11 aa, synthetic construct
  source 1..11: note = Seed: TVNDIQKLVGK; note = HLAs: C0202 C0210 C0229 C0302 C1202 C1203 C1504 C1509 C1601 C1602 C1604 C16112 C1646
TVNDIQKLVGF

SEQ ID NO: 2351 - protein, 11 aa, synthetic construct
  source 1..11: note = Seed: TVNDIQKLVGK; note = HLAs: C0202 C0210 C0229 C1202 C1602 C1646
TVNDIQKLVGW

SEQ ID NO: 2352 - protein, 11 aa, synthetic construct
  source 1..11: note = Seed: TVNDIQKLVGK; note = HLAs: A3601 C0202 C0210 C0229 C0302 C1202 C1203 C1504 C1509 C1601 C1602 C1604 C16112 C1646
TVNDIQKLVGY

SEQ ID NO: 2353 - protein, 8 aa, synthetic construct
  source 1..8: note = Seed: VNDIQKLV; note = HLAs: C0501 C0509
VADIQKLA

SEQ ID NO: 2354 - protein, 8 aa, synthetic construct
  source 1..8: note = Seed: VNDIQKLV; note = HLAs: C0501 C0509
VADIQKLC

SEQ ID NO: 2355 - protein, 8 aa, synthetic construct
  source 1..8: note = Seed: VNDIQKLV; note = HLAs: C0403 C0501 C0509 C0802
VADIQKLI

SEQ ID NO: 2356 - protein, 8 aa, synthetic construct
  source 1..8: note = Seed: VNDIQKLV; note = HLAs: C0403 C0501 C0509 C0802
VADIQKLL

SEQ ID NO: 2357 - protein, 8 aa, synthetic construct
  source 1..8: note = Seed: VNDIQKLV; note = HLAs: C0403 C0501 C0509 C0802
VADIQKLM

SEQ ID NO: 2358 - protein, 8 aa, synthetic construct
  source 1..8: note = Seed: VNDIQKLV; note = HLAs: C0403 C0501 C0509 C0802
VADIQKLF

SEQ ID NO: 2359 - protein, 8 aa, synthetic construct
  source 1..8: note = Seed: VNDIQKLV; note = HLAs: C0403 C0501 C0509
VADIQKLW

SEQ ID NO: 2360 - protein, 8 aa, synthetic construct
  source 1..8: note = Seed: VNDIQKLV; note = HLAs: C0403 C0501 C0509 C0802
VADIQKLY

SEQ ID NO: 2361 - protein, 8 aa, synthetic construct
  source 1..8: note = Seed: VNDIQKLV; note = HLAs: C0403 C0501 C0509 C0802
VADIQKLV

SEQ ID NO: 2362 - protein, 8 aa, synthetic construct
  source 1..8: note = Seed: VNDIQKLV; note = HLAs: C0403 C0501 C0509 C0802
VNDIQKLI

SEQ ID NO: 2363 - protein, 8 aa, synthetic construct
  source 1..8: note = Seed: VNDIQKLV; note = HLAs: C0403 C0501 C0509 C0802
VNDIQKLL

SEQ ID NO: 2364 - protein, 8 aa, synthetic construct
  source 1..8: note = Seed: VNDIQKLV; note = HLAs: C0403 C0501 C0509 C0802
VNDIQKLM

SEQ ID NO: 2365 - protein, 8 aa, synthetic construct
  source 1..8: note = Seed: VNDIQKLV; note = HLAs: C0403 C0501 C0509 C0802
VNDIQKLF

SEQ ID NO: 2366 - protein, 8 aa, synthetic construct
  source 1..8: note = Seed: VNDIQKLV; note = HLAs: C0403 C0501 C0509
VDDIQKLI

SEQ ID NO: 2367 - protein, 8 aa, synthetic construct
  source 1..8: note = Seed: VNDIQKLV; note = HLAs: C0403 C0501 C0509 C0802
VDDIQKLL

SEQ ID NO: 2368 - protein, 8 aa, synthetic construct
  source 1..8: note = Seed: VNDIQKLV; note = HLAs: C0403 C0501 C0509 C0802
VDDIQKLM

SEQ ID NO: 2369 - protein, 8 aa, synthetic construct
  source 1..8: note = Seed: VNDIQKLV; note = HLAs: C0403 C0501 C0509
VDDIQKLF

SEQ ID NO: 2370 - protein, 8 aa, synthetic construct
  source 1..8: note = Seed: VNDIQKLV; note = HLAs: C0501 C0509
VDDIQKLV

SEQ ID NO: 2371 - protein, 8 aa, synthetic construct
  source 1..8: note = Seed: VNDIQKLV; note = HLAs: C0403 C0501 C0509 C0802
VCDIQKLI

SEQ ID NO: 2372 - protein, 8 aa, synthetic construct
  source 1..8: note = Seed: VNDIQKLV; note = HLAs: C0403 C0501 C0509 C0802
VCDIQKLL

SEQ ID NO: 2373 - protein, 8 aa, synthetic construct
  source 1..8: note = Seed: VNDIQKLV; note = HLAs: C0403 C0501 C0509 C0802
VCDIQKLM

SEQ ID NO: 2374 - protein, 8 aa, synthetic construct
  source 1..8: note = Seed: VNDIQKLV; note = HLAs: C0403 C0501 C0509
VCDIQKLF

SEQ ID NO: 2375 - protein, 8 aa, synthetic construct
  source 1..8: note = Seed: VNDIQKLV; note = HLAs: C0403 C0501 C0509
VCDIQKLV

SEQ ID NO: 2376 - protein, 8 aa, synthetic construct
  source 1..8: note = Seed: VNDIQKLV; note = HLAs: C0403 C0501 C0509 C0802
VQDIQKLI

SEQ ID NO: 2377 - protein, 8 aa, synthetic construct
  source 1..8: note = Seed: VNDIQKLV; note = HLAs: C0403 C0501 C0509 C0802
VQDIQKLL

SEQ ID NO: 2378 - protein, 8 aa, synthetic construct
  source 1..8: note = Seed: VNDIQKLV; note = HLAs: C0403 C0501 C0509 C0802
VQDIQKLM

SEQ ID NO: 2379 - protein, 8 aa, synthetic construct
  source 1..8: note = Seed: VNDIQKLV; note = HLAs: C0403 C0501 C0509 C0802
VQDIQKLF

SEQ ID NO: 2380 - protein, 8 aa, synthetic construct
  source 1..8: note = Seed: VNDIQKLV; note = HLAs: C0403 C0501 C0509 C0802
VQDIQKLV

SEQ ID NO: 2381 - protein, 8 aa, synthetic construct
  source 1..8: note = Seed: VNDIQKLV; note = HLAs: C0501 C0509
VEDIQKLI

SEQ ID NO: 2382 - protein, 8 aa, synthetic construct
  source 1..8: note = Seed: VNDIQKLV; note = HLAs: C0403 C0501 C0509 C0802
VEDIQKLL

SEQ ID NO: 2383 - protein, 8 aa, synthetic construct
  source 1..8: note = Seed: VNDIQKLV; note = HLAs: C0403 C0501 C0509
VEDIQKLM

SEQ ID NO: 2384 - protein, 8 aa, synthetic construct
  source 1..8: note = Seed: VNDIQKLV; note = HLAs: C0501 C0509
VEDIQKLF

SEQ ID NO: 2385 - protein, 8 aa, synthetic construct
  source 1..8: note = Seed: VNDIQKLV; note = HLAs: C0403 C0501 C0509 C0802
VGDIQKLI

SEQ ID NO: 2386 - protein, 8 aa, synthetic construct
  source 1..8: note = Seed: VNDIQKLV; note = HLAs: C0403 C0501 C0509 C0802
VGDIQKLL

SEQ ID NO: 2387 - protein, 8 aa, synthetic construct
  source 1..8: note = Seed: VNDIQKLV; note = HLAs: C0403 C0501 C0509 C0802
VGDIQKLM

SEQ ID NO: 2388 - protein, 8 aa, synthetic construct
  source 1..8: note = Seed: VNDIQKLV; note = HLAs: C0403 C0501 C0509 C0802
VGDIQKLF

SEQ ID NO: 2389 - protein, 8 aa, synthetic construct
  source 1..8: note = Seed: VNDIQKLV; note = HLAs: C0501 C0509
VGDIQKLY

SEQ ID NO: 2390 - protein, 8 aa, synthetic construct
  source 1..8: note = Seed: VNDIQKLV; note = HLAs: C0403 C0501 C0509 C0802
VGDIQKLV

SEQ ID NO: 2391 - protein, 8 aa, synthetic construct
  source 1..8: note = Seed: VNDIQKLV; note = HLAs: C0403 C0501 C0509 C0802
VHDIQKLL

SEQ ID NO: 2392 - protein, 8 aa, synthetic construct
  source 1..8: note = Seed: VNDIQKLV; note = HLAs: C0403 C0501 C0509 C0802
VIDIQKLI

SEQ ID NO: 2393 - protein, 8 aa, synthetic construct
  source 1..8: note = Seed: VNDIQKLV; note = HLAs: C0403 C0501 C0509 C0802
VIDIQKLM

SEQ ID NO: 2394 - protein, 8 aa, synthetic construct
  source 1..8: note = Seed: VNDIQKLV; note = HLAs: C0403 C0501 C0509 C0802
VIDIQKLF

SEQ ID NO: 2395 - protein, 8 aa, synthetic construct
  source 1..8: note = Seed: VNDIQKLV; note = HLAs: C0403 C0501 C0509
VIDIQKLY

SEQ ID NO: 2396 - protein, 8 aa, synthetic construct
  source 1..8: note = Seed: VNDIQKLV; note = HLAs: C0403 C0501 C0509 C0802
VIDIQKLV

SEQ ID NO: 2397 - protein, 8 aa, synthetic construct
  source 1..8: note = Seed: VNDIQKLV; note = HLAs: C0403 C0501 C0509 C0802
VLDIQKLI

SEQ ID NO: 2398 - protein, 8 aa, synthetic construct
  source 1..8: note = Seed: VNDIQKLV; note = HLAs: C0403 C0501 C0509 C0802
VLDIQKLL

SEQ ID NO: 2399 - protein, 8 aa, synthetic construct
  source 1..8: note = Seed: VNDIQKLV; note = HLAs: C0403 C0501 C0509 C0802
VLDIQKLM

SEQ ID NO: 2400 - protein, 8 aa, synthetic construct
  source 1..8: note = Seed: VNDIQKLV; note = HLAs: C0403 C0501 C0509 C0802
VLDIQKLF

SEQ ID NO: 2401 - protein, 8 aa, synthetic construct
  source 1..8: note = Seed: VNDIQKLV; note = HLAs: C0403 C0501 C0509 C0802
VLDIQKLV

SEQ ID NO: 2402 - protein, 8 aa, synthetic construct
  source 1..8: note = Seed: VNDIQKLV; note = HLAs: C0501 C0509
VKDIQKLL

SEQ ID NO: 2403 - protein, 8 aa, synthetic construct
  source 1..8: note = Seed: VNDIQKLV; note = HLAs: C0403 C0501 C0509 C0802
VMDIQKLI

SEQ ID NO: 2404 - protein, 8 aa, synthetic construct
  source 1..8: note = Seed: VNDIQKLV; note = HLAs: C0403 C0501 C0509 C0802
VMDIQKLL

SEQ ID NO: 2405 - protein, 8 aa, synthetic construct
  source 1..8: note = Seed: VNDIQKLV; note = HLAs: C0403 C0501 C0509 C0802
VMDIQKLM

SEQ ID NO: 2406 - protein, 8 aa, synthetic construct
  source 1..8: note = Seed: VNDIQKLV; note = HLAs: C0403 C0501 C0509 C0802
VMDIQKLF

SEQ ID NO: 2407 - protein, 8 aa, synthetic construct
  source 1..8: note = Seed: VNDIQKLV; note = HLAs: C0403 C0501 C0509 C0802
VMDIQKLV

SEQ ID NO: 2408 - protein, 8 aa, synthetic construct
  source 1..8: note = Seed: VNDIQKLV; note = HLAs: C0403 C0501 C0509 C0802
VFDIQKLI

SEQ ID NO: 2409 - protein, 8 aa, synthetic construct
  source 1..8: note = Seed: VNDIQKLV; note = HLAs: C0403 C0501 C0509 C0802
VFDIQKLL

SEQ ID NO: 2410 - protein, 8 aa, synthetic construct
  source 1..8: note = Seed: VNDIQKLV; note = HLAs: C0403 C0501 C0509 C0802
VFDIQKLM

SEQ ID NO: 2411 - protein, 8 aa, synthetic construct
  source 1..8: note = Seed: VNDIQKLV; note = HLAs: C0403 C0501 C0509 C0802
VFDIQKLF

SEQ ID NO: 2412 - protein, 8 aa, synthetic construct
  source 1..8: note = Seed: VNDIQKLV; note = HLAs: C0403 C0501 C0509
VFDIQKLV

SEQ ID NO: 2413 - protein, 8 aa, synthetic construct
  source 1..8: note = Seed: VNDIQKLV; note = HLAs: C0403 C0501 C0509
VPDIQKLI

SEQ ID NO: 2414 - protein, 8 aa, synthetic construct
  source 1..8: note = Seed: VNDIQKLV; note = HLAs: C0403 C0501 C0509 C0802
VPDIQKLL

SEQ ID NO: 2415 - protein, 8 aa, synthetic construct
  source 1..8: note = Seed: VNDIQKLV; note = HLAs: C0403 C0501 C0509 C0802
VPDIQKLM

SEQ ID NO: 2416 - protein, 8 aa, synthetic construct
  source 1..8: note = Seed: VNDIQKLV; note = HLAs: C0403 C0501 C0509
VPDIQKLF

SEQ ID NO: 2417 - protein, 8 aa, synthetic construct
  source 1..8: note = Seed: VNDIQKLV; note = HLAs: C0501 C0509
VPDIQKLV

SEQ ID NO: 2418 - protein, 8 aa, synthetic construct
  source 1..8: note = Seed: VNDIQKLV; note = HLAs: C0501 C0509
VSDIQKLA

SEQ ID NO: 2419 - protein, 8 aa, synthetic construct
  source 1..8: note = Seed: VNDIQKLV; note = HLAs: C0403 C0501 C0509 C0802
VSDIQKLI

SEQ ID NO: 2420 - protein, 8 aa, synthetic construct
  source 1..8: note = Seed: VNDIQKLV; note = HLAs: C0403 C0501 C0509 C0802
VSDIQKLM

SEQ ID NO: 2421 - protein, 8 aa, synthetic construct
  source 1..8: note = Seed: VNDIQKLV; note = HLAs: C0403 C0501 C0509 C0802
VSDIQKLF

SEQ ID NO: 2422 - protein, 8 aa, synthetic construct
  source 1..8: note = Seed: VNDIQKLV; note = HLAs: C0403 C0501 C0509
VSDIQKLY

SEQ ID NO: 2423 - protein, 8 aa, synthetic construct
  source 1..8: note = Seed: VNDIQKLV; note = HLAs: C0403 C0501 C0509 C0802
VSDIQKLV

SEQ ID NO: 2424 - protein, 8 aa, synthetic construct
  source 1..8: note = Seed: VNDIQKLV; note = HLAs: C0403 C0501 C0509 C0802
VTDIQKLI

SEQ ID NO: 2425 - protein, 8 aa, synthetic construct
  source 1..8: note = Seed: VNDIQKLV; note = HLAs: C0403 C0501 C0509 C0802
VTDIQKLM

SEQ ID NO: 2426 - protein, 8 aa, synthetic construct
  source 1..8: note = Seed: VNDIQKLV; note = HLAs: C0403 C0501 C0509 C0802
VTDIQKLF

SEQ ID NO: 2427 - protein, 8 aa, synthetic construct
  source 1..8: note = Seed: VNDIQKLV; note = HLAs: C0403 C0501 C0509
VTDIQKLY

SEQ ID NO: 2428 - protein, 8 aa, synthetic construct
  source 1..8: note = Seed: VNDIQKLV; note = HLAs: C0403 C0501 C0509 C0802
VTDIQKLV

SEQ ID NO: 2429 - protein, 8 aa, synthetic construct
  source 1..8: note = Seed: VNDIQKLV; note = HLAs: C0403 C0501 C0509
VWDIQKLI

SEQ ID NO: 2430 - protein, 8 aa, synthetic construct
  source 1..8: note = Seed: VNDIQKLV; note = HLAs: C0403 C0501 C0509 C0802
VWDIQKLL

SEQ ID NO: 2431 - protein, 8 aa, synthetic construct
  source 1..8: note = Seed: VNDIQKLV; note = HLAs: C0403 C0501 C0509
VWDIQKLM

SEQ ID NO: 2432 - protein, 8 aa, synthetic construct
  source 1..8: note = Seed: VNDIQKLV; note = HLAs: C0403 C0501 C0509
VWDIQKLF

SEQ ID NO: 2433 - protein, 8 aa, synthetic construct
  source 1..8: note = Seed: VNDIQKLV; note = HLAs: C0501 C0509
VWDIQKLV

SEQ ID NO: 2434 - protein, 8 aa, synthetic construct
  source 1..8: note = Seed: VNDIQKLV; note = HLAs: C0403 C0501 C0509
VYDIQKLI

SEQ ID NO: 2435 - protein, 8 aa, synthetic construct
  source 1..8: note = Seed: VNDIQKLV; note = HLAs: C0403 C0501 C0509 C0802
VYDIQKLL

SEQ ID NO: 2436 - protein, 8 aa, synthetic construct
  source 1..8: note = Seed: VNDIQKLV; note = HLAs: C0403 C0501 C0509
VYDIQKLM

SEQ ID NO: 2437 - protein, 8 aa, synthetic construct
  source 1..8: note = Seed: VNDIQKLV; note = HLAs: C0403 C0501 C0509
VYDIQKLF

SEQ ID NO: 2438 - protein, 8 aa, synthetic construct
  source 1..8: note = Seed: VNDIQKLV; note = HLAs: C0403 C0501 C0509
VYDIQKLV

SEQ ID NO: 2439 - protein, 8 aa, synthetic construct
  source 1..8: note = Seed: VNDIQKLV; note = HLAs: C0403 C0501 C0509 C0802
VVDIQKLI

SEQ ID NO: 2440 - protein, 8 aa, synthetic construct
  source 1..8: note = Seed: VNDIQKLV; note = HLAs: C0403 C0501 C0509 C0802
VVDIQKLL

SEQ ID NO: 2441 - protein, 8 aa, synthetic construct
  source 1..8: note = Seed: VNDIQKLV; note = HLAs: C0403 C0501 C0509 C0802
VVDIQKLM

SEQ ID NO: 2442 - protein, 8 aa, synthetic construct
  source 1..8: note = Seed: VNDIQKLV; note = HLAs: C0403 C0501 C0509 C0802
VVDIQKLF

SEQ ID NO: 2443 - protein, 8 aa, synthetic construct
  source 1..8: note = Seed: VNDIQKLV; note = HLAs: C0501 C0509
VVDIQKLY

SEQ ID NO: 2444 - protein, 8 aa, synthetic construct
  source 1..8: note = Seed: VNDIQKLV; note = HLAs: C0403 C0501 C0509 C0802
VVDIQKLV

SEQ ID NO: 2445 - protein, 10 aa, synthetic construct
  source 1..10: note = Seed: VNDIQKLVGK; note = HLAs: A3601 C0303 C1602 C1646
VADIQKLVGR

SEQ ID NO: 2446 - protein, 10 aa, synthetic construct
  source 1..10: note = Seed: VNDIQKLVGK; note = HLAs: A3601
VADIQKLVGH

SEQ ID NO: 2447 - protein, 10 aa, synthetic construct
  source 1..10: note = Seed: VNDIQKLVGK; note = HLAs: C0303 C1602 C1646
VADIQKLVGL

SEQ ID NO: 2448 - protein, 10 aa, synthetic construct
  source 1..10: note = Seed: VNDIQKLVGK; note = HLAs: A3601 C0303 C1602 C1646
VADIQKLVGK

SEQ ID NO: 2449 - protein, 10 aa, synthetic construct
  source 1..10: note = Seed: VNDIQKLVGK; note = HLAs: C0303 C1602 C1646
VADIQKLVGM

SEQ ID NO: 2450 - protein, 10 aa, synthetic construct
  source 1..10: note = Seed: VNDIQKLVGK; note = HLAs: A3601 C0303 C1602 C1646
VADIQKLVGF

SEQ ID NO: 2451 - protein, 10 aa, synthetic construct
  source 1..10: note = Seed: VNDIQKLVGK; note = HLAs: A3601 C1602 C1646
VADIQKLVGY

SEQ ID NO: 2452 - protein, 10 aa, synthetic construct
  source 1..10: note = Seed: VNDIQKLVGK; note = HLAs: A3601 C0303 C1602
VNDIQKLVGR

SEQ ID NO: 2453 - protein, 10 aa, synthetic construct
  source 1..10: note = Seed: VNDIQKLVGK; note = HLAs: A3601
VNDIQKLVGY

SEQ ID NO: 2454 - protein, 10 aa, synthetic construct
  source 1..10: note = Seed: VNDIQKLVGK; note = HLAs: A3601 C0303
VDDIQKLVGR

SEQ ID NO: 2455 - protein, 10 aa, synthetic construct
  source 1..10: note = Seed: VNDIQKLVGK; note = HLAs: A3601 C0303 C1602 C1646
VDDIQKLVGK

SEQ ID NO: 2456 - protein, 10 aa, synthetic construct
  source 1..10: note = Seed: VNDIQKLVGK; note = HLAs: A3601
VDDIQKLVGY

SEQ ID NO: 2457 - protein, 10 aa, synthetic construct
  source 1..10: note = Seed: VNDIQKLVGK; note = HLAs: A3601
VCDIQKLVGK

SEQ ID NO: 2458 - protein, 10 aa, synthetic construct
  source 1..10: note = Seed: VNDIQKLVGK; note = HLAs: A3601
VCDIQKLVGY

SEQ ID NO: 2459 - protein, 10 aa, synthetic construct
  source 1..10: note = Seed: VNDIQKLVGK; note = HLAs: A3601 C0303 C1602 C1646
VQDIQKLVGR

SEQ ID NO: 2460 - protein, 10 aa, synthetic construct
  source 1..10: note = Seed: VNDIQKLVGK; note = HLAs: A3601 C0303 C1602 C1646
VQDIQKLVGK

SEQ ID NO: 2461 - protein, 10 aa, synthetic construct
  source 1..10: note = Seed: VNDIQKLVGK; note = HLAs: A3601
VQDIQKLVGY

SEQ ID NO: 2462 - protein, 10 aa, synthetic construct
  source 1..10: note = Seed: VNDIQKLVGK; note = HLAs: A3601 C0303
VEDIQKLVGR

SEQ ID NO: 2463 - protein, 10 aa, synthetic construct
  source 1..10: note = Seed: VNDIQKLVGK; note = HLAs: A3601 C0303 C1602 C1646
VEDIQKLVGK

SEQ ID NO: 2464 - protein, 10 aa, synthetic construct
  source 1..10: note = Seed: VNDIQKLVGK; note = HLAs: A3601
VEDIQKLVGY

SEQ ID NO: 2465 - protein, 10 aa, synthetic construct
  source 1..10: note = Seed: VNDIQKLVGK; note = HLAs: A3601 C0303 C1602 C1646
VGDIQKLVGR

SEQ ID NO: 2466 - protein, 10 aa, synthetic construct
  source 1..10: note = Seed: VNDIQKLVGK; note = HLAs: A3601 C0303 C1602 C1646
VGDIQKLVGK

SEQ ID NO: 2467 - protein, 10 aa, synthetic construct
  source 1..10: note = Seed: VNDIQKLVGK; note = HLAs: A3601
VGDIQKLVGY

SEQ ID NO: 2468 - protein, 10 aa, synthetic construct
  source 1..10: note = Seed: VNDIQKLVGK; note = HLAs: C0303
VHDIQKLVGK

SEQ ID NO: 2469 - protein, 10 aa, synthetic construct
  source 1..10: note = Seed: VNDIQKLVGK; note = HLAs: A3601 C0303 C1602 C1646
VIDIQKLVGR

SEQ ID NO: 2470 - protein, 10 aa, synthetic construct
  source 1..10: note = Seed: VNDIQKLVGK; note = HLAs: A3601
VIDIQKLVGH

SEQ ID NO: 2471 - protein, 10 aa, synthetic construct
  source 1..10: note = Seed: VNDIQKLVGK; note = HLAs: A3601 C0303 C1602 C1646
VIDIQKLVGK

SEQ ID NO: 2472 - protein, 10 aa, synthetic construct
  source 1..10: note = Seed: VNDIQKLVGK; note = HLAs: A3601
VIDIQKLVGF

SEQ ID NO: 2473 - protein, 10 aa, synthetic construct
  source 1..10: note = Seed: VNDIQKLVGK; note = HLAs: A3601
VIDIQKLVGY

SEQ ID NO: 2474 - protein, 10 aa, synthetic construct
  source 1..10: note = Seed: VNDIQKLVGK; note = HLAs: A3601 C0303 C1602
VLDIQKLVGR

SEQ ID NO: 2475 - protein, 10 aa, synthetic construct
  source 1..10: note = Seed: VNDIQKLVGK; note = HLAs: A3601 C0303 C1602 C1646
VLDIQKLVGK

SEQ ID NO: 2476 - protein, 10 aa, synthetic construct
  source 1..10: note = Seed: VNDIQKLVGK; note = HLAs: A3601
VLDIQKLVGF

SEQ ID NO: 2477 - protein, 10 aa, synthetic construct
  source 1..10: note = Seed: VNDIQKLVGK; note = HLAs: A3601
VLDIQKLVGY

SEQ ID NO: 2478 - protein, 10 aa, synthetic construct
  source 1..10: note = Seed: VNDIQKLVGK; note = HLAs: A3601
VKDIQKLVGY

SEQ ID NO: 2479 - protein, 10 aa, synthetic construct
  source 1..10: note = Seed: VNDIQKLVGK; note = HLAs: A3601 C0303 C1602
VMDIQKLVGR

SEQ ID NO: 2480 - protein, 10 aa, synthetic construct
  source 1..10: note = Seed: VNDIQKLVGK; note = HLAs: A3601
VMDIQKLVGH

SEQ ID NO: 2481 - protein, 10 aa, synthetic construct
  source 1..10: note = Seed: VNDIQKLVGK; note = HLAs: A3601 C0303 C1602 C1646
VMDIQKLVGK

SEQ ID NO: 2482 - protein, 10 aa, synthetic construct
  source 1..10: note = Seed: VNDIQKLVGK; note = HLAs: A3601
VMDIQKLVGF

SEQ ID NO: 2483 - protein, 10 aa, synthetic construct
  source 1..10: note = Seed: VNDIQKLVGK; note = HLAs: A3601
VMDIQKLVGW

SEQ ID NO: 2484 - protein, 10 aa, synthetic construct
  source 1..10: note = Seed: VNDIQKLVGK; note = HLAs: A3601
VMDIQKLVGY

SEQ ID NO: 2485 - protein, 10 aa, synthetic construct
  source 1..10: note = Seed: VNDIQKLVGK; note = HLAs: A3601
VFDIQKLVGR

SEQ ID NO: 2486 - protein, 10 aa, synthetic construct
  source 1..10: note = Seed: VNDIQKLVGK; note = HLAs: A3601 C0303 C1602 C1646
VFDIQKLVGK

SEQ ID NO: 2487 - protein, 10 aa, synthetic construct
  source 1..10: note = Seed: VNDIQKLVGK; note = HLAs: A3601
VFDIQKLVGY

SEQ ID NO: 2488 - protein, 10 aa, synthetic construct
  source 1..10: note = Seed: VNDIQKLVGK; note = HLAs: A3601
VPDIQKLVGY

SEQ ID NO: 2489 - protein, 10 aa, synthetic construct
  source 1..10: note = Seed: VNDIQKLVGK; note = HLAs: A3601 C0303 C1602 C1646
VSDIQKLVGR

SEQ ID NO: 2490 - protein, 10 aa, synthetic construct
  source 1..10: note = Seed: VNDIQKLVGK; note = HLAs: A3601
VSDIQKLVGH

SEQ ID NO: 2491 - protein, 10 aa, synthetic construct
  source 1..10: note = Seed: VNDIQKLVGK; note = HLAs: C1602 C1646
VSDIQKLVGL

SEQ ID NO: 2492 - protein, 10 aa, synthetic construct
  source 1..10: note = Seed: VNDIQKLVGK; note = HLAs: A3601 C0303 C1602 C1646
VSDIQKLVGK

SEQ ID NO: 2493 - protein, 10 aa, synthetic construct
  source 1..10: note = Seed: VNDIQKLVGK; note = HLAs: A3601 C1602 C1646
VSDIQKLVGM

SEQ ID NO: 2494 - protein, 10 aa, synthetic construct
  source 1..10: note = Seed: VNDIQKLVGK; note = HLAs: A3601 C1602 C1646
VSDIQKLVGF

SEQ ID NO: 2495 - protein, 10 aa, synthetic construct
  source 1..10: note = Seed: VNDIQKLVGK; note = HLAs: A3601
VSDIQKLVGW

SEQ ID NO: 2496 - protein, 10 aa, synthetic construct
  source 1..10: note = Seed: VNDIQKLVGK; note = HLAs: A3601 C1602 C1646
VSDIQKLVGY

SEQ ID NO: 2497 - protein, 10 aa, synthetic construct
  source 1..10: note = Seed: VNDIQKLVGK; note = HLAs: A3601 C0303 C1602 C1646
VTDIQKLVGR

SEQ ID NO: 2498 - protein, 10 aa, synthetic construct
  source 1..10: note = Seed: VNDIQKLVGK; note = HLAs: A3601
VTDIQKLVGQ

SEQ ID NO: 2499 - protein, 10 aa, synthetic construct
  source 1..10: note = Seed: VNDIQKLVGK; note = HLAs: A3601
VTDIQKLVGH

SEQ ID NO: 2500 - protein, 10 aa, synthetic construct
  source 1..10: note = Seed: VNDIQKLVGK; note = HLAs: A3601 C1602 C1646
VTDIQKLVGL

SEQ ID NO: 2501 - protein, 10 aa, synthetic construct
  source 1..10: note = Seed: VNDIQKLVGK; note = HLAs: A3601 C0303 C1602 C1646
VTDIQKLVGK

SEQ ID NO: 2502 - protein, 10 aa, synthetic construct
  source 1..10: note = Seed: VNDIQKLVGK; note = HLAs: A3601 C1602 C1646
VTDIQKLVGM

SEQ ID NO: 2503 - protein, 10 aa, synthetic construct
  source 1..10: note = Seed: VNDIQKLVGK; note = HLAs: A3601 C1602 C1646
VTDIQKLVGF

SEQ ID NO: 2504 - protein, 10 aa, synthetic construct
  source 1..10: note = Seed: VNDIQKLVGK; note = HLAs: A3601
VTDIQKLVGW

SEQ ID NO: 2505 - protein, 10 aa, synthetic construct
  source 1..10: note = Seed: VNDIQKLVGK; note = HLAs: A3601 C1602 C1646
VTDIQKLVGY

SEQ ID NO: 2506 - protein, 10 aa, synthetic construct
  source 1..10: note = Seed: VNDIQKLVGK; note = HLAs: A3601 C1602
VWDIQKLVGK

SEQ ID NO: 2507 - protein, 10 aa, synthetic construct
  source 1..10: note = Seed: VNDIQKLVGK; note = HLAs: A3601
VWDIQKLVGY

SEQ ID NO: 2508 - protein, 10 aa, synthetic construct
  source 1..10: note = Seed: VNDIQKLVGK; note = HLAs: A3601 C0303 C1602 C1646
VYDIQKLVGK

SEQ ID NO: 2509 - protein, 10 aa, synthetic construct
  source 1..10: note = Seed: VNDIQKLVGK; note = HLAs: A3601
VYDIQKLVGY

SEQ ID NO: 2510 - protein, 10 aa, synthetic construct
  source 1..10: note = Seed: VNDIQKLVGK; note = HLAs: A3601 C0303 C1602 C1646
VVDIQKLVGR

SEQ ID NO: 2511 - protein, 10 aa, synthetic construct
  source 1..10: note = Seed: VNDIQKLVGK; note = HLAs: A3601
VVDIQKLVGH

SEQ ID NO: 2512 - protein, 10 aa, synthetic construct
  source 1..10: note = Seed: VNDIQKLVGK; note = HLAs: A3601 C0303 C1602 C1646
VVDIQKLVGK

SEQ ID NO: 2513 - protein, 10 aa, synthetic construct
  source 1..10: note = Seed: VNDIQKLVGK; note = HLAs: A3601 C1602
VVDIQKLVGF

SEQ ID NO: 2514 - protein, 10 aa, synthetic construct
  source 1..10: note = Seed: VNDIQKLVGK; note = HLAs: A3601
VVDIQKLVGY

SEQ ID NO: 2515 - protein, 8 aa, synthetic construct
  source 1..8: note = Seed: VTDSQYAL; note = HLAs: A3601 C0303 C1602
VADSQYAR

SEQ ID NO: 2516 - protein, 8 aa, synthetic construct
  source 1..8: note = Seed: VTDSQYAL; note = HLAs: C0102 C0144 C0303 C0304 C0401 C0403 C0407 C0501 C0509 C0704 C0801 C0802 C0803 C0804 C0812 C1502 C1505 C1601 C1602 C16112 C1646 C17 C1701 C1702 C1703 C1704 C1705 C1706 C1707
VADSQYAI

SEQ ID NO: 2517 - protein, 8 aa, synthetic construct
  source 1..8: note = Seed: VTDSQYAL; note = HLAs: A3601 C0303 C1602 C1646
VADSQYAK

SEQ ID NO: 2518 - protein, 8 aa, synthetic construct
  source 1..8: note = Seed: VTDSQYAL; note = HLAs: C0303 C0304 C0401 C0403 C0407 C0501 C0509 C0704 C0801 C0802 C0803 C0804 C0812 C1504 C1505 C1509 C1601 C1602 C16112 C1646 C17 C1701 C1702 C1703 C1704 C1705 C1706 C1707
VADSQYAF

SEQ ID NO: 2519 - protein, 8 aa, synthetic construct
  source 1..8: note = Seed: VTDSQYAL; note = HLAs: C1646
VADSQYAW

SEQ ID NO: 2520 - protein, 8 aa, synthetic construct
  source 1..8: note = Seed: VTDSQYAL; note = HLAs: A3601 C0403 C0501 C0509 C1504 C1509 C1601 C1602 C16112 C1646
VADSQYAY

SEQ ID NO: 2521 - protein, 8 aa, synthetic construct
  source 1..8: note = Seed: VTDSQYAL; note = HLAs: C0401 C0403 C0407 C0501 C0509 C0801 C0802 C0803 C0804 C0812 C1502 C1505 C1602 C1646 C17 C1701 C1702 C1703 C1704 C1705 C1706
VADSQYAV

SEQ ID NO: 2522 - protein, 8 aa, synthetic construct
  source 1..8: note = Seed: VTDSQYAL; note = HLAs: C0704
VRDSQYAI

SEQ ID NO: 2523 - protein, 8 aa, synthetic construct
  source 1..8: note = Seed: VTDSQYAL; note = HLAs: C0704
VRDSQYAL

SEQ ID NO: 2524 - protein, 8 aa, synthetic construct
  source 1..8: note = Seed: VTDSQYAL; note = HLAs: C0704
VRDSQYAM

SEQ ID NO: 2525 - protein, 8 aa, synthetic construct
  source 1..8: note = Seed: VTDSQYAL; note = HLAs: C0704
VRDSQYAF

SEQ ID NO: 2526 - protein, 8 aa, synthetic construct
  source 1..8: note = Seed: VTDSQYAL; note = HLAs: C0403 C0501 C0509
VNDSQYAI

SEQ ID NO: 2527 - protein, 8 aa, synthetic construct
  source 1..8: note = Seed: VTDSQYAL; note = HLAs: C0401 C0403 C0407 C0501 C0509 C0704 C0801 C0802 C0803 C0812 C1505 C1701 C1702 C1703 C1704 C1705 C1801 C1802
VNDSQYAL

SEQ ID NO: 2528 - protein, 8 aa, synthetic construct
  source 1..8: note = Seed: VTDSQYAL; note = HLAs: A3601
VNDSQYAK

SEQ ID NO: 2529 - protein, 8 aa, synthetic construct
  source 1..8: note = Seed: VTDSQYAL; note = HLAs: C0403 C0501 C0509 C0704 C0802
VNDSQYAM

SEQ ID NO: 2530 - protein, 8 aa, synthetic construct
  source 1..8: note = Seed: VTDSQYAL; note = HLAs: C0403 C0501 C0509
VNDSQYAF

SEQ ID NO: 2531 - protein, 8 aa, synthetic construct
  source 1..8: note = Seed: VTDSQYAL; note = HLAs: A3601
VNDSQYAY

SEQ ID NO: 2532 - protein, 8 aa, synthetic construct
  source 1..8: note = Seed: VTDSQYAL; note = HLAs: C0501 C0509
VNDSQYAV

SEQ ID NO: 2533 - protein, 8 aa, synthetic construct
  source 1..8: note = Seed: VTDSQYAL; note = HLAs: C0401 C0403 C0407 C0501 C0509 C0704 C0802
VDDSQYAL

SEQ ID NO: 2534 - protein, 8 aa, synthetic construct
  source 1..8: note = Seed: VTDSQYAL; note = HLAs: A3601
VDDSQYAK

SEQ ID NO: 2535 - protein, 8 aa, synthetic construct
  source 1..8: note = Seed: VTDSQYAL; note = HLAs: C0501 C0509
VDDSQYAM

SEQ ID NO: 2536 - protein, 8 aa, synthetic construct
  source 1..8: note = Seed: VTDSQYAL; note = HLAs: A3601
VDDSQYAY

SEQ ID NO: 2537 - protein, 8 aa, synthetic construct
  source 1..8: note = Seed: VTDSQYAL; note = HLAs: C0403 C0501 C0509
VCDSQYAI

SEQ ID NO: 2538 - protein, 8 aa, synthetic construct
  source 1..8: note = Seed: VTDSQYAL; note = HLAs: C0401 C0403 C0407 C0501 C0509 C0704 C0801 C0802 C0803 C0812
VCDSQYAL

SEQ ID NO: 2539 - protein, 8 aa, synthetic construct
  source 1..8: note = Seed: VTDSQYAL; note = HLAs: C0403 C0501 C0509 C0802
VCDSQYAM

SEQ ID NO: 2540 - protein, 8 aa, synthetic construct
  source 1..8: note = Seed: VTDSQYAL; note = HLAs: C0403 C0501 C0509
VCDSQYAF

SEQ ID NO: 2541 - protein, 8 aa, synthetic construct
  source 1..8: note = Seed: VTDSQYAL; note = HLAs: A3601
VCDSQYAY

SEQ ID NO: 2542 - protein, 8 aa, synthetic construct
  source 1..8: note = Seed: VTDSQYAL; note = HLAs: C0403 C0501 C0509
VCDSQYAV

SEQ ID NO: 2543 - protein, 8 aa, synthetic construct
  source 1..8: note = Seed: VTDSQYAL; note = HLAs: C0403 C0501 C0509 C0704 C0802
VQDSQYAI

SEQ ID NO: 2544 - protein, 8 aa, synthetic construct
  source 1..8: note = Seed: VTDSQYAL; note = HLAs: C0401 C0403 C0407 C0501 C0509 C0704 C0801 C0802 C0803 C0804 C17 C1701 C1702 C1703 C1704 C1705 C1706 C1801 C1802
VQDSQYAL

SEQ ID NO: 2545 - protein, 8 aa, synthetic construct
  source 1..8: note = Seed: VTDSQYAL; note = HLAs: A3601
VQDSQYAK

SEQ ID NO: 2546 - protein, 8 aa, synthetic construct
  source 1..8: note = Seed: VTDSQYAL; note = HLAs: C0403 C0501 C0509 C0704 C0802
VQDSQYAM

SEQ ID NO: 2547 - protein, 8 aa, synthetic construct
  source 1..8: note = Seed: VTDSQYAL; note = HLAs: C0403 C0501 C0509 C0704
VQDSQYAF

SEQ ID NO: 2548 - protein, 8 aa, synthetic construct
  source 1..8: note = Seed: VTDSQYAL; note = HLAs: A3601
VQDSQYAY

SEQ ID NO: 2549 - protein, 8 aa, synthetic construct
  source 1..8: note = Seed: VTDSQYAL; note = HLAs: C0501 C0509
VQDSQYAV

SEQ ID NO: 2550 - protein, 8 aa, synthetic construct
  source 1..8: note = Seed: VTDSQYAL; note = HLAs: C0403 C0501 C0509 C0704
VEDSQYAL

SEQ ID NO: 2551 - protein, 8 aa, synthetic construct
  source 1..8: note = Seed: VTDSQYAL; note = HLAs: A3601
VEDSQYAY

SEQ ID NO: 2552 - protein, 8 aa, synthetic construct
  source 1..8: note = Seed: VTDSQYAL; note = HLAs: C0303
VGDSQYAR

SEQ ID NO: 2553 - protein, 8 aa, synthetic construct
  source 1..8: note = Seed: VTDSQYAL; note = HLAs: C0403 C0501 C0509 C0802
VGDSQYAI

SEQ ID NO: 2554 - protein, 8 aa, synthetic construct
  source 1..8: note = Seed: VTDSQYAL; note = HLAs: C0102 C0144 C0401 C0403 C0404 C0407 C0501 C0509 C0704 C0801 C0802 C0803 C0804 C0812 C1505 C1602 C1646 C17 C1701 C1702 C1703 C1704 C1705 C1706 C1801 C1802
VGDSQYAL

SEQ ID NO: 2555 - protein, 8 aa, synthetic construct
  source 1..8: note = Seed: VTDSQYAL; note = HLAs: A3601 C0303 C1602
VGDSQYAK

SEQ ID NO: 2556 - protein, 8 aa, synthetic construct
  source 1..8: note = Seed: VTDSQYAL; note = HLAs: C0401 C0403 C0407 C0501 C0509 C0704 C0801 C0802 C0803
VGDSQYAM

SEQ ID NO: 2557 - protein, 8 aa, synthetic construct
  source 1..8: note = Seed: VTDSQYAL; note = HLAs: C0401 C0403 C0407 C0501 C0509 C0802
VGDSQYAF

SEQ ID NO: 2558 - protein, 8 aa, synthetic construct
  source 1..8: note = Seed: VTDSQYAL; note = HLAs: A3601
VGDSQYAY

SEQ ID NO: 2559 - protein, 8 aa, synthetic construct
  source 1..8: note = Seed: VTDSQYAL; note = HLAs: C0403 C0501 C0509 C0802
VGDSQYAV

SEQ ID NO: 2560 - protein, 8 aa, synthetic construct
  source 1..8: note = Seed: VTDSQYAL; note = HLAs: C0704
VHDSQYAI

SEQ ID NO: 2561 - protein, 8 aa, synthetic construct
  source 1..8: note = Seed: VTDSQYAL; note = HLAs: C0401 C0404 C0407 C0704 C1801 C1802
VHDSQYAL

SEQ ID NO: 2562 - protein, 8 aa, synthetic construct
  source 1..8: note = Seed: VTDSQYAL; note = HLAs: C0704
VHDSQYAM

SEQ ID NO: 2563 - protein, 8 aa, synthetic construct
  source 1..8: note = Seed: VTDSQYAL; note = HLAs: C0704
VHDSQYAF

SEQ ID NO: 2564 - protein, 8 aa, synthetic construct
  source 1..8: note = Seed: VTDSQYAL; note = HLAs: A3601 C0303
VIDSQYAR

SEQ ID NO: 2565 - protein, 8 aa, synthetic construct
  source 1..8: note = Seed: VTDSQYAL; note = HLAs: C0401 C0403 C0407 C0501 C0509 C0802
VIDSQYAI

SEQ ID NO: 2566 - protein, 8 aa, synthetic construct
  source 1..8: note = Seed: VTDSQYAL; note = HLAs: C0102 C0144 C0304 C0401 C0403 C0404 C0407 C0501 C0509 C0704 C0801 C0802 C0803 C0804 C0812 C1505 C1602 C1646 C17 C1701 C1702 C1703 C1704 C1705 C1706 C1707 C1801 C1802
VIDSQYAL

SEQ ID NO: 2567 - protein, 8 aa, synthetic construct
  source 1..8: note = Seed: VTDSQYAL; note = HLAs: A3601 C0303 C1602
VIDSQYAK

SEQ ID NO: 2568 - protein, 8 aa, synthetic construct
  source 1..8: note = Seed: VTDSQYAL; note = HLAs: C0401 C0403 C0407 C0501 C0509 C0801 C0802 C0803 C0812 C1701 C1702 C1703 C1704 C1705
VIDSQYAM

SEQ ID NO: 2569 - protein, 8 aa, synthetic construct
  source 1..8: note = Seed: VTDSQYAL; note = HLAs: C0401 C0403 C0407 C0501 C0509 C0802 C1602 C1646
VIDSQYAF

SEQ ID NO: 2570 - protein, 8 aa, synthetic construct
  source 1..8: note = Seed: VTDSQYAL; note = HLAs: A3601 C1602
VIDSQYAY

SEQ ID NO: 2571 - protein, 8 aa, synthetic construct
  source 1..8: note = Seed: VTDSQYAL; note = HLAs: C0403 C0501 C0509 C0802
VIDSQYAV

SEQ ID NO: 2572 - protein, 8 aa, synthetic construct
  source 1..8: note = Seed: VTDSQYAL; note = HLAs: A3601
VLDSQYAR

SEQ ID NO: 2573 - protein, 8 aa, synthetic construct
  source 1..8: note = Seed: VTDSQYAL; note = HLAs: C0401 C0403 C0407 C0501 C0509 C0802
VLDSQYAI

SEQ ID NO: 2574 - protein, 8 aa, synthetic construct
  source 1..8: note = Seed: VTDSQYAL; note = HLAs: C0401 C0403 C0404 C0407 C0501 C0509 C0704 C0801 C0802 C0803 C0804 C0812 C17 C1701 C1702 C1703 C1704 C1705 C1706 C1801 C1802
VLDSQYAL

SEQ ID NO: 2575 - protein, 8 aa, synthetic construct
  source 1..8: note = Seed: VTDSQYAL; note = HLAs: A3601 C0303
VLDSQYAK

SEQ ID NO: 2576 - protein, 8 aa, synthetic construct
  source 1..8: note = Seed: VTDSQYAL; note = HLAs: C0401 C0403 C0407 C0501 C0509 C0802
VLDSQYAM

SEQ ID NO: 2577 - protein, 8 aa, synthetic construct
  source 1..8: note = Seed: VTDSQYAL; note = HLAs: C0401 C0403 C0407 C0501 C0509
VLDSQYAF

SEQ ID NO: 2578 - protein, 8 aa, synthetic construct
  source 1..8: note = Seed: VTDSQYAL; note = HLAs: A3601
VLDSQYAY

SEQ ID NO: 2579 - protein, 8 aa, synthetic construct
  source 1..8: note = Seed: VTDSQYAL; note = HLAs: C0403 C0501 C0509
VLDSQYAV

SEQ ID NO: 2580 - protein, 8 aa, synthetic construct
  source 1..8: note = Seed: VTDSQYAL; note = HLAs: C0704
VKDSQYAL

SEQ ID NO: 2581 - protein, 8 aa, synthetic construct
  source 1..8: note = Seed: VTDSQYAL; note = HLAs: A3601
VMDSQYAR

SEQ ID NO: 2582 - protein, 8 aa, synthetic construct
  source 1..8: note = Seed: VTDSQYAL; note = HLAs: C0401 C0403 C0407 C0501 C0509
VMDSQYAI

SEQ ID NO: 2583 - protein, 8 aa, synthetic construct
  source 1..8: note = Seed: VTDSQYAL; note = HLAs: C0401 C0403 C0404 C0407 C0501 C0509 C0704 C0801 C0802 C0803 C0804 C0812 C17 C1701 C1702 C1703 C1704 C1705 C1706 C1801 C1802
VMDSQYAL

SEQ ID NO: 2584 - protein, 8 aa, synthetic construct
  source 1..8: note = Seed: VTDSQYAL; note = HLAs: A3601
VMDSQYAK

SEQ ID NO: 2585 - protein, 8 aa, synthetic construct
  source 1..8: note = Seed: VTDSQYAL; note = HLAs: C0401 C0403 C0407 C0501 C0509 C0802
VMDSQYAM

SEQ ID NO: 2586 - protein, 8 aa, synthetic construct
  source 1..8: note = Seed: VTDSQYAL; note = HLAs: C0401 C0403 C0407 C0501 C0509
VMDSQYAF

SEQ ID NO: 2587 - protein, 8 aa, synthetic construct
  source 1..8: note = Seed: VTDSQYAL; note = HLAs: A3601
VMDSQYAY

SEQ ID NO: 2588 - protein, 8 aa, synthetic construct
  source 1..8: note = Seed: VTDSQYAL; note = HLAs: C0403 C0501 C0509
VMDSQYAV

SEQ ID NO: 2589 - protein, 8 aa, synthetic construct
  source 1..8: note = Seed: VTDSQYAL; note = HLAs: C0401 C0403 C0404 C0407 C0501 C0509 C0704 C0802 C1801 C1802
VFDSQYAI

SEQ ID NO: 2590 - protein, 8 aa, synthetic construct
  source 1..8: note = Seed: VTDSQYAL; note = HLAs: A3601 C0401 C0404 C0407 C1601 C1602 C16112 C1646
VFDSQYAY

SEQ ID NO: 2591 - protein, 8 aa, synthetic construct
  source 1..8: note = Seed: VTDSQYAL; note = HLAs: C0401 C0403 C0404 C0407 C0501 C0509 C0704 C1801 C1802
VFDSQYAV

SEQ ID NO: 2592 - protein, 8 aa, synthetic construct
  source 1..8: note = Seed: VTDSQYAL; note = HLAs: C0401 C0403 C0407 C0501 C0509 C0704 C0801 C0802 C0803
VPDSQYAL

SEQ ID NO: 2593 - protein, 8 aa, synthetic construct
  source 1..8: note = Seed: VTDSQYAL; note = HLAs: A3601
VSDSQYAR

SEQ ID NO: 2594 - protein, 8 aa, synthetic construct
  source 1..8: note = Seed: VTDSQYAL; note = HLAs: A3601
VSDSQYAH

SEQ ID NO: 2595 - protein, 8 aa, synthetic construct
  source 1..8: note = Seed: VTDSQYAL; note = HLAs: C0401 C0403 C0407 C0501 C0509 C0704 C0801 C0802 C0803 C0804 C0812 C1502 C1505 C1602 C1646 C17 C1701 C1702 C1703 C1704 C1705 C1706
VSDSQYAI

SEQ ID NO: 2596 - protein, 8 aa, synthetic construct
  source 1..8: note = Seed: VTDSQYAL; note = HLAs: A3601 C1602
VSDSQYAK

SEQ ID NO: 2597 - protein, 8 aa, synthetic construct
  source 1..8: note = Seed: VTDSQYAL; note = HLAs: C0304 C0401 C0403 C0407 C0501 C0509 C0704 C0801 C0802 C0803 C0804 C0812 C1502 C1504 C1505 C1509 C1601 C1602 C16112 C1646 C17 C1701 C1702 C1703 C1704 C1705 C1706
VSDSQYAM

SEQ ID NO: 2598 - protein, 8 aa, synthetic construct
  source 1..8: note = Seed: VTDSQYAL; note = HLAs: A3601 C0401 C0403 C0407 C0501 C0509 C0704 C0801 C0802 C0803 C0804 C0812 C1504 C1505 C1509 C1601 C1602 C16112 C1646 C17 C1701 C1702 C1703 C1704 C1705 C1706
VSDSQYAF

SEQ ID NO: 2599 - protein, 8 aa, synthetic construct
  source 1..8: note = Seed: VTDSQYAL; note = HLAs: A3601 C0403 C0501 C0509 C1504 C1509 C1601 C1602 C16112 C1646
VSDSQYAY

SEQ ID NO: 2600 - protein, 8 aa, synthetic construct
  source 1..8: note = Seed: VTDSQYAL; note = HLAs: C0403 C0501 C0509 C0801 C0802 C0803 C0812 C1502 C1505 C1602 C1646
VSDSQYAV

SEQ ID NO: 2601 - protein, 8 aa, synthetic construct
  source 1..8: note = Seed: VTDSQYAL; note = HLAs: A3601
VTDSQYAR

SEQ ID NO: 2602 - protein, 8 aa, synthetic construct
  source 1..8: note = Seed: VTDSQYAL; note = HLAs: A3601
VTDSQYAH

SEQ ID NO: 2603 - protein, 8 aa, synthetic construct
  source 1..8: note = Seed: VTDSQYAL; note = HLAs: C0401 C0403 C0407 C0501 C0509 C0801 C0802 C0803 C0812 C1502 C1505 C1602 C1646 C1701 C1702 C1703 C1704 C1705
VTDSQYAI

SEQ ID NO: 2604 - protein, 8 aa, synthetic construct
  source 1..8: note = Seed: VTDSQYAL; note = HLAs: A3601
VTDSQYAK

SEQ ID NO: 2605 - protein, 8 aa, synthetic construct
  source 1..8: note = Seed: VTDSQYAL; note = HLAs: A3601 C0401 C0403 C0407 C0501 C0509 C0704 C0801 C0802 C0803 C0804 C0812 C1502 C1504 C1505 C1509 C1601 C1602 C16112 C1646 C17 C1701 C1702 C1703 C1704 C1705
VTDSQYAM

SEQ ID NO: 2606 - protein, 8 aa, synthetic construct
  source 1..8: note = Seed: VTDSQYAL; note = HLAs: A3601 C0401 C0403 C0407 C0501 C0509 C0801 C0802 C0803 C1504 C1505 C1509 C1601 C1602 C16112 C1646
VTDSQYAF

SEQ ID NO: 2607 - protein, 8 aa, synthetic construct
  source 1..8: note = Seed: VTDSQYAL; note = HLAs: A3601
VTDSQYAW

SEQ ID NO: 2608 - protein, 8 aa, synthetic construct
  source 1..8: note = Seed: VTDSQYAL; note = HLAs: A3601 C1504 C1509 C1601 C1602 C16112 C1646
VTDSQYAY

SEQ ID NO: 2609 - protein, 8 aa, synthetic construct
  source 1..8: note = Seed: VTDSQYAL; note = HLAs: C0403 C0501 C0509 C0801 C0802 C0803 C1502 C1505
VTDSQYAV

SEQ ID NO: 2610 - protein, 8 aa, synthetic construct
  source 1..8: note = Seed: VTDSQYAL; note = HLAs: C0401 C0404 C0407 C1801 C1802
VWDSQYAI

SEQ ID NO: 2611 - protein, 8 aa, synthetic construct
  source 1..8: note = Seed: VTDSQYAL; note = HLAs: C0401 C0403 C0404 C0407 C0704 C1801 C1802
VWDSQYAM

SEQ ID NO: 2612 - protein, 8 aa, synthetic construct
  source 1..8: note = Seed: VTDSQYAL; note = HLAs: C0401 C0404 C0407 C0704 C1801 C1802
VWDSQYAF

SEQ ID NO: 2613 - protein, 8 aa, synthetic construct
  source 1..8: note = Seed: VTDSQYAL; note = HLAs: C0401 C0404 C0407
VWDSQYAV

SEQ ID NO: 2614 - protein, 8 aa, synthetic construct
  source 1..8: note = Seed: VTDSQYAL; note = HLAs: C0401 C0404 C0407 C0704 C1801 C1802
VYDSQYAI

SEQ ID NO: 2615 - protein, 8 aa, synthetic construct
  source 1..8: note = Seed: VTDSQYAL; note = HLAs: C0401 C0404 C0407 C0704 C1801 C1802
VYDSQYAM

SEQ ID NO: 2616 - protein, 8 aa, synthetic construct
  source 1..8: note = Seed: VTDSQYAL; note = HLAs: C0401 C0404 C0407 C0704 C1601 C1602 C16112 C1646 C1801 C1802
VYDSQYAF

SEQ ID NO: 2617 - protein, 8 aa, synthetic construct
  source 1..8: note = Seed: VTDSQYAL; note = HLAs: C0401 C0404 C0407 C1601 C1602 C16112 C1646
VYDSQYAY

SEQ ID NO: 2618 - protein, 8 aa, synthetic construct
  source 1..8: note = Seed: VTDSQYAL; note = HLAs: C0401 C0404 C0407 C0704 C1801 C1802
VYDSQYAV

SEQ ID NO: 2619 - protein, 8 aa, synthetic construct
  source 1..8: note = Seed: VTDSQYAL; note = HLAs: A3601 C0303
VVDSQYAR

SEQ ID NO: 2620 - protein, 8 aa, synthetic construct
  source 1..8: note = Seed: VTDSQYAL; note = HLAs: C0403 C0501 C0509 C0801 C0802 C0803 C0812 C1505
VVDSQYAI

SEQ ID NO: 2621 - protein, 8 aa, synthetic construct
  source 1..8: note = Seed: VTDSQYAL; note = HLAs: C0102 C0144 C0303 C0304 C0305 C0401 C0403 C0404 C0407 C0501 C0509 C0704 C0801 C0802 C0803 C0804 C0812 C1502 C1505 C1601 C1602 C16112 C1646 C17 C1701 C1702 C1703 C1704 C1705 C1706 C1707
VVDSQYAL

SEQ ID NO: 2622 - protein, 8 aa, synthetic construct
  source 1..8: note = Seed: VTDSQYAL; note = HLAs: A3601 C0303 C1602
VVDSQYAK

SEQ ID NO: 2623 - protein, 8 aa, synthetic construct
  source 1..8: note = Seed: VTDSQYAL; note = HLAs: C0403 C0501 C0509 C0801 C0802 C0803 C0812 C1602 C1646
VVDSQYAM

SEQ ID NO: 2624 - protein, 8 aa, synthetic construct
  source 1..8: note = Seed: VTDSQYAL; note = HLAs: C0403 C0501 C0509 C0801 C0802 C0803 C1602 C1646
VVDSQYAF

SEQ ID NO: 2625 - protein, 8 aa, synthetic construct
  source 1..8: note = Seed: VTDSQYAL; note = HLAs: A3601 C1602 C1646
VVDSQYAY

SEQ ID NO: 2626 - protein, 8 aa, synthetic construct
  source 1..8: note = Seed: VTDSQYAL; note = HLAs: C0403 C0501 C0509 C0802
VVDSQYAV

SEQ ID NO: 2627 - protein, 8 aa, synthetic construct
  source 1..8: note = Seed: WQLDCTHL; note = HLAs: B5201
WQLDCTHI

SEQ ID NO: 2628 - protein, 8 aa, synthetic construct
  source 1..8: note = Seed: WQLDCTHL; note = HLAs: B5201
WQLDCTHV

SEQ ID NO: 2629 - protein, 8 aa, synthetic construct
  source 1..8: note = Seed: WTVNDIQK; note = HLAs: C0303
WAVNDIQR

SEQ ID NO: 2630 - protein, 8 aa, synthetic construct
  source 1..8: note = Seed: WTVNDIQK; note = HLAs: C0303
WAVNDIQK

SEQ ID NO: 2631 - protein, 8 aa, synthetic construct
  source 1..8: note = Seed: WTVNDIQK; note = HLAs: C0303
WNVNDIQK

SEQ ID NO: 2632 - protein, 8 aa, synthetic construct
  source 1..8: note = Seed: WTVNDIQK; note = HLAs: C0303
WQVNDIQK

SEQ ID NO: 2633 - protein, 8 aa, synthetic construct
  source 1..8: note = Seed: WTVNDIQK; note = HLAs: C0303
WGVNDIQR

SEQ ID NO: 2634 - protein, 8 aa, synthetic construct
  source 1..8: note = Seed: WTVNDIQK; note = HLAs: C0303
WGVNDIQK

SEQ ID NO: 2635 - protein, 8 aa, synthetic construct
  source 1..8: note = Seed: WTVNDIQK; note = HLAs: C0303
WIVNDIQR

SEQ ID NO: 2636 - protein, 8 aa, synthetic construct
  source 1..8: note = Seed: WTVNDIQK; note = HLAs: C0303
WIVNDIQK

SEQ ID NO: 2637 - protein, 8 aa, synthetic construct
  source 1..8: note = Seed: WTVNDIQK; note = HLAs: C0303
WLVNDIQK

SEQ ID NO: 2638 - protein, 8 aa, synthetic construct
  source 1..8: note = Seed: WTVNDIQK; note = HLAs: C0303
WSVNDIQK

SEQ ID NO: 2639 - protein, 8 aa, synthetic construct
  source 1..8: note = Seed: WTVNDIQK; note = HLAs: A3601
WTVNDIQY

SEQ ID NO: 2640 - protein, 8 aa, synthetic construct
  source 1..8: note = Seed: WTVNDIQK; note = HLAs: C0303
WVVNDIQR

SEQ ID NO: 2641 - protein, 8 aa, synthetic construct
  source 1..8: note = Seed: WTVNDIQK; note = HLAs: C0303
WVVNDIQK

SEQ ID NO: 2642 - protein, 9 aa, synthetic construct
  source 1..9: note = Seed: WTVNDIQKL; note = HLAs: A0205 A6802 A6827
WAVNDIQKA

SEQ ID NO: 2643 - protein, 9 aa, synthetic construct
  source 1..9: note = Seed: WTVNDIQKL; note = HLAs: A6603 C0303 C1202 C1602 C1646
WAVNDIQKR

SEQ ID NO: 2644 - protein, 9 aa, synthetic construct
  source 1..9: note = Seed: WTVNDIQKL; note = HLAs: C0202 C0210 C0229 C1202
WAVNDIQKH

SEQ ID NO: 2645 - protein, 9 aa, synthetic construct
  source 1..9: note = Seed: WTVNDIQKL; note = HLAs: A0205 A0206 A6802 A6827 B1301 B5802 C0202 C0210 C0217 C0229 C0302 C0303 C0304 C0317 C0801 C0803 C0804 C1202 C1203 C1502 C1504 C1505 C1509 C1601 C1602 C1604 C16112 C1646 C17 C1701 C1702 C1703 C1704 C1705 C1706 C1707
WAVNDIQKI

SEQ ID NO: 2646 - protein, 9 aa, synthetic construct
  source 1..9: note = Seed: WTVNDIQKL; note = HLAs: A6603 C0202 C0210 C0229 C0303 C1202 C1602 C1646
WAVNDIQKK

SEQ ID NO: 2647 - protein, 9 aa, synthetic construct
  source 1..9: note = Seed: WTVNDIQKL; note = HLAs: A2501 B1301 B1517 B5702 B5703 B5802 C0202 C0210 C0229 C1202 C1601 C1602 C1604 C16112 C1646
WAVNDIQKW

SEQ ID NO: 2648 - protein, 9 aa, synthetic construct
  source 1..9: note = Seed: WTVNDIQKL; note = HLAs: A2501 A6603 B1517 B5703 B5802 C0202 C0210 C0217 C0229 C0302 C0303 C1202 C1203 C1504 C1509 C1601 C1602 C1604 C16112 C1646
WAVNDIQKY

SEQ ID NO: 2649 - protein, 9 aa, synthetic construct
  source 1..9: note = Seed: WTVNDIQKL; note = HLAs: A0202 A0204 A0205 A0206 A0207 A0214 A6802 A6827 C0202 C0210 C0217 C0229 C0303 C0304 C0317 C0801 C0803 C0804 C1202 C1203 C1502 C1504 C1505 C1509 C1601 C1602 C1604 C16112 C1646 C17 C1701 C1702 C1703 C1704 C1705 C1706 C1707
WAVNDIQKV

SEQ ID NO: 2650 - protein, 9 aa, synthetic construct
  source 1..9: note = Seed: WTVNDIQKL; note = HLAs: A6603 C0303 C1602
WNVNDIQKR

SEQ ID NO: 2651 - protein, 9 aa, synthetic construct
  source 1..9: note = Seed: WTVNDIQKL; note = HLAs: B1301 C1505
WNVNDIQKL

SEQ ID NO: 2652 - protein, 9 aa, synthetic construct
  source 1..9: note = Seed: WTVNDIQKL; note = HLAs: C0303 C1202 C1602 C1646
WNVNDIQKK

SEQ ID NO: 2653 - protein, 9 aa, synthetic construct
  source 1..9: note = Seed: WTVNDIQKL; note = HLAs: B1301 B5703
WNVNDIQKF

SEQ ID NO: 2654 - protein, 9 aa, synthetic construct
  source 1..9: note = Seed: WTVNDIQKL; note = HLAs: B1301 B5702 B5703 B5802
WNVNDIQKW

SEQ ID NO: 2655 - protein, 9 aa, synthetic construct
  source 1..9: note = Seed: WTVNDIQKL; note = HLAs: C0202 C0210 C0229 C1202
WNVNDIQKY

SEQ ID NO: 2656 - protein, 9 aa, synthetic construct
  source 1..9: note = Seed: WTVNDIQKL; note = HLAs: A0205
WNVNDIQKV

SEQ ID NO: 2657 - protein, 9 aa, synthetic construct
  source 1..9: note = Seed: WTVNDIQKL; note = HLAs: C0303
WDVNDIQKR

SEQ ID NO: 2658 - protein, 9 aa, synthetic construct
  source 1..9: note = Seed: WTVNDIQKL; note = HLAs: C0303 C1202 C1602 C1646
WDVNDIQKK

SEQ ID NO: 2659 - protein, 9 aa, synthetic construct
  source 1..9: note = Seed: WTVNDIQKL; note = HLAs: B5702 B5703 B5802
WDVNDIQKW

SEQ ID NO: 2660 - protein, 9 aa, synthetic construct
  source 1..9: note = Seed: WTVNDIQKL; note = HLAs: C0303
WCVNDIQKK

SEQ ID NO: 2661 - protein, 9 aa, synthetic construct
  source 1..9: note = Seed: WTVNDIQKL; note = HLAs: B5702 B5703
WCVNDIQKF

SEQ ID NO: 2662 - protein, 9 aa, synthetic construct
  source 1..9: note = Seed: WTVNDIQKL; note = HLAs: B5702 B5703 B5802
WCVNDIQKW

SEQ ID NO: 2663 - protein, 9 aa, synthetic construct
  source 1..9: note = Seed: WTVNDIQKL; note = HLAs: A0202 A0205 A0206 A0214
WQVNDIQKA

SEQ ID NO: 2664 - protein, 9 aa, synthetic construct
  source 1..9: note = Seed: WTVNDIQKL; note = HLAs: A6603 C0303 C1602 C1646
WQVNDIQKR

SEQ ID NO: 2665 - protein, 9 aa, synthetic construct
  source 1..9: note = Seed: WTVNDIQKL; note = HLAs: C0202 C0210 C0229 C0303 C1202 C1602 C1646
WQVNDIQKK

SEQ ID NO: 2666 - protein, 9 aa, synthetic construct
  source 1..9: note = Seed: WTVNDIQKL; note = HLAs: A0202 A0204 A0205 A0206 A0214 B1301 C0202 C0210 C0229 C1202
WQVNDIQKM

SEQ ID NO: 2667 - protein, 9 aa, synthetic construct
  source 1..9: note = Seed: WTVNDIQKL; note = HLAs: B1301 C0202 C0210 C0229 C1202 C1203 C1604
WQVNDIQKF

SEQ ID NO: 2668 - protein, 9 aa, synthetic construct
  source 1..9: note = Seed: WTVNDIQKL; note = HLAs: A0205
WQVNDIQKT

SEQ ID NO: 2669 - protein, 9 aa, synthetic construct
  source 1..9: note = Seed: WTVNDIQKL; note = HLAs: B1301 B5702 B5703 B5802
WQVNDIQKW

SEQ ID NO: 2670 - protein, 9 aa, synthetic construct
  source 1..9: note = Seed: WTVNDIQKL; note = HLAs: B1301 C0202 C0210 C0229 C1202 C1203 C1504 C1509 C1602 C1604 C1646
WQVNDIQKY

SEQ ID NO: 2671 - protein, 9 aa, synthetic construct
  source 1..9: note = Seed: WTVNDIQKL; note = HLAs: C0303
WEVNDIQKR

SEQ ID NO: 2672 - protein, 9 aa, synthetic construct
  source 1..9: note = Seed: WTVNDIQKL; note = HLAs: B1301
WEVNDIQKI

SEQ ID NO: 2673 - protein, 9 aa, synthetic construct
  source 1..9: note = Seed: WTVNDIQKL; note = HLAs: B1301
WEVNDIQKL

SEQ ID NO: 2674 - protein, 9 aa, synthetic construct
  source 1..9: note = Seed: WTVNDIQKL; note = HLAs: C0303 C1202 C1602 C1646
WEVNDIQKK

SEQ ID NO: 2675 - protein, 9 aa, synthetic construct
  source 1..9: note = Seed: WTVNDIQKL; note = HLAs: B1301 C1202
WEVNDIQKF

SEQ ID NO: 2676 - protein, 9 aa, synthetic construct
  source 1..9: note = Seed: WTVNDIQKL; note = HLAs: B1301 B5703 B5802
WEVNDIQKW

SEQ ID NO: 2677 - protein, 9 aa, synthetic construct
  source 1..9: note = Seed: WTVNDIQKL; note = HLAs: C1202
WEVNDIQKY

SEQ ID NO: 2678 - protein, 9 aa, synthetic construct
  source 1..9: note = Seed: WTVNDIQKL; note = HLAs: A6603 C0303 C1602 C1646
WGVNDIQKR

SEQ ID NO: 2679 - protein, 9 aa, synthetic construct
  source 1..9: note = Seed: WTVNDIQKL; note = HLAs: C0801 C0803 C1505 C1602 C1646 C17 C1701 C1702 C1703 C1704 C1705 C1706
WGVNDIQKL

SEQ ID NO: 2680 - protein, 9 aa, synthetic construct
  source 1..9: note = Seed: WTVNDIQKL; note = HLAs: C0202 C0210 C0229 C0303 C1202 C1602 C1646
WGVNDIQKK

SEQ ID NO: 2681 - protein, 9 aa, synthetic construct
  source 1..9: note = Seed: WTVNDIQKL; note = HLAs: C1602 C1646
WGVNDIQKM

SEQ ID NO: 2682 - protein, 9 aa, synthetic construct
  source 1..9: note = Seed: WTVNDIQKL; note = HLAs: B5702 B5703 B5802 C0202 C0210 C0229 C1202 C1601 C1602 C16112 C1646
WGVNDIQKF

SEQ ID NO: 2683 - protein, 9 aa, synthetic construct
  source 1..9: note = Seed: WTVNDIQKL; note = HLAs: B1301 B5702 B5703 B5802
WGVNDIQKW

SEQ ID NO: 2684 - protein, 9 aa, synthetic construct
  source 1..9: note = Seed: WTVNDIQKL; note = HLAs: C0202 C0210 C0229 C1202 C1203 C1504 C1509 C1601 C1602 C1604 C16112 C1646
WGVNDIQKY

SEQ ID NO: 2685 - protein, 9 aa, synthetic construct
  source 1..9: note = Seed: WTVNDIQKL; note = HLAs: C0303
WHVNDIQKK

SEQ ID NO: 2686 - protein, 9 aa, synthetic construct
  source 1..9: note = Seed: WTVNDIQKL; note = HLAs: A0202 A0204 A0205 A0206 A0214
WIVNDIQKA

SEQ ID NO: 2687 - protein, 9 aa, synthetic construct
  source 1..9: note = Seed: WTVNDIQKL; note = HLAs: A6603 C0303 C1602 C1646
WIVNDIQKR

SEQ ID NO: 2688 - protein, 9 aa, synthetic construct
  source 1..9: note = Seed: WTVNDIQKL; note = HLAs: A0202 A0204 A0205 A0206 A0207 A0214 A6802 A6827 B1301 C1701 C1702 C1703 C1704 C1705
WIVNDIQKI

SEQ ID NO: 2689 - protein, 9 aa, synthetic construct
  source 1..9: note = Seed: WTVNDIQKL; note = HLAs: A0202 A0204 A0205 A0206 A0207 A0214 A6802 A6827 B1301 C0202 C0210 C0229 C0303 C0304 C0801 C0803 C1202 C1502 C1505 C1602 C1646 C17 C1701 C1702 C1703 C1704 C1705 C1706 C1707
WIVNDIQKL

SEQ ID NO: 2690 - protein, 9 aa, synthetic construct
  source 1..9: note = Seed: WTVNDIQKL; note = HLAs: A6603 C0202 C0210 C0229 C0303 C1202 C1602 C1646
WIVNDIQKK

SEQ ID NO: 2691 - protein, 9 aa, synthetic construct
  source 1..9: note = Seed: WTVNDIQKL; note = HLAs: A0202 A0204 A0205 A0206 A0207 A0214 B1301 C0202 C0210 C0229 C0302 C0303 C0304 C0801 C0803 C1202 C1203 C1505 C1602 C1646 C17 C1701 C1702 C1703 C1704 C1705 C1706 C1707
WIVNDIQKM

SEQ ID NO: 2692 - protein, 9 aa, synthetic construct
  source 1..9: note = Seed: WTVNDIQKL; note = HLAs: A2501 B1301 B5702 B5703 C0202 C0210 C0229 C0302 C1202 C1203 C1504 C1509 C1601 C1602 C1604 C16112 C1646 C1701 C1702 C1703 C1704 C1705
WIVNDIQKF

SEQ ID NO: 2693 - protein, 9 aa, synthetic construct
  source 1..9: note = Seed: WTVNDIQKL; note = HLAs: A0205
WIVNDIQKT

SEQ ID NO: 2694 - protein, 9 aa, synthetic construct
  source 1..9: note = Seed: WTVNDIQKL; note = HLAs: A2501 B1301 B1517 B5702 B5703 B5802
WIVNDIQKW

SEQ ID NO: 2695 - protein, 9 aa, synthetic construct
  source 1..9: note = Seed: WTVNDIQKL; note = HLAs: A2501 A6603 C0202 C0210 C0229 C0302 C1202 C1203 C1504 C1509 C1601 C1602 C1604 C16112 C1646
WIVNDIQKY

SEQ ID NO: 2696 - protein, 9 aa, synthetic construct
  source 1..9: note = Seed: WTVNDIQKL; note = HLAs: A0202 A0204 A0205 A0206 A0207 A0214 A6802 A6827 B1301 C1505
WIVNDIQKV

SEQ ID NO: 2697 - protein, 9 aa, synthetic construct
  source 1..9: note = Seed: WTVNDIQKL; note = HLAs: A0202 A0204 A0205 A0206 A0207 A0214
WLVNDIQKA

SEQ ID NO: 2698 - protein, 9 aa, synthetic construct
  source 1..9: note = Seed: WTVNDIQKL; note = HLAs: A6603 C0303 C1602
WLVNDIQKR

SEQ ID NO: 2699 - protein, 9 aa, synthetic construct
  source 1..9: note = Seed: WTVNDIQKL; note = HLAs: A0202 A0204 A0205 A0206 A0207 A0214 B1301 C0801 C0803 C1505 C1602 C17 C1701 C1702 C1703 C1704 C1705 C1706 C1707
WLVNDIQKL

SEQ ID NO: 2700 - protein, 9 aa, synthetic construct
  source 1..9: note = Seed: WTVNDIQKL; note = HLAs: C0303 C1602 C1646
WLVNDIQKK

SEQ ID NO: 2701 - protein, 9 aa, synthetic construct
  source 1..9: note = Seed: WTVNDIQKL; note = HLAs: A0202 A0204 A0205 A0206 A0207 A0214 B1301 C0202 C0210 C0229 C0302 C17 C1701 C1702 C1703 C1704 C1705 C1706
WLVNDIQKM

SEQ ID NO: 2702 - protein, 9 aa, synthetic construct
  source 1..9: note = Seed: WTVNDIQKL; note = HLAs: A0204 A0207 B1301 B5703 C0202 C0210 C0229 C1202 C1602
WLVNDIQKF

SEQ ID NO: 2703 - protein, 9 aa, synthetic construct
  source 1..9: note = Seed: WTVNDIQKL; note = HLAs: A0202 A0204 A0205 A0206 A0214
WLVNDIQKT

SEQ ID NO: 2704 - protein, 9 aa, synthetic construct
  source 1..9: note = Seed: WTVNDIQKL; note = HLAs: A2501 B1301 B5702 B5703 B5802
WLVNDIQKW

SEQ ID NO: 2705 - protein, 9 aa, synthetic construct
  source 1..9: note = Seed: WTVNDIQKL; note = HLAs: C0202 C0210 C0229 C1202 C1504 C1509 C1602 C1604 C1646
WLVNDIQKY

SEQ ID NO: 2706 - protein, 9 aa, synthetic construct
  source 1..9: note = Seed: WTVNDIQKL; note = HLAs: A0202 A0204 A0205 A0206 A0207 A0214 A6802 A6827 B1301
WLVNDIQKV

SEQ ID NO: 2707 - protein, 9 aa, synthetic construct
  source 1..9: note = Seed: WTVNDIQKL; note = HLAs: A0202 A0204 A0205 A0206 A0207 A0214
WMVNDIQKA

SEQ ID NO: 2708 - protein, 9 aa, synthetic construct
  source 1..9: note = Seed: WTVNDIQKL; note = HLAs: A6603 C0303
WMVNDIQKR

SEQ ID NO: 2709 - protein, 9 aa, synthetic construct
  source 1..9: note = Seed: WTVNDIQKL; note = HLAs: A0202 A0204 A0205 A0206 A0207 A0214 B1301
WMVNDIQKI

SEQ ID NO: 2710 - protein, 9 aa, synthetic construct
  source 1..9: note = Seed: WTVNDIQKL; note = HLAs: C0303 C1602
WMVNDIQKK

SEQ ID NO: 2711 - protein, 9 aa, synthetic construct
  source 1..9: note = Seed: WTVNDIQKL; note = HLAs: A0202 A0204 A0205 A0206 A0207 A0214 B1301 C0202 C0210 C0229 C0302 C1701 C1702 C1703 C1704 C1705
WMVNDIQKM

SEQ ID NO: 2712 - protein, 9 aa, synthetic construct
  source 1..9: note = Seed: WTVNDIQKL; note = HLAs: A0204 B1301 B5702 B5703 C0202 C0210 C0229 C0302 C1202 C1601 C1602 C16112 C1646
WMVNDIQKF

SEQ ID NO: 2713 - protein, 9 aa, synthetic construct
  source 1..9: note = Seed: WTVNDIQKL; note = HLAs: A0202 A0204 A0205 A0206 A0214
WMVNDIQKT

SEQ ID NO: 2714 - protein, 9 aa, synthetic construct
  source 1..9: note = Seed: WTVNDIQKL; note = HLAs: A2501 B1301 B1517 B5702 B5703 B5802
WMVNDIQKW

SEQ ID NO: 2715 - protein, 9 aa, synthetic construct
  source 1..9: note = Seed: WTVNDIQKL; note = HLAs: B1301 C0202 C0210 C0229 C0302 C1202 C1203 C1504 C1509 C1601 C1602 C1604 C16112 C1646
WMVNDIQKY

SEQ ID NO: 2716 - protein, 9 aa, synthetic construct
  source 1..9: note = Seed: WTVNDIQKL; note = HLAs: C0303 C1602
WFVNDIQKK

SEQ ID NO: 2717 - protein, 9 aa, synthetic construct
  source 1..9: note = Seed: WTVNDIQKL; note = HLAs: C1601 C1602 C16112 C1646
WFVNDIQKF

SEQ ID NO: 2718 - protein, 9 aa, synthetic construct
  source 1..9: note = Seed: WTVNDIQKL; note = HLAs: B5702 B5703 B5802
WFVNDIQKW

SEQ ID NO: 2719 - protein, 9 aa, synthetic construct
  source 1..9: note = Seed: WTVNDIQKL; note = HLAs: C1601 C1602 C16112 C1646
WFVNDIQKY

SEQ ID NO: 2720 - protein, 9 aa, synthetic construct
  source 1..9: note = Seed: WTVNDIQKL; note = HLAs: C0303
WPVNDIQKK

SEQ ID NO: 2721 - protein, 9 aa, synthetic construct
  source 1..9: note = Seed: WTVNDIQKL; note = HLAs: B5702 B5703 B5802
WPVNDIQKW

SEQ ID NO: 2722 - protein, 9 aa, synthetic construct
  source 1..9: note = Seed: WTVNDIQKL; note = HLAs: A6603 C0303 C1602 C1646
WSVNDIQKR

SEQ ID NO: 2723 - protein, 9 aa, synthetic construct
  source 1..9: note = Seed: WTVNDIQKL; note = HLAs: C1202
WSVNDIQKH

SEQ ID NO: 2724 - protein, 9 aa, synthetic construct
  source 1..9: note = Seed: WTVNDIQKL; note = HLAs: A0205 A6802 A6827 B1301 B1517 B5702 B5703 B5802 C0202 C0210 C0229 C0801 C0803 C1203 C1502 C1505 C1602 C1646 C17 C1701 C1702 C1703 C1704 C1705 C1706
WSVNDIQKI

SEQ ID NO: 2725 - protein, 9 aa, synthetic construct
  source 1..9: note = Seed: WTVNDIQKL; note = HLAs: A0204 A0205 A6802 A6827 B1301 B1517 B5702 B5703 B5802 C0202 C0210 C0229 C0302 C0303 C0304 C0317 C0501 C0509 C0801 C0803 C0804 C0812 C1202 C1203 C1502 C1504 C1505 C1509 C1601 C1602 C1604 C16112 C1646 C17 C1701 C1702 C1703 C1704 C1705 C1706 C1707
WSVNDIQKL

SEQ ID NO: 2726 - protein, 9 aa, synthetic construct
  source 1..9: note = Seed: WTVNDIQKL; note = HLAs: A6603 C0303 C1202 C1602 C1646
WSVNDIQKK

SEQ ID NO: 2727 - protein, 9 aa, synthetic construct
  source 1..9: note = Seed: WTVNDIQKL; note = HLAs: A0202 A0204 A0205 A0206 A0214 A6802 A6827 C0202 C0210 C0229 C0801 C0803 C1203 C1502 C1505 C1602 C1646 C1701 C1702 C1703 C1704 C1705 C1706
WSVNDIQKV

SEQ ID NO: 2728 - protein, 9 aa, synthetic construct
  source 1..9: note = Seed: WTVNDIQKL; note = HLAs: A0205 A6802 A6827
WTVNDIQKA

SEQ ID NO: 2729 - protein, 9 aa, synthetic construct
  source 1..9: note = Seed: WTVNDIQKL; note = HLAs: A6603 C0303 C1602 C1646
WTVNDIQKR

SEQ ID NO: 2730 - protein, 9 aa, synthetic construct
  source 1..9: note = Seed: WTVNDIQKL; note = HLAs: A0202 A0204 A0205 A0206 A0214 A6802 A6827 B1301 B1517 B5702 B5703 B5802 C0202 C0210 C0229 C1502 C1505 C1602 C1646 C17 C1701 C1702 C1703 C1704 C1705 C1706
WTVNDIQKI

SEQ ID NO: 2731 - protein, 9 aa, synthetic construct
  source 1..9: note = Seed: WTVNDIQKL; note = HLAs: A6603 C0303 C1202 C1602 C1646
WTVNDIQKK

SEQ ID NO: 2732 - protein, 9 aa, synthetic construct
  source 1..9: note = Seed: WTVNDIQKL; note = HLAs: A0205 A2501 A6603 A6802 A6827 B1517 B5702 B5703 B5802 C0202 C0210 C0229 C0302 C0303 C0304 C0801 C0803 C1202 C1203 C1502 C1504 C1505 C1509 C1601 C1602 C1604 C16112 C1646 C17 C1701 C1702 C1703 C1704 C1705 C1706 C1707
WTVNDIQKM

SEQ ID NO: 2733 - protein, 9 aa, synthetic construct
  source 1..9: note = Seed: WTVNDIQKL; note = HLAs: A2501 B1301 B1517 B5702 B5703 B5802 C0202 C0210 C0229 C0302 C1202 C1203 C1504 C1505 C1509 C1601 C1602 C1604 C16112 C1646 C1701 C1702 C1703 C1704 C1705
WTVNDIQKF

SEQ ID NO: 2734 - protein, 9 aa, synthetic construct
  source 1..9: note = Seed: WTVNDIQKL; note = HLAs: A0202 A0204 A0205 A0206 A0207 A0214 A6802 A6827 C0202 C0210 C0229 C1502 C1505 C1602 C1646 C1701 C1702 C1703 C1704 C1705 C1706
WTVNDIQKV

SEQ ID NO: 2735 - protein, 9 aa, synthetic construct
  source 1..9: note = Seed: WTVNDIQKL; note = HLAs: B5703 B5802
WWVNDIQKW

SEQ ID NO: 2736 - protein, 9 aa, synthetic construct
  source 1..9: note = Seed: WTVNDIQKL; note = HLAs: C0303 C1602
WYVNDIQKK

SEQ ID NO: 2737 - protein, 9 aa, synthetic construct
  source 1..9: note = Seed: WTVNDIQKL; note = HLAs: B5802
WYVNDIQKW

SEQ ID NO: 2738 - protein, 9 aa, synthetic construct
  source 1..9: note = Seed: WTVNDIQKL; note = HLAs: A0202 A0205 A0206 A0214 A6802 A6827
WVVNDIQKA

SEQ ID NO: 2739 - protein, 9 aa, synthetic construct
  source 1..9: note = Seed: WTVNDIQKL; note = HLAs: A6603 C0303 C1602 C1646
WVVNDIQKR

SEQ ID NO: 2740 - protein, 9 aa, synthetic construct
  source 1..9: note = Seed: WTVNDIQKL; note = HLAs: C1202
WVVNDIQKH

SEQ ID NO: 2741 - protein, 9 aa, synthetic construct
  source 1..9: note = Seed: WTVNDIQKL; note = HLAs: A0202 A0204 A0205 A0206 A0207 A0214 A2501 A6802 A6827 B1301 C1505 C1701 C1702 C1703 C1704 C1705 C1706
WVVNDIQKI

SEQ ID NO: 2742 - protein, 9 aa, synthetic construct
  source 1..9: note = Seed: WTVNDIQKL; note = HLAs: A0202 A0204 A0205 A0206 A0207 A0214 A2501 A6603 A6802 A6827 B1301 C0202 C0210 C0229 C0302 C0303 C0304 C0801 C0803 C1202 C1203 C1502 C1505 C1602 C1604 C1646 C17 C1701 C1702 C1703 C1704 C1705 C1706 C1707
WVVNDIQKL

SEQ ID NO: 2743 - protein, 9 aa, synthetic construct
  source 1..9: note = Seed: WTVNDIQKL; note = HLAs: A6603 C0303 C1202 C1602 C1646
WVVNDIQKK

SEQ ID NO: 2744 - protein, 9 aa, synthetic construct
  source 1..9: note = Seed: WTVNDIQKL; note = HLAs: A0204 A0205 A0206 A0207 A2501 A6603 B1301 C0202 C0210 C0229 C0302 C0303 C0304 C0801 C0803 C1202 C1203 C1504 C1505 C1509 C1601 C1602 C1604 C16112 C1646 C17 C1701 C1702 C1703 C1704 C1705 C1706 C1707
WVVNDIQKM

SEQ ID NO: 2745 - protein, 9 aa, synthetic construct
  source 1..9: note = Seed: WTVNDIQKL; note = HLAs: A2501 B1301 B1517 B5702 B5703 B5802 C0202 C0210 C0229 C0302 C1202 C1203 C1504 C1509 C1601 C1602 C1604 C16112 C1646
WVVNDIQKF

SEQ ID NO: 2746 - protein, 9 aa, synthetic construct
  source 1..9: note = Seed: WTVNDIQKL; note = HLAs: A2501 A6603 B1517 C0202 C0210 C0229 C0302 C1202 C1203 C1504 C1509 C1601 C1602 C1604 C16112 C1646
WVVNDIQKY

SEQ ID NO: 2747 - protein, 10 aa, synthetic construct
  source 1..10: note = Seed: WTVNDIQKLV; note = HLAs: A0205 A6802 A6827
WAVNDIQKLV

SEQ ID NO: 2748 - protein, 10 aa, synthetic construct
  source 1..10: note = Seed: WTVNDIQKLV; note = HLAs: A6802 A6827
WRVNDIQKLV

SEQ ID NO: 2749 - protein, 10 aa, synthetic construct
  source 1..10: note = Seed: WTVNDIQKLV; note = HLAs: A6802 A6827
WNVNDIQKLV

SEQ ID NO: 2750 - protein, 10 aa, synthetic construct
  source 1..10: note = Seed: WTVNDIQKLV; note = HLAs: A6802 A6827
WDVNDIQKLV

SEQ ID NO: 2751 - protein, 10 aa, synthetic construct
  source 1..10: note = Seed: WTVNDIQKLV; note = HLAs: A6802 A6827
WCVNDIQKLV

SEQ ID NO: 2752 - protein, 10 aa, synthetic construct
  source 1..10: note = Seed: WTVNDIQKLV; note = HLAs: A0205
WQVNDIQKLI

SEQ ID NO: 2753 - protein, 10 aa, synthetic construct
  source 1..10: note = Seed: WTVNDIQKLV; note = HLAs: A0205
WQVNDIQKLL

SEQ ID NO: 2754 - protein, 10 aa, synthetic construct
  source 1..10: note = Seed: WTVNDIQKLV; note = HLAs: A0205 A6802 A6827
WQVNDIQKLV

SEQ ID NO: 2755 - protein, 10 aa, synthetic construct
  source 1..10: note = Seed: WTVNDIQKLV; note = HLAs: A6802 A6827
WEVNDIQKLV

SEQ ID NO: 2756 - protein, 10 aa, synthetic construct
  source 1..10: note = Seed: WTVNDIQKLV; note = HLAs: A6802 A6827
WGVNDIQKLV

SEQ ID NO: 2757 - protein, 10 aa, synthetic construct
  source 1..10: note = Seed: WTVNDIQKLV; note = HLAs: A6802 A6827
WHVNDIQKLV

SEQ ID NO: 2758 - protein, 10 aa, synthetic construct
  source 1..10: note = Seed: WTVNDIQKLV; note = HLAs: A0205
WIVNDIQKLA

SEQ ID NO: 2759 - protein, 10 aa, synthetic construct
  source 1..10: note = Seed: WTVNDIQKLV; note = HLAs: A0205
WIVNDIQKLI

SEQ ID NO: 2760 - protein, 10 aa, synthetic construct
  source 1..10: note = Seed: WTVNDIQKLV; note = HLAs: A0205
WIVNDIQKLL

SEQ ID NO: 2761 - protein, 10 aa, synthetic construct
  source 1..10: note = Seed: WTVNDIQKLV; note = HLAs: A0205 A6802 A6827
WIVNDIQKLV

SEQ ID NO: 2762 - protein, 10 aa, synthetic construct
  source 1..10: note = Seed: WTVNDIQKLV; note = HLAs: A0205
WLVNDIQKLA

SEQ ID NO: 2763 - protein, 10 aa, synthetic construct
  source 1..10: note = Seed: WTVNDIQKLV; note = HLAs: A0205
WLVNDIQKLI

SEQ ID NO: 2764 - protein, 10 aa, synthetic construct
  source 1..10: note = Seed: WTVNDIQKLV; note = HLAs: A0205
WLVNDIQKLL

SEQ ID NO: 2765 - protein, 10 aa, synthetic construct
  source 1..10: note = Seed: WTVNDIQKLV; note = HLAs: A0205
WLVNDIQKLM

SEQ ID NO: 2766 - protein, 10 aa, synthetic construct
  source 1..10: note = Seed: WTVNDIQKLV; note = HLAs: A0205 A6802 A6827
WLVNDIQKLV

SEQ ID NO: 2767 - protein, 10 aa, synthetic construct
  source 1..10: note = Seed: WTVNDIQKLV; note = HLAs: A6802 A6827
WKVNDIQKLV

SEQ ID NO: 2768 - protein, 10 aa, synthetic construct
  source 1..10: note = Seed: WTVNDIQKLV; note = HLAs: A0205
WMVNDIQKLA

SEQ ID NO: 2769 - protein, 10 aa, synthetic construct
  source 1..10: note = Seed: WTVNDIQKLV; note = HLAs: A0205
WMVNDIQKLI

SEQ ID NO: 2770 - protein, 10 aa, synthetic construct
  source 1..10: note = Seed: WTVNDIQKLV; note = HLAs: A0205
WMVNDIQKLL

SEQ ID NO: 2771 - protein, 10 aa, synthetic construct
  source 1..10: note = Seed: WTVNDIQKLV; note = HLAs: A0205
WMVNDIQKLM

SEQ ID NO: 2772 - protein, 10 aa, synthetic construct
  source 1..10: note = Seed: WTVNDIQKLV; note = HLAs: A0205 A6802 A6827
WMVNDIQKLV

SEQ ID NO: 2773 - protein, 10 aa, synthetic construct
  source 1..10: note = Seed: WTVNDIQKLV; note = HLAs: A6802 A6827
WFVNDIQKLV

SEQ ID NO: 2774 - protein, 10 aa, synthetic construct
  source 1..10: note = Seed: WTVNDIQKLV; note = HLAs: A6802 A6827
WPVNDIQKLV

SEQ ID NO: 2775 - protein, 10 aa, synthetic construct
  source 1..10: note = Seed: WTVNDIQKLV; note = HLAs: A6802 A6827
WSVNDIQKLV

SEQ ID NO: 2776 - protein, 10 aa, synthetic construct
  source 1..10: note = Seed: WTVNDIQKLV; note = HLAs: A6802 A6827
WTVNDIQKLA

SEQ ID NO: 2777 - protein, 10 aa, synthetic construct
  source 1..10: note = Seed: WTVNDIQKLV; note = HLAs: A0205 A6802 A6827
WTVNDIQKLI

SEQ ID NO: 2778 - protein, 10 aa, synthetic construct
  source 1..10: note = Seed: WTVNDIQKLV; note = HLAs: A0205 A6802 A6827
WTVNDIQKLL

SEQ ID NO: 2779 - protein, 10 aa, synthetic construct
  source 1..10: note = Seed: WTVNDIQKLV; note = HLAs: A6802 A6827
WWVNDIQKLV

SEQ ID NO: 2780 - protein, 10 aa, synthetic construct
  source 1..10: note = Seed: WTVNDIQKLV; note = HLAs: A6802 A6827
WYVNDIQKLV

SEQ ID NO: 2781 - protein, 10 aa, synthetic construct
  source 1..10: note = Seed: WTVNDIQKLV; note = HLAs: A0205
WVVNDIQKLI

SEQ ID NO: 2782 - protein, 10 aa, synthetic construct
  source 1..10: note = Seed: WTVNDIQKLV; note = HLAs: A0205
WVVNDIQKLL

SEQ ID NO: 2783 - protein, 10 aa, synthetic construct
  source 1..10: note = Seed: WTVNDIQKLV; note = HLAs: A0205 A6802 A6827
WVVNDIQKLV

SEQ ID NO: 2784 - protein, 8 aa, synthetic construct
  source 1..8: note = Seed: YNVLPQGW; note = HLAs: B5701 B5703 B5704 B5802
YAVLPQGW

SEQ ID NO: 2785 - protein, 8 aa, synthetic construct
  source 1..8: note = Seed: YNVLPQGW; note = HLAs: B5701
YDVLPQGW

SEQ ID NO: 2786 - protein, 8 aa, synthetic construct
  source 1..8: note = Seed: YNVLPQGW; note = HLAs: B5701 B5703 B5704 B5802
YCVLPQGW

SEQ ID NO: 2787 - protein, 8 aa, synthetic construct
  source 1..8: note = Seed: YNVLPQGW; note = HLAs: B5701
YQVLPQGW

SEQ ID NO: 2788 - protein, 8 aa, synthetic construct
  source 1..8: note = Seed: YNVLPQGW; note = HLAs: B5701 B5703 B5704 B5802
YGVLPQGW

SEQ ID NO: 2789 - protein, 8 aa, synthetic construct
  source 1..8: note = Seed: YNVLPQGW; note = HLAs: B5701 B5703 B5802
YIVLPQGW

SEQ ID NO: 2790 - protein, 8 aa, synthetic construct
  source 1..8: note = Seed: YNVLPQGW; note = HLAs: B5701
YLVLPQGW

SEQ ID NO: 2791 - protein, 8 aa, synthetic construct
  source 1..8: note = Seed: YNVLPQGW; note = HLAs: B5701 B5802
YMVLPQGW

SEQ ID NO: 2792 - protein, 8 aa, synthetic construct
  source 1..8: note = Seed: YNVLPQGW; note = HLAs: B5701
YPVLPQGW

SEQ ID NO: 2793 - protein, 8 aa, synthetic construct
  source 1..8: note = Seed: YNVLPQGW; note = HLAs: B5703 B5802
YSVLPQGF

SEQ ID NO: 2794 - protein, 8 aa, synthetic construct
  source 1..8: note = Seed: YNVLPQGW; note = HLAs: B5701 B5703 B5704 B5802
YSVLPQGW

SEQ ID NO: 2795 - protein, 8 aa, synthetic construct
  source 1..8: note = Seed: YNVLPQGW; note = HLAs: B5703 B5802
YTVLPQGF

SEQ ID NO: 2796 - protein, 8 aa, synthetic construct
  source 1..8: note = Seed: YNVLPQGW; note = HLAs: B5701 B5703 B5704 B5802
YTVLPQGW

SEQ ID NO: 2797 - protein, 8 aa, synthetic construct
  source 1..8: note = Seed: YNVLPQGW; note = HLAs: B5701 B5703 B5704 B5802
YVVLPQGW

SEQ ID NO: 2798 - protein, 9 aa, synthetic construct
  source 1..9: note = Seed: YNVLPQGWK; note = HLAs: A3402 A6801
YAVLPQGWR

SEQ ID NO: 2799 - protein, 9 aa, synthetic construct
  source 1..9: note = Seed: YNVLPQGWK; note = HLAs: A0302 A1101 A1102 A3402 A3601 A6801
YAVLPQGWK

SEQ ID NO: 2800 - protein, 9 aa, synthetic construct
  source 1..9: note = Seed: YNVLPQGWK; note = HLAs: A3601
YAVLPQGWY

SEQ ID NO: 2801 - protein, 9 aa, synthetic construct
  source 1..9: note = Seed: YNVLPQGWK; note = HLAs: A3402 A6801
YNVLPQGWR

SEQ ID NO: 2802 - protein, 9 aa, synthetic construct
  source 1..9: note = Seed: YNVLPQGWK; note = HLAs: A3601
YNVLPQGWY

SEQ ID NO: 2803 - protein, 9 aa, synthetic construct
  source 1..9: note = Seed: YNVLPQGWK; note = HLAs: A6801
YDVLPQGWR

SEQ ID NO: 2804 - protein, 9 aa, synthetic construct
  source 1..9: note = Seed: YNVLPQGWK; note = HLAs: A3402 A3601
YDVLPQGWK

SEQ ID NO: 2805 - protein, 9 aa, synthetic construct
  source 1..9: note = Seed: YNVLPQGWK; note = HLAs: A3601
YDVLPQGWY

SEQ ID NO: 2806 - protein, 9 aa, synthetic construct
  source 1..9: note = Seed: YNVLPQGWK; note = HLAs: A3402
YCVLPQGWK

SEQ ID NO: 2807 - protein, 9 aa, synthetic construct
  source 1..9: note = Seed: YNVLPQGWK; note = HLAs: A3601
YCVLPQGWY

SEQ ID NO: 2808 - protein, 9 aa, synthetic construct
  source 1..9: note = Seed: YNVLPQGWK; note = HLAs: A3402 A6801
YQVLPQGWR

SEQ ID NO: 2809 - protein, 9 aa, synthetic construct
  source 1..9: note = Seed: YNVLPQGWK; note = HLAs: A0302 A1101 A1102 A3402 A3601
YQVLPQGWK

SEQ ID NO: 2810 - protein, 9 aa, synthetic construct
  source 1..9: note = Seed: YNVLPQGWK; note = HLAs: A3601
YQVLPQGWY

SEQ ID NO: 2811 - protein, 9 aa, synthetic construct
  source 1..9: note = Seed: YNVLPQGWK; note = HLAs: A3402 A6801
YGVLPQGWR

SEQ ID NO: 2812 - protein, 9 aa, synthetic construct
  source 1..9: note = Seed: YNVLPQGWK; note = HLAs: A0302 A1101 A1102 A3402 A3601 A6801
YGVLPQGWK

SEQ ID NO: 2813 - protein, 9 aa, synthetic construct
  source 1..9: note = Seed: YNVLPQGWK; note = HLAs: A3601
YGVLPQGWY

SEQ ID NO: 2814 - protein, 9 aa, synthetic construct
  source 1..9: note = Seed: YNVLPQGWK; note = HLAs: A0302 A3402 A6801
YIVLPQGWR

SEQ ID NO: 2815 - protein, 9 aa, synthetic construct
  source 1..9: note = Seed: YNVLPQGWK; note = HLAs: A0302 A1101 A1102 A3402 A3601 A6801
YIVLPQGWK

SEQ ID NO: 2816 - protein, 9 aa, synthetic construct
  source 1..9: note = Seed: YNVLPQGWK; note = HLAs: A3601
YIVLPQGWY

SEQ ID NO: 2817 - protein, 9 aa, synthetic construct
  source 1..9: note = Seed: YNVLPQGWK; note = HLAs: A0302 A3402 A6801
YLVLPQGWR

SEQ ID NO: 2818 - protein, 9 aa, synthetic construct
  source 1..9: note = Seed: YNVLPQGWK; note = HLAs: A0302 A1101 A1102 A3402 A6801
YLVLPQGWK

SEQ ID NO: 2819 - protein, 9 aa, synthetic construct
  source 1..9: note = Seed: YNVLPQGWK; note = HLAs: A3601
YLVLPQGWY

SEQ ID NO: 2820 - protein, 9 aa, synthetic construct
  source 1..9: note = Seed: YNVLPQGWK; note = HLAs: A0302 A3402 A6801
YMVLPQGWR

SEQ ID NO: 2821 - protein, 9 aa, synthetic construct
  source 1..9: note = Seed: YNVLPQGWK; note = HLAs: A0302 A1101 A1102 A3402 A6801
YMVLPQGWK

SEQ ID NO: 2822 - protein, 9 aa, synthetic construct
  source 1..9: note = Seed: YNVLPQGWK; note = HLAs: A3601
YMVLPQGWY

SEQ ID NO: 2823 - protein, 9 aa, synthetic construct
  source 1..9: note = Seed: YNVLPQGWK; note = HLAs: A3402
YFVLPQGWK

SEQ ID NO: 2824 - protein, 9 aa, synthetic construct
  source 1..9: note = Seed: YNVLPQGWK; note = HLAs: A6801
YPVLPQGWR

SEQ ID NO: 2825 - protein, 9 aa, synthetic construct
  source 1..9: note = Seed: YNVLPQGWK; note = HLAs: A3402 A6801
YPVLPQGWK

SEQ ID NO: 2826 - protein, 9 aa, synthetic construct
  source 1..9: note = Seed: YNVLPQGWK; note = HLAs: A3402 A3601 A6801
YSVLPQGWR

SEQ ID NO: 2827 - protein, 9 aa, synthetic construct
  source 1..9: note = Seed: YNVLPQGWK; note = HLAs: A0302 A1101 A1102 A3402 A3601 A6801
YSVLPQGWK

SEQ ID NO: 2828 - protein, 9 aa, synthetic construct
  source 1..9: note = Seed: YNVLPQGWK; note = HLAs: A3601
YSVLPQGWY

SEQ ID NO: 2829 - protein, 9 aa, synthetic construct
  source 1..9: note = Seed: YNVLPQGWK; note = HLAs: A0302 A1101 A1102 A3402 A3601 A6801
YTVLPQGWR

SEQ ID NO: 2830 - protein, 9 aa, synthetic construct
  source 1..9: note = Seed: YNVLPQGWK; note = HLAs: A3402
YTVLPQGWH

SEQ ID NO: 2831 - protein, 9 aa, synthetic construct
  source 1..9: note = Seed: YNVLPQGWK; note = HLAs: A3402 A3601
YTVLPQGWY

SEQ ID NO: 2832 - protein, 9 aa, synthetic construct
  source 1..9: note = Seed: YNVLPQGWK; note = HLAs: A3402
YYVLPQGWK

SEQ ID NO: 2833 - protein, 9 aa, synthetic construct
  source 1..9: note = Seed: YNVLPQGWK; note = HLAs: A0302 A1101 A1102 A3402 A6801
YVVLPQGWR

SEQ ID NO: 2834 - protein, 9 aa, synthetic construct
  source 1..9: note = Seed: YNVLPQGWK; note = HLAs: A0302 A1101 A1102 A3402 A3601 A6801
YVVLPQGWK

SEQ ID NO: 2835 - protein, 9 aa, synthetic construct
  source 1..9: note = Seed: YNVLPQGWK; note = HLAs: A3601
YVVLPQGWY

SEQ ID NO: 2836 - protein, 14 aa, Human immunodeficiency virus 1
  source 1..14: note = HLAs: DQA10102-DQB10501
AAMQMLKDTINEEA

SEQ ID NO: 2837 - protein, 15 aa, Human immunodeficiency virus 1
  source 1..15: note = HLAs: DRB1_1001 DQA10102-DQB10501 DQA10102-DQB10609
AAMQMLKDTINEEAA

SEQ ID NO: 2838 - protein, 16 aa, Human immunodeficiency virus 1
  source 1..16: note = HLAs: DQA10102-DQB10501 DQA10102-DQB10609
AAMQMLKDTINEEAAE

SEQ ID NO: 2839 - protein, 17 aa, Human immunodeficiency virus 1
  source 1..17: note = HLAs: DQA10102-DQB10501
AAMQMLKDTINEEAAEW

SEQ ID NO: 2840 - protein, 19 aa, Human immunodeficiency virus 1
  source 1..19: note = HLAs: DQA10102-DQB10501 DQA10102-DQB10609
AAMQMLKDTINEEAAEWDR

SEQ ID NO: 2841 - protein, 14 aa, Human immunodeficiency virus 1
  source 1..14: note = HLAs: DRB1_0101 DRB1_1001 DPA10103-DPB11501 DPA10104-DPB11501 DPA10301-DPB10101 DPA10301-DPB10201 DPA10301-DPB10202 DPA10301-DPB110601 DPA10301-DPB11801 DPA10301-DPB14001 DPA10401-DPB10101 DQA10102-DQB10501 DQA10102-DQB10601 DQA10102-DQB10602 DQA10102-DQB10609 DQA10102-DQB10611 DQA10103-DQB10601 DQA10103-DQB10609 DQA10201-DQB10301
AEHLKTAVQMAVFI

SEQ ID NO: 2842 - protein, 15 aa, Human immunodeficiency virus 1
  source 1..15: note = HLAs: DRB1_0101 DRB1_0102 DRB1_0404 DRB1_0410 DRB1_0701 DRB1_0813 DRB1_0901 DRB1_1001 DRB1_1102 DRB1_1114 DRB1_1301 DRB1_1302 DRB1_1304 DRB1_1401 DRB1_1404 DRB1_1406 DRB1_1454 DPA10103-DPB10101 DPA10103-DPB11501 DPA10103-DPB15001 DPA10104-DPB10101 DPA10104-DPB11501 DPA10105-DPB10101 DPA10105-DPB15001 DPA10202-DPB10101 DPA10301-DPB10101 DPA10301-DPB10201 DPA10301-DPB10202 DPA10301-DPB10401 DPA10301-DPB110601 DPA10301-DPB11801 DPA10301-DPB12301 DPA10301-DPB13901 DPA10301-DPB14001 DPA10301-DPB16501 DPA10401-DPB10101 DPA10401-DPB10201 DPA10401-DPB10202 DPA10401-DPB10301 DPA10401-DPB10501 DPA10401-DPB11401 DQA10102-DQB10501 DQA10102-DQB10601 DQA10102-DQB10602 DQA10102-DQB10609 DQA10102-DQB10611 DQA10103-DQB10501 DQA10103-DQB10601 DQA10103-DQB10602 DQA10103-DQB10609 DQA10201-DQB10301 DQA10201-DQB10303 DQA10505-DQB10402 DQA10506-DQB10303
AEHLKTAVQMAVFIH

SEQ ID NO: 2843 - protein, 16 aa, Human immunodeficiency virus 1
  source 1..16: note = HLAs: DRB1_0101 DRB1_0901 DRB1_1001 DRB1_1406 DPA10103-DPB10101 DPA10103-DPB10201 DPA10103-DPB10202 DPA10103-DPB11101 DPA10103-DPB11501 DPA10103-DPB11601 DPA10103-DPB11801 DPA10103-DPB11901 DPA10103-DPB13101 DPA10103-DPB13401 DPA10103-DPB14001 DPA10103-DPB14801 DPA10103-DPB15001 DPA10104-DPB10101 DPA10104-DPB11501 DPA10105-DPB10101 DPA10105-DPB11801 DPA10105-DPB15001 DPA10106-DPB10101 DPA10201-DPB10101 DPA10201-DPB110601 DPA10201-DPB11501 DPA10201-DPB11901 DPA10202-DPB10101 DPA10202-DPB10202 DPA10202-DPB10901 DPA10202-DPB110601 DPA10202-DPB11101 DPA10202-DPB11901 DPA10202-DPB15501 DPA10202-DPB16501 DPA10301-DPB10101 DPA10301-DPB10201 DPA10301-DPB10202 DPA10301-DPB10401 DPA10301-DPB10402 DPA10301-DPB10901 DPA10301-DPB110501 DPA10301-DPB110601 DPA10301-DPB11101 DPA10301-DPB11301 DPA10301-DPB11801 DPA10301-DPB12301 DPA10301-DPB13901 DPA10301-DPB14001 DPA10301-DPB14901 DPA10301-DPB15501 DPA10301-DPB16501 DPA10301-DPB17501 DPA10301-DPB18001 DPA10401-DPB10101 DPA10401-DPB10201; note = HLAs: DPA10401-DPB10202 DPA10401-DPB10301 DPA10401-DPB10501 DPA10401-DPB11301 DPA10401-DPB113301 DPA10401-DPB11401 DQA10102-DQB10501 DQA10102-DQB10503 DQA10102-DQB10601 DQA10102-DQB10602 DQA10102-DQB10609 DQA10102-DQB10611 DQA10103-DQB10501 DQA10103-DQB10601 DQA10103-DQB10602 DQA10103-DQB10609 DQA10201-DQB10301 DQA10201-DQB10303
AEHLKTAVQMAVFIHN

SEQ ID NO: 2844 - protein, 17 aa, Human immunodeficiency virus 1
  source 1..17: note = HLAs: DRB1_0101 DRB1_0404 DRB1_0701 DRB1_0813 DRB1_0901 DRB1_1001 DRB1_1406 DPA10103-DPB10101 DPA10103-DPB10201 DPA10103-DPB10202 DPA10103-DPB10401 DPA10103-DPB10501 DPA10103-DPB11101 DPA10103-DPB112601 DPA10103-DPB11501 DPA10103-DPB11601 DPA10103-DPB11801 DPA10103-DPB11901 DPA10103-DPB12301 DPA10103-DPB13101 DPA10103-DPB13401 DPA10103-DPB13901 DPA10103-DPB14001 DPA10103-DPB14101 DPA10103-DPB14801 DPA10103-DPB15001 DPA10103-DPB15501 DPA10104-DPB10101 DPA10104-DPB11501 DPA10105-DPB10101 DPA10105-DPB10401 DPA10105-DPB11801 DPA10105-DPB15001 DPA10106-DPB10101 DPA10201-DPB10101 DPA10201-DPB10202 DPA10201-DPB110601 DPA10201-DPB11501 DPA10201-DPB11901 DPA10202-DPB10101 DPA10202-DPB10201 DPA10202-DPB10202 DPA10202-DPB10501 DPA10202-DPB10901 DPA10202-DPB110601 DPA10202-DPB11101 DPA10202-DPB11301 DPA10202-DPB11801 DPA10202-DPB11901 DPA10202-DPB13101 DPA10202-DPB13801 DPA10202-DPB15501 DPA10202-DPB16501 DPA10301-DPB10101 DPA10301-DPB10201 DPA10301-DPB10202 DPA10301-DPB10401 DPA10301-DPB10402; note = HLAs: DPA10301-DPB10901 DPA10301-DPB110501 DPA10301-DPB110601 DPA10301-DPB11101 DPA10301-DPB11301 DPA10301-DPB11801 DPA10301-DPB12301 DPA10301-DPB13901 DPA10301-DPB14001 DPA10301-DPB14901 DPA10301-DPB15501 DPA10301-DPB16501 DPA10301-DPB17501 DPA10301-DPB18001 DPA10401-DPB10101 DPA10401-DPB10201 DPA10401-DPB10202 DPA10401-DPB10301 DPA10401-DPB10402 DPA10401-DPB10501 DPA10401-DPB110501 DPA10401-DPB11301 DPA10401-DPB113301 DPA10401-DPB11401 DPA10401-DPB14901 DQA10102-DQB10501 DQA10102-DQB10503 DQA10102-DQB10601 DQA10102-DQB10602 DQA10102-DQB10609 DQA10102-DQB10611 DQA10103-DQB10501 DQA10103-DQB10601 DQA10103-DQB10602 DQA10103-DQB10609 DQA10201-DQB10301 DQA10201-DQB10303
AEHLKTAVQMAVFIHNF

SEQ ID NO: 2845 - protein, 18 aa, Human immunodeficiency virus 1
  source 1..18: note = HLAs: DRB1_1001 DPA10103-DPB10101 DPA10103-DPB10201 DPA10103-DPB10202 DPA10103-DPB11501 DPA10103-DPB11601 DPA10103-DPB11801 DPA10103-DPB11901 DPA10103-DPB13101 DPA10103-DPB13401 DPA10103-DPB14001 DPA10103-DPB14801 DPA10103-DPB15001 DPA10104-DPB10101 DPA10104-DPB11501 DPA10105-DPB10101 DPA10105-DPB11801 DPA10105-DPB15001 DPA10106-DPB10101 DPA10201-DPB10101 DPA10201-DPB110601 DPA10201-DPB11501 DPA10201-DPB11901 DPA10202-DPB10101 DPA10202-DPB10202 DPA10202-DPB110601 DPA10202-DPB11901 DPA10301-DPB10101 DPA10301-DPB10201 DPA10301-DPB10202 DPA10301-DPB10401 DPA10301-DPB10402 DPA10301-DPB110501 DPA10301-DPB110601 DPA10301-DPB11801 DPA10301-DPB12301 DPA10301-DPB13901 DPA10301-DPB14001 DPA10301-DPB14901 DPA10301-DPB15501 DPA10301-DPB16501 DPA10301-DPB17501 DPA10301-DPB18001 DPA10401-DPB10101 DPA10401-DPB10201 DPA10401-DPB10202 DPA10401-DPB10501 DQA10102-DQB10501 DQA10102-DQB10503 DQA10102-DQB10601 DQA10102-DQB10602 DQA10102-DQB10609 DQA10102-DQB10611 DQA10103-DQB10501 DQA10103-DQB10601; note = HLAs: DQA10103-DQB10609
AEHLKTAVQMAVFIHNFK

SEQ ID NO: 2846 - protein, 19 aa, Human immunodeficiency virus 1
  source 1..19: note = HLAs: DRB1_0101 DRB1_0701 DRB1_0806 DRB1_1001 DRB1_1406 DRB1_1501 DPA10103-DPB10101 DPA10103-DPB10201 DPA10103-DPB10202 DPA10103-DPB10401 DPA10103-DPB10402 DPA10103-DPB10501 DPA10103-DPB10601 DPA10103-DPB110501 DPA10103-DPB11101 DPA10103-DPB112601 DPA10103-DPB11501 DPA10103-DPB11601 DPA10103-DPB11801 DPA10103-DPB11901 DPA10103-DPB12301 DPA10103-DPB13101 DPA10103-DPB13401 DPA10103-DPB13901 DPA10103-DPB14001 DPA10103-DPB14101 DPA10103-DPB14801 DPA10103-DPB14901 DPA10103-DPB15001 DPA10103-DPB15101 DPA10103-DPB15501 DPA10103-DPB15901 DPA10103-DPB18001 DPA10104-DPB10101 DPA10104-DPB11501 DPA10105-DPB10101 DPA10105-DPB10401 DPA10105-DPB11801 DPA10105-DPB15001 DPA10106-DPB10101 DPA10106-DPB11101 DPA10201-DPB10101 DPA10201-DPB10201 DPA10201-DPB10202 DPA10201-DPB10501 DPA10201-DPB110601 DPA10201-DPB11101 DPA10201-DPB11501 DPA10201-DPB11601 DPA10201-DPB11801 DPA10201-DPB11901 DPA10201-DPB15501 DPA10202-DPB10101 DPA10202-DPB10201 DPA10202-DPB10202 DPA10202-DPB10401 DPA10202-DPB10501; note = HLAs: DPA10202-DPB10901 DPA10202-DPB110601 DPA10202-DPB11101 DPA10202-DPB11301 DPA10202-DPB11801 DPA10202-DPB11901 DPA10202-DPB12101 DPA10202-DPB13001 DPA10202-DPB13101 DPA10202-DPB13801 DPA10202-DPB15501 DPA10202-DPB16501 DPA10301-DPB10101 DPA10301-DPB10201 DPA10301-DPB10202 DPA10301-DPB10401 DPA10301-DPB10402 DPA10301-DPB10901 DPA10301-DPB110501 DPA10301-DPB110601 DPA10301-DPB11101 DPA10301-DPB11301 DPA10301-DPB11701 DPA10301-DPB11801 DPA10301-DPB12301 DPA10301-DPB13901 DPA10301-DPB14001 DPA10301-DPB14901 DPA10301-DPB15501 DPA10301-DPB16501 DPA10301-DPB17501 DPA10301-DPB18001 DPA10401-DPB10101 DPA10401-DPB10201 DPA10401-DPB10202 DPA10401-DPB10301 DPA10401-DPB10402 DPA10401-DPB10501 DPA10401-DPB110501 DPA10401-DPB11301 DPA10401-DPB113301 DPA10401-DPB11401 DPA10401-DPB14901 DQA10102-DQB10501 DQA10102-DQB10503 DQA10102-DQB10601 DQA10102-DQB10602 DQA10102-DQB10609 DQA10102-DQB10611 DQA10103-DQB10501 DQA10103-DQB10601 DQA10103-DQB10602 DQA10103-DQB10609 DQA10201-DQB10301 DQA10201-DQB10303
AEHLKTAVQMAVFIHNFKR

SEQ ID NO: 2847 - protein, 20 aa, Human immunodeficiency virus 1
  source 1..20: note = HLAs: DRB1_0101 DRB1_0404 DRB1_0410 DRB1_0701 DRB1_0801 DRB1_0802 DRB1_0804 DRB1_0806 DRB1_0809 DRB1_0813 DRB1_0901 DRB1_1001 DRB1_1101 DRB1_1102 DRB1_1103 DRB1_1104 DRB1_1301 DRB1_1304 DRB1_1305 DRB1_1406 DRB1_1501 DRB1_1503 DRB1_1601 DRB1_1602 DPA10103-DPB10101 DPA10103-DPB10201 DPA10103-DPB10202 DPA10103-DPB10301 DPA10103-DPB10401 DPA10103-DPB10402 DPA10103-DPB10501 DPA10103-DPB10601 DPA10103-DPB10901 DPA10103-DPB110501 DPA10103-DPB11101 DPA10103-DPB112401 DPA10103-DPB112601 DPA10103-DPB11301 DPA10103-DPB113101 DPA10103-DPB113301 DPA10103-DPB11401 DPA10103-DPB11501 DPA10103-DPB11601 DPA10103-DPB11701 DPA10103-DPB11801 DPA10103-DPB11901 DPA10103-DPB12001 DPA10103-DPB12101 DPA10103-DPB12301 DPA10103-DPB12901 DPA10103-DPB13001 DPA10103-DPB13101 DPA10103-DPB13401 DPA10103-DPB13901 DPA10103-DPB14001 DPA10103-DPB14101 DPA10103-DPB14801 DPA10103-DPB14901 DPA10103-DPB15001 DPA10103-DPB15101 DPA10103-DPB15501 DPA10103-DPB15901 DPA10103-DPB18001 DPA10104-DPB10101 DPA10104-DPB10301; note = HLAs: DPA10104-DPB11301 DPA10104-DPB11501 DPA10105-DPB10101 DPA10105-DPB10301 DPA10105-DPB10401 DPA10105-DPB11801 DPA10105-DPB15001 DPA10106-DPB10101 DPA10106-DPB11101 DPA10201-DPB10101 DPA10201-DPB10201 DPA10201-DPB10202 DPA10201-DPB10501 DPA10201-DPB10901 DPA10201-DPB110601 DPA10201-DPB11101 DPA10201-DPB11301 DPA10201-DPB113301 DPA10201-DPB11501 DPA10201-DPB11601 DPA10201-DPB11801 DPA10201-DPB11901 DPA10201-DPB13401 DPA10201-DPB15501 DPA10202-DPB10101 DPA10202-DPB10201 DPA10202-DPB10202 DPA10202-DPB10301 DPA10202-DPB10401 DPA10202-DPB10402 DPA10202-DPB10501 DPA10202-DPB10901 DPA10202-DPB110001 DPA10202-DPB110501 DPA10202-DPB110601 DPA10202-DPB11101 DPA10202-DPB11301 DPA10202-DPB113101 DPA10202-DPB11401 DPA10202-DPB11701 DPA10202-DPB11801 DPA10202-DPB11901 DPA10202-DPB12101 DPA10202-DPB12901 DPA10202-DPB13001 DPA10202-DPB13101 DPA10202-DPB13801 DPA10202-DPB14501 DPA10202-DPB15501 DPA10202-DPB16501 DPA10202-DPB18501 DPA10301-DPB10101 DPA10301-DPB10201 DPA10301-DPB10202; note = HLAs: DPA10301-DPB10301 DPA10301-DPB10401 DPA10301-DPB10402 DPA10301-DPB10901 DPA10301-DPB110501 DPA10301-DPB110601 DPA10301-DPB11101 DPA10301-DPB11301 DPA10301-DPB11701 DPA10301-DPB11801 DPA10301-DPB12301 DPA10301-DPB13901 DPA10301-DPB14001 DPA10301-DPB14901 DPA10301-DPB15501 DPA10301-DPB16501 DPA10301-DPB17501 DPA10301-DPB18001 DPA10401-DPB10101 DPA10401-DPB10201 DPA10401-DPB10202 DPA10401-DPB10301 DPA10401-DPB10402 DPA10401-DPB10501 DPA10401-DPB110501 DPA10401-DPB11301 DPA10401-DPB113301 DPA10401-DPB11401 DPA10401-DPB14901 DQA10102-DQB10501 DQA10102-DQB10503 DQA10102-DQB10601 DQA10102-DQB10602 DQA10102-DQB10609 DQA10102-DQB10611 DQA10103-DQB10501 DQA10103-DQB10503 DQA10103-DQB10601 DQA10103-DQB10602 DQA10103-DQB10608 DQA10103-DQB10609 DQA10201-DQB10301 DQA10201-DQB10303
AEHLKTAVQMAVFIHNFKRK

SEQ ID NO: 2848 - protein, 21 aa, Human immunodeficiency virus 1
  source 1..21: note = HLAs: DRB1_0101 DRB1_0410 DRB1_0701 DRB1_0801 DRB1_0804 DRB1_0806 DRB1_1001 DRB1_1101 DRB1_1102 DRB1_1103 DRB1_1104 DRB1_1301 DRB1_1304 DRB1_1305 DRB1_1406 DRB1_1501 DRB1_1601 DRB1_1602 DPA10103-DPB10101 DPA10103-DPB10201 DPA10103-DPB10202 DPA10103-DPB10401 DPA10103-DPB10501 DPA10103-DPB11101 DPA10103-DPB112601 DPA10103-DPB11501 DPA10103-DPB11601 DPA10103-DPB11801 DPA10103-DPB11901 DPA10103-DPB12301 DPA10103-DPB13101 DPA10103-DPB13401 DPA10103-DPB13901 DPA10103-DPB14001 DPA10103-DPB14101 DPA10103-DPB14801 DPA10103-DPB15001 DPA10103-DPB15501 DPA10103-DPB15901 DPA10104-DPB10101 DPA10104-DPB11501 DPA10105-DPB10101 DPA10105-DPB10401 DPA10105-DPB11801 DPA10105-DPB15001 DPA10106-DPB10101 DPA10201-DPB10101 DPA10201-DPB10202 DPA10201-DPB110601 DPA10201-DPB11501 DPA10201-DPB11601 DPA10201-DPB11901 DPA10202-DPB10101 DPA10202-DPB10201 DPA10202-DPB10202 DPA10202-DPB10501 DPA10202-DPB110601 DPA10202-DPB11801 DPA10202-DPB11901 DPA10202-DPB13101 DPA10202-DPB13801 DPA10202-DPB15501 DPA10202-DPB16501; note = HLAs: DPA10301-DPB10101 DPA10301-DPB10201 DPA10301-DPB10202 DPA10301-DPB10401 DPA10301-DPB10402 DPA10301-DPB110501 DPA10301-DPB110601 DPA10301-DPB11101 DPA10301-DPB11301 DPA10301-DPB11801 DPA10301-DPB12301 DPA10301-DPB13901 DPA10301-DPB14001 DPA10301-DPB14901 DPA10301-DPB15501 DPA10301-DPB16501 DPA10301-DPB17501 DPA10301-DPB18001 DPA10401-DPB10101 DPA10401-DPB10201 DPA10401-DPB10202 DPA10401-DPB10301 DPA10401-DPB10402 DPA10401-DPB10501 DPA10401-DPB110501 DPA10401-DPB11301 DPA10401-DPB113301 DPA10401-DPB11401 DPA10401-DPB14901 DQA10102-DQB10501 DQA10102-DQB10503 DQA10102-DQB10601 DQA10102-DQB10602 DQA10102-DQB10609 DQA10102-DQB10611 DQA10103-DQB10501 DQA10103-DQB10601 DQA10103-DQB10609
AEHLKTAVQMAVFIHNFKRKG

SEQ ID NO: 2849 - protein, 22 aa, Human immunodeficiency virus 1
  source 1..22: note = HLAs: DRB1_0101 DRB1_0410 DRB1_0701 DRB1_0801 DRB1_0802 DRB1_0804 DRB1_0806 DRB1_0809 DRB1_1001 DRB1_1101 DRB1_1102 DRB1_1103 DRB1_1104 DRB1_1301 DRB1_1304 DRB1_1305 DRB1_1406 DRB1_1501 DRB1_1601 DRB1_1602 DPA10103-DPB10101 DPA10103-DPB10201 DPA10103-DPB10202 DPA10103-DPB10401 DPA10103-DPB10501 DPA10103-DPB11101 DPA10103-DPB112601 DPA10103-DPB11501 DPA10103-DPB11601 DPA10103-DPB11801 DPA10103-DPB11901 DPA10103-DPB12301 DPA10103-DPB13101 DPA10103-DPB13401 DPA10103-DPB13901 DPA10103-DPB14001 DPA10103-DPB14101 DPA10103-DPB14801 DPA10103-DPB15001 DPA10103-DPB15501 DPA10103-DPB15901 DPA10104-DPB10101 DPA10104-DPB11501 DPA10105-DPB10101 DPA10105-DPB10401 DPA10105-DPB11801 DPA10105-DPB15001 DPA10106-DPB10101 DPA10201-DPB10101 DPA10201-DPB10202 DPA10201-DPB110601 DPA10201-DPB11501 DPA10201-DPB11601 DPA10201-DPB11901 DPA10202-DPB10101 DPA10202-DPB10201 DPA10202-DPB10202 DPA10202-DPB10501 DPA10202-DPB110601 DPA10202-DPB11801 DPA10202-DPB11901 DPA10202-DPB13101 DPA10202-DPB13801; note = HLAs: DPA10202-DPB15501 DPA10202-DPB16501 DPA10301-DPB10101 DPA10301-DPB10201 DPA10301-DPB10202 DPA10301-DPB10401 DPA10301-DPB10402 DPA10301-DPB110501 DPA10301-DPB110601 DPA10301-DPB11101 DPA10301-DPB11301 DPA10301-DPB11801 DPA10301-DPB12301 DPA10301-DPB13901 DPA10301-DPB14001 DPA10301-DPB14901 DPA10301-DPB15501 DPA10301-DPB16501 DPA10301-DPB17501 DPA10301-DPB18001 DPA10401-DPB10101 DPA10401-DPB10201 DPA10401-DPB10202 DPA10401-DPB10301 DPA10401-DPB10402 DPA10401-DPB10501 DPA10401-DPB110501 DPA10401-DPB11301 DPA10401-DPB113301 DPA10401-DPB11401 DPA10401-DPB14901 DQA10102-DQB10501 DQA10102-DQB10503 DQA10102-DQB10601 DQA10102-DQB10602 DQA10102-DQB10609 DQA10102-DQB10611 DQA10103-DQB10501 DQA10103-DQB10601 DQA10103-DQB10609
AEHLKTAVQMAVFIHNFKRKGG

SEQ ID NO: 2850 - protein, 23 aa, Human immunodeficiency virus 1
  source 1..23: note = HLAs: DRB1_0101 DRB1_0410 DRB1_0701 DRB1_0801 DRB1_0802 DRB1_0804 DRB1_0806 DRB1_0809 DRB1_0813 DRB1_1001 DRB1_1101 DRB1_1102 DRB1_1103 DRB1_1104 DRB1_1114 DRB1_1301 DRB1_1302 DRB1_1303 DRB1_1304 DRB1_1305 DRB1_1402 DRB1_1406 DRB1_1501 DRB1_1503 DRB1_1601 DRB1_1602 DPA10103-DPB10101 DPA10103-DPB10201 DPA10103-DPB10202 DPA10103-DPB10401 DPA10103-DPB10501 DPA10103-DPB11101 DPA10103-DPB112601 DPA10103-DPB11501 DPA10103-DPB11601 DPA10103-DPB11801 DPA10103-DPB11901 DPA10103-DPB12301 DPA10103-DPB13101 DPA10103-DPB13401 DPA10103-DPB13901 DPA10103-DPB14001 DPA10103-DPB14101 DPA10103-DPB14801 DPA10103-DPB15001 DPA10103-DPB15501 DPA10103-DPB15901 DPA10104-DPB10101 DPA10104-DPB11501 DPA10105-DPB10101 DPA10105-DPB10401 DPA10105-DPB11801 DPA10105-DPB15001 DPA10106-DPB10101 DPA10201-DPB10101 DPA10201-DPB10202 DPA10201-DPB110601 DPA10201-DPB11501 DPA10201-DPB11601 DPA10201-DPB11901 DPA10202-DPB10101 DPA10202-DPB10201 DPA10202-DPB10202 DPA10202-DPB10401 DPA10202-DPB10501 DPA10202-DPB110601; note = HLAs: DPA10202-DPB11801 DPA10202-DPB11901 DPA10202-DPB13101 DPA10202-DPB13801 DPA10202-DPB15501 DPA10202-DPB16501 DPA10301-DPB10101 DPA10301-DPB10201 DPA10301-DPB10202 DPA10301-DPB10401 DPA10301-DPB10402 DPA10301-DPB110501 DPA10301-DPB110601 DPA10301-DPB11101 DPA10301-DPB11301 DPA10301-DPB11801 DPA10301-DPB12301 DPA10301-DPB13901 DPA10301-DPB14001 DPA10301-DPB14901 DPA10301-DPB15501 DPA10301-DPB16501 DPA10301-DPB17501 DPA10301-DPB18001 DPA10401-DPB10101 DPA10401-DPB10201 DPA10401-DPB10202 DPA10401-DPB10301 DPA10401-DPB10402 DPA10401-DPB10501 DPA10401-DPB110501 DPA10401-DPB11301 DPA10401-DPB113301 DPA10401-DPB11401 DPA10401-DPB14901 DQA10102-DQB10501 DQA10102-DQB10503 DQA10102-DQB10601 DQA10102-DQB10602 DQA10102-DQB10609 DQA10102-DQB10611 DQA10103-DQB10501 DQA10103-DQB10601 DQA10103-DQB10609
AEHLKTAVQMAVFIHNFKRKGGI

SEQ ID NO: 2851 - protein, 24 aa, Human immunodeficiency virus 1
  source 1..24: note = HLAs: DRB1_0101 DRB1_0410 DRB1_0701 DRB1_0801 DRB1_0802 DRB1_0804 DRB1_0806 DRB1_0809 DRB1_0813 DRB1_1001 DRB1_1101 DRB1_1102 DRB1_1103 DRB1_1104 DRB1_1114 DRB1_1301 DRB1_1302 DRB1_1303 DRB1_1304 DRB1_1305 DRB1_1402 DRB1_1406 DRB1_1501 DRB1_1503 DRB1_1601 DRB1_1602 DPA10103-DPB10101 DPA10103-DPB10201 DPA10103-DPB10202 DPA10103-DPB10401 DPA10103-DPB10501 DPA10103-DPB11101 DPA10103-DPB112601 DPA10103-DPB11501 DPA10103-DPB11601 DPA10103-DPB11801 DPA10103-DPB11901 DPA10103-DPB12301 DPA10103-DPB13101 DPA10103-DPB13401 DPA10103-DPB13901 DPA10103-DPB14001 DPA10103-DPB14101 DPA10103-DPB14801 DPA10103-DPB15001 DPA10103-DPB15501 DPA10103-DPB15901 DPA10104-DPB10101 DPA10104-DPB11501 DPA10105-DPB10101 DPA10105-DPB10401 DPA10105-DPB11801 DPA10105-DPB15001 DPA10106-DPB10101 DPA10201-DPB10101 DPA10201-DPB10202 DPA10201-DPB110601 DPA10201-DPB11501 DPA10201-DPB11601 DPA10201-DPB11901 DPA10202-DPB10101 DPA10202-DPB10201 DPA10202-DPB10202 DPA10202-DPB10401 DPA10202-DPB10501 DPA10202-DPB110601; note = HLAs: DPA10202-DPB11801 DPA10202-DPB11901 DPA10202-DPB13101 DPA10202-DPB13801 DPA10202-DPB15501 DPA10202-DPB16501 DPA10301-DPB10101 DPA10301-DPB10201 DPA10301-DPB10202 DPA10301-DPB10401 DPA10301-DPB10402 DPA10301-DPB110501 DPA10301-DPB110601 DPA10301-DPB11101 DPA10301-DPB11301 DPA10301-DPB11801 DPA10301-DPB12301 DPA10301-DPB13901 DPA10301-DPB14001 DPA10301-DPB14901 DPA10301-DPB15501 DPA10301-DPB16501 DPA10301-DPB17501 DPA10301-DPB18001 DPA10401-DPB10101 DPA10401-DPB10201 DPA10401-DPB10202 DPA10401-DPB10301 DPA10401-DPB10402 DPA10401-DPB10501 DPA10401-DPB110501 DPA10401-DPB11301 DPA10401-DPB113301 DPA10401-DPB11401 DPA10401-DPB14901 DQA10102-DQB10501 DQA10102-DQB10503 DQA10102-DQB10601 DQA10102-DQB10602 DQA10102-DQB10609 DQA10102-DQB10611 DQA10103-DQB10501 DQA10103-DQB10601 DQA10103-DQB10609
AEHLKTAVQMAVFIHNFKRKGGIG

SEQ ID NO: 2852 - protein, 25 aa, Human immunodeficiency virus 1
  source 1..25: note = HLAs: DRB1_0101 DRB1_0410 DRB1_0701 DRB1_0801 DRB1_0802 DRB1_0804 DRB1_0806 DRB1_0809 DRB1_0813 DRB1_1001 DRB1_1101 DRB1_1102 DRB1_1103 DRB1_1104 DRB1_1114 DRB1_1301 DRB1_1302 DRB1_1303 DRB1_1304 DRB1_1305 DRB1_1402 DRB1_1406 DRB1_1501 DRB1_1503 DRB1_1601 DRB1_1602 DPA10103-DPB10101 DPA10103-DPB10201 DPA10103-DPB10202 DPA10103-DPB10401 DPA10103-DPB10501 DPA10103-DPB11101 DPA10103-DPB112601 DPA10103-DPB11501 DPA10103-DPB11601 DPA10103-DPB11801 DPA10103-DPB11901 DPA10103-DPB12301 DPA10103-DPB13101 DPA10103-DPB13401 DPA10103-DPB13901 DPA10103-DPB14001 DPA10103-DPB14101 DPA10103-DPB14801 DPA10103-DPB15001 DPA10103-DPB15501 DPA10103-DPB15901 DPA10104-DPB10101 DPA10104-DPB11501 DPA10105-DPB10101 DPA10105-DPB10401 DPA10105-DPB11801 DPA10105-DPB15001 DPA10106-DPB10101 DPA10201-DPB10101 DPA10201-DPB10202 DPA10201-DPB110601 DPA10201-DPB11501 DPA10201-DPB11601 DPA10201-DPB11901 DPA10202-DPB10101 DPA10202-DPB10201 DPA10202-DPB10202 DPA10202-DPB10401 DPA10202-DPB10501 DPA10202-DPB110601; note = HLAs: DPA10202-DPB11801 DPA10202-DPB11901 DPA10202-DPB13101 DPA10202-DPB13801 DPA10202-DPB15501 DPA10202-DPB16501 DPA10301-DPB10101 DPA10301-DPB10201 DPA10301-DPB10202 DPA10301-DPB10401 DPA10301-DPB10402 DPA10301-DPB110501 DPA10301-DPB110601 DPA10301-DPB11101 DPA10301-DPB11301 DPA10301-DPB11801 DPA10301-DPB12301 DPA10301-DPB13901 DPA10301-DPB14001 DPA10301-DPB14901 DPA10301-DPB15501 DPA10301-DPB16501 DPA10301-DPB17501 DPA10301-DPB18001 DPA10401-DPB10101 DPA10401-DPB10201 DPA10401-DPB10202 DPA10401-DPB10301 DPA10401-DPB10402 DPA10401-DPB10501 DPA10401-DPB110501 DPA10401-DPB11301 DPA10401-DPB113301 DPA10401-DPB11401 DPA10401-DPB14901 DQA10102-DQB10501 DQA10102-DQB10503 DQA10102-DQB10601 DQA10102-DQB10602 DQA10102-DQB10609 DQA10102-DQB10611 DQA10103-DQB10501 DQA10103-DQB10601 DQA10103-DQB10609
AEHLKTAVQMAVFIHNFKRKGGIGG

SEQ ID NO: 2853 - protein, 14 aa, Human immunodeficiency virus 1
  source 1..14: note = HLAs: DQA10102-DQB10501
AELELAENREILKE

SEQ ID NO: 2854 - protein, 15 aa, Human immunodeficiency virus 1
  source 1..15: note = HLAs: DRB1_0101 DRB1_0102 DRB1_0701 DRB1_0901 DRB1_1001 DRB1_1114 DRB1_1302 DRB1_1501 DQA10102-DQB10501
AELELAENREILKEP

SEQ ID NO: 2855 - protein, 16 aa, Human immunodeficiency virus 1
  source 1..16: note = HLAs: DQA10102-DQB10501 DQA10102-DQB10609 DQA10103-DQB10501
AELELAENREILKEPV

SEQ ID NO: 2856 - protein, 17 aa, Human immunodeficiency virus 1
  source 1..17: note = HLAs: DQA10102-DQB10501
AELELAENREILKEPVH

SEQ ID NO: 2857 - protein, 18 aa, Human immunodeficiency virus 1
  source 1..18: note = HLAs: DQA10102-DQB10501
AELELAENREILKEPVHG

SEQ ID NO: 2858 - protein, 13 aa, Human immunodeficiency virus 1
  source 1..13: note = HLAs: DPA10301-DPB10101
AFSPEVIPMFSAL

SEQ ID NO: 2859 - protein, 14 aa, Human immunodeficiency virus 1
  source 1..14: note = HLAs: DRB1_0101 DRB1_0404 DRB1_0405 DRB1_0408 DRB1_0410 DRB1_1001 DPA10103-DPB11501 DPA10104-DPB11501 DPA10202-DPB10101 DPA10301-DPB10101 DPA10301-DPB10201 DPA10301-DPB10202 DPA10301-DPB10401 DPA10301-DPB11801 DPA10301-DPB12301 DPA10301-DPB13901 DPA10301-DPB14001 DPA10301-DPB16501 DPA10401-DPB10101 DQA10102-DQB10501 DQA10103-DQB10501
AFSPEVIPMFSALS

SEQ ID NO: 2860 - protein, 15 aa, Human immunodeficiency virus 1
  source 1..15: note = HLAs: DRB1_0101 DRB1_0102 DRB1_0401 DRB1_0402 DRB1_0404 DRB1_0405 DRB1_0408 DRB1_0410 DRB1_0801 DRB1_0802 DRB1_0804 DRB1_0806 DRB1_0809 DRB1_0813 DRB1_0901 DRB1_1001 DRB1_1101 DRB1_1104 DRB1_1304 DRB1_1305 DRB1_1406 DRB1_1501 DRB1_1503 DRB1_1601 DRB1_1602 DPA10103-DPB10101 DPA10103-DPB11501 DPA10104-DPB10101 DPA10104-DPB11501 DPA10105-DPB10101 DPA10201-DPB11501 DPA10202-DPB10101 DPA10301-DPB10101 DPA10301-DPB10201 DPA10301-DPB10202 DPA10301-DPB10401 DPA10301-DPB110601 DPA10301-DPB11801 DPA10301-DPB12301 DPA10301-DPB13901 DPA10301-DPB14001 DPA10301-DPB16501 DPA10401-DPB10101 DPA10401-DPB10201 DPA10401-DPB10202 DQA10102-DQB10501 DQA10102-DQB10503 DQA10103-DQB10501 DQA10103-DQB10609 DQA10201-DQB10303 DQA10505-DQB10402 DQA10506-DQB10303
AFSPEVIPMFSALSE

SEQ ID NO: 2861 - protein, 16 aa, Human immunodeficiency virus 1
  source 1..16: note = HLAs: DRB1_0101 DRB1_0102 DRB1_0401 DRB1_0404 DRB1_0405 DRB1_0408 DRB1_0410 DRB1_0802 DRB1_0804 DRB1_0809 DRB1_1001 DRB1_1104 DRB1_1501 DRB1_1602 DPA10103-DPB10101 DPA10103-DPB11501 DPA10104-DPB10101 DPA10104-DPB11501 DPA10105-DPB10101 DPA10202-DPB10101 DPA10301-DPB10101 DPA10301-DPB10201 DPA10301-DPB10202 DPA10301-DPB10401 DPA10301-DPB11801 DPA10301-DPB12301 DPA10301-DPB13901 DPA10301-DPB14001 DPA10301-DPB16501 DPA10401-DPB10101 DPA10401-DPB10201 DQA10102-DQB10501 DQA10102-DQB10503 DQA10102-DQB10609 DQA10103-DQB10501 DQA10103-DQB10609 DQA10201-DQB10301 DQA10201-DQB10303 DQA10505-DQB10402 DQA10506-DQB10303
AFSPEVIPMFSALSEG

SEQ ID NO: 2862 - protein, 17 aa, Human immunodeficiency virus 1
  source 1..17: note = HLAs: DRB1_0101 DRB1_0102 DRB1_0401 DRB1_0404 DRB1_0405 DRB1_0408 DRB1_0410 DRB1_0802 DRB1_0804 DRB1_0806 DRB1_0809 DRB1_0813 DRB1_0901 DRB1_1001 DRB1_1101 DRB1_1104 DRB1_1305 DRB1_1406 DRB1_1501 DRB1_1503 DRB1_1601 DRB1_1602 DPA10103-DPB10101 DPA10103-DPB11501 DPA10104-DPB10101 DPA10104-DPB11501 DPA10105-DPB10101 DPA10202-DPB10101 DPA10301-DPB10101 DPA10301-DPB10201 DPA10301-DPB10202 DPA10301-DPB10401 DPA10301-DPB110601 DPA10301-DPB11801 DPA10301-DPB12301 DPA10301-DPB13901 DPA10301-DPB14001 DPA10301-DPB16501 DPA10401-DPB10101 DQA10102-DQB10501 DQA10102-DQB10503 DQA10102-DQB10601 DQA10102-DQB10609 DQA10102-DQB10611 DQA10103-DQB10501 DQA10103-DQB10601 DQA10103-DQB10609 DQA10201-DQB10301 DQA10201-DQB10302 DQA10201-DQB10303 DQA10501-DQB10301 DQA10501-DQB10319 DQA10503-DQB10301 DQA10505-DQB10301 DQA10505-DQB10302 DQA10505-DQB10309 DQA10505-DQB10319 DQA10505-DQB10402 DQA10506-DQB10303 DQA10508-DQB10301 DQA10509-DQB10301 DQA10601-DQB10301
AFSPEVIPMFSALSEGA

SEQ ID NO: 2863 - protein, 18 aa, Human immunodeficiency virus 1
  source 1..18: note = HLAs: DRB1_0101 DRB1_0102 DRB1_0404 DRB1_0408 DRB1_1001 DPA10301-DPB10101 DPA10401-DPB10101 DQA10102-DQB10501 DQA10102-DQB10503 DQA10102-DQB10601 DQA10102-DQB10609 DQA10103-DQB10501 DQA10201-DQB10301 DQA10201-DQB10303
AFSPEVIPMFSALSEGAT

SEQ ID NO: 2864 - protein, 19 aa, Human immunodeficiency virus 1
  source 1..19: note = HLAs: DRB1_0101 DRB1_0102 DRB1_0401 DRB1_0404 DRB1_0405 DRB1_0408 DRB1_0410 DRB1_0802 DRB1_0804 DRB1_0809 DRB1_0901 DRB1_1001 DRB1_1104 DRB1_1501 DRB1_1601 DRB1_1602 DPA10103-DPB10101 DPA10103-DPB11501 DPA10104-DPB10101 DPA10104-DPB11501 DPA10105-DPB10101 DPA10202-DPB10101 DPA10301-DPB10101 DPA10301-DPB10201 DPA10301-DPB10202 DPA10301-DPB10401 DPA10301-DPB11801 DPA10301-DPB12301 DPA10301-DPB13901 DPA10301-DPB14001 DPA10301-DPB16501 DPA10401-DPB10101 DQA10102-DQB10501 DQA10102-DQB10503 DQA10102-DQB10601 DQA10102-DQB10602 DQA10102-DQB10609 DQA10102-DQB10611 DQA10103-DQB10501 DQA10103-DQB10601 DQA10103-DQB10609 DQA10201-DQB10301 DQA10201-DQB10302 DQA10201-DQB10303 DQA10501-DQB10301 DQA10501-DQB10319 DQA10503-DQB10301 DQA10505-DQB10301 DQA10505-DQB10302 DQA10505-DQB10309 DQA10505-DQB10319 DQA10505-DQB10402 DQA10506-DQB10303 DQA10508-DQB10301 DQA10509-DQB10301 DQA10601-DQB10301
AFSPEVIPMFSALSEGATP

SEQ ID NO: 2865 - protein, 20 aa, Human immunodeficiency virus 1
  source 1..20: note = HLAs: DRB1_0101 DRB1_0102 DRB1_0401 DRB1_0404 DRB1_0405 DRB1_0408 DRB1_0410 DRB1_0801 DRB1_0802 DRB1_0804 DRB1_0806 DRB1_0809 DRB1_0813 DRB1_0901 DRB1_1001 DRB1_1101 DRB1_1104 DRB1_1305 DRB1_1406 DRB1_1501 DRB1_1502 DRB1_1503 DRB1_1601 DRB1_1602 DPA10103-DPB10101 DPA10103-DPB11501 DPA10103-DPB15001 DPA10104-DPB10101 DPA10104-DPB11501 DPA10105-DPB10101 DPA10105-DPB15001 DPA10202-DPB10101 DPA10301-DPB10101 DPA10301-DPB10201 DPA10301-DPB10202 DPA10301-DPB10401 DPA10301-DPB110601 DPA10301-DPB11801 DPA10301-DPB12301 DPA10301-DPB13901 DPA10301-DPB14001 DPA10301-DPB16501 DPA10401-DPB10101 DPA10401-DPB10201 DPA10401-DPB10301 DPA10401-DPB10501 DPA10401-DPB11401 DQA10102-DQB10501 DQA10102-DQB10503 DQA10102-DQB10601 DQA10102-DQB10602 DQA10102-DQB10609 DQA10102-DQB10611 DQA10103-DQB10501 DQA10103-DQB10503 DQA10103-DQB10601 DQA10103-DQB10602 DQA10103-DQB10604 DQA10103-DQB10608 DQA10103-DQB10609 DQA10201-DQB10301 DQA10201-DQB10302 DQA10201-DQB10303 DQA10301-DQB10301 DQA10302-DQB10301; note = HLAs: DQA10303-DQB10301 DQA10401-DQB10301 DQA10401-DQB10319 DQA10501-DQB10203 DQA10501-DQB10301 DQA10501-DQB10319 DQA10503-DQB10301 DQA10505-DQB10301 DQA10505-DQB10302 DQA10505-DQB10309 DQA10505-DQB10319 DQA10505-DQB10402 DQA10506-DQB10303 DQA10508-DQB10301 DQA10509-DQB10301 DQA10601-DQB10301
AFSPEVIPMFSALSEGATPQ

SEQ ID NO: 2866 - protein, 21 aa, Human immunodeficiency virus 1
  source 1..21: note = HLAs: DRB1_0101 DRB1_0102 DRB1_0401 DRB1_0404 DRB1_0405 DRB1_0408 DRB1_0410 DRB1_0802 DRB1_0804 DRB1_0809 DRB1_0901 DRB1_1001 DRB1_1104 DRB1_1406 DRB1_1501 DRB1_1601 DRB1_1602 DPA10103-DPB11501 DPA10104-DPB11501 DPA10301-DPB10101 DPA10301-DPB10201 DPA10301-DPB10202 DPA10301-DPB10401 DPA10301-DPB11801 DPA10301-DPB12301 DPA10301-DPB13901 DPA10301-DPB14001 DPA10301-DPB16501 DPA10401-DPB10101 DQA10102-DQB10501 DQA10102-DQB10503 DQA10102-DQB10601 DQA10102-DQB10609 DQA10103-DQB10501 DQA10103-DQB10601 DQA10103-DQB10609 DQA10201-DQB10301 DQA10201-DQB10303 DQA10501-DQB10301 DQA10501-DQB10319 DQA10503-DQB10301 DQA10505-DQB10301 DQA10505-DQB10309 DQA10505-DQB10319 DQA10506-DQB10303 DQA10508-DQB10301 DQA10509-DQB10301
AFSPEVIPMFSALSEGATPQD

SEQ ID NO: 2867 - protein, 22 aa, Human immunodeficiency virus 1
  source 1..22: note = HLAs: DRB1_0101 DRB1_0102 DRB1_0401 DRB1_0404 DRB1_0405 DRB1_0408 DRB1_0410 DRB1_0802 DRB1_0804 DRB1_0809 DRB1_0901 DRB1_1001 DRB1_1104 DRB1_1406 DRB1_1501 DRB1_1601 DRB1_1602 DPA10103-DPB11501 DPA10104-DPB11501 DPA10301-DPB10101 DPA10301-DPB10201 DPA10301-DPB10202 DPA10301-DPB10401 DPA10301-DPB11801 DPA10301-DPB12301 DPA10301-DPB13901 DPA10301-DPB14001 DPA10301-DPB16501 DPA10401-DPB10101 DQA10102-DQB10501 DQA10102-DQB10503 DQA10102-DQB10601 DQA10102-DQB10609 DQA10103-DQB10501 DQA10103-DQB10601 DQA10103-DQB10609 DQA10201-DQB10301 DQA10201-DQB10303 DQA10501-DQB10301 DQA10501-DQB10319 DQA10503-DQB10301 DQA10505-DQB10301 DQA10505-DQB10309 DQA10505-DQB10319 DQA10505-DQB10402 DQA10506-DQB10303 DQA10508-DQB10301 DQA10509-DQB10301 DQA10601-DQB10301
AFSPEVIPMFSALSEGATPQDL

SEQ ID NO: 2868 - protein, 23 aa, Human immunodeficiency virus 1
  source 1..23: note = HLAs: DRB1_0101 DRB1_0102 DRB1_0401 DRB1_0404 DRB1_0405 DRB1_0408 DRB1_0410 DRB1_0802 DRB1_0804 DRB1_0809 DRB1_0901 DRB1_1001 DRB1_1104 DRB1_1406 DRB1_1501 DRB1_1601 DRB1_1602 DPA10103-DPB11501 DPA10104-DPB11501 DPA10301-DPB10101 DPA10301-DPB10201 DPA10301-DPB10202 DPA10301-DPB10401 DPA10301-DPB11801 DPA10301-DPB12301 DPA10301-DPB13901 DPA10301-DPB14001 DPA10301-DPB16501 DPA10401-DPB10101 DQA10102-DQB10501 DQA10102-DQB10503 DQA10102-DQB10601 DQA10102-DQB10609 DQA10102-DQB10611 DQA10103-DQB10501 DQA10103-DQB10601 DQA10103-DQB10609 DQA10201-DQB10301 DQA10201-DQB10303 DQA10401-DQB10301 DQA10401-DQB10319 DQA10501-DQB10301 DQA10501-DQB10319 DQA10503-DQB10301 DQA10505-DQB10301 DQA10505-DQB10309 DQA10505-DQB10319 DQA10505-DQB10402 DQA10506-DQB10303 DQA10508-DQB10301 DQA10509-DQB10301 DQA10601-DQB10301
AFSPEVIPMFSALSEGATPQDLN

SEQ ID NO: 2869 - protein, 24 aa, Human immunodeficiency virus 1
  source 1..24: note = HLAs: DRB1_0101 DRB1_0102 DRB1_0401 DRB1_0404 DRB1_0405 DRB1_0408 DRB1_0410 DRB1_0802 DRB1_0804 DRB1_0809 DRB1_0813 DRB1_0901 DRB1_1001 DRB1_1104 DRB1_1406 DRB1_1501 DRB1_1601 DRB1_1602 DPA10103-DPB11501 DPA10104-DPB11501 DPA10301-DPB10101 DPA10301-DPB10201 DPA10301-DPB10202 DPA10301-DPB10401 DPA10301-DPB11801 DPA10301-DPB12301 DPA10301-DPB13901 DPA10301-DPB14001 DPA10301-DPB16501 DPA10401-DPB10101 DQA10102-DQB10501 DQA10102-DQB10503 DQA10102-DQB10601 DQA10102-DQB10609 DQA10102-DQB10611 DQA10103-DQB10501 DQA10103-DQB10601 DQA10103-DQB10609 DQA10201-DQB10301 DQA10201-DQB10303 DQA10401-DQB10301 DQA10401-DQB10319 DQA10501-DQB10301 DQA10501-DQB10319 DQA10503-DQB10301 DQA10505-DQB10301 DQA10505-DQB10309 DQA10505-DQB10319 DQA10505-DQB10402 DQA10506-DQB10303 DQA10508-DQB10301 DQA10509-DQB10301 DQA10601-DQB10301
AFSPEVIPMFSALSEGATPQDLNT

SEQ ID NO: 2870 - protein, 25 aa, Human immunodeficiency virus 1
  source 1..25: note = HLAs: DRB1_0101 DRB1_0102 DRB1_0401 DRB1_0404 DRB1_0405 DRB1_0408 DRB1_0410 DRB1_0802 DRB1_0804 DRB1_0809 DRB1_0813 DRB1_0901 DRB1_1001 DRB1_1104 DRB1_1406 DRB1_1501 DRB1_1601 DRB1_1602 DPA10103-DPB11501 DPA10104-DPB11501 DPA10301-DPB10101 DPA10301-DPB10201 DPA10301-DPB10202 DPA10301-DPB10401 DPA10301-DPB11801 DPA10301-DPB12301 DPA10301-DPB13901 DPA10301-DPB14001 DPA10301-DPB16501 DPA10401-DPB10101 DQA10102-DQB10501 DQA10102-DQB10503 DQA10102-DQB10601 DQA10102-DQB10609 DQA10102-DQB10611 DQA10103-DQB10501 DQA10103-DQB10601 DQA10103-DQB10609 DQA10201-DQB10301 DQA10201-DQB10303 DQA10401-DQB10301 DQA10401-DQB10319 DQA10501-DQB10301 DQA10501-DQB10319 DQA10503-DQB10301 DQA10505-DQB10301 DQA10505-DQB10302 DQA10505-DQB10309 DQA10505-DQB10319 DQA10505-DQB10402 DQA10506-DQB10303 DQA10508-DQB10301 DQA10509-DQB10301 DQA10601-DQB10301
AFSPEVIPMFSALSEGATPQDLNTM

SEQ ID NO: 2871 - protein, 23 aa, Human immunodeficiency virus 1
  source 1..23: note = HLAs: DRB1_0404 DRB1_0408 DRB1_0410 DRB1_1001 DQA10102-DQB10501
AFTIPSINNETPGIRYQYNVLPQ

SEQ ID NO: 2872 - protein, 24 aa, Human immunodeficiency virus 1
  source 1..24: note = HLAs: DRB1_0101 DRB1_0401 DRB1_0404 DRB1_0405 DRB1_0408 DRB1_0410 DRB1_0813 DRB1_1001 DRB1_1114 DRB1_1302 DRB1_1406 DQA10102-DQB10501
AFTIPSINNETPGIRYQYNVLPQG

SEQ ID NO: 2873 - protein, 25 aa, Human immunodeficiency virus 1
  source 1..25: note = HLAs: DRB1_0101 DRB1_0401 DRB1_0404 DRB1_0405 DRB1_0408 DRB1_0410 DRB1_0813 DRB1_1001 DRB1_1114 DRB1_1302 DRB1_1304 DRB1_1406 DRB1_1501 DRB1_1602 DPA10301-DPB10101 DPA10301-DPB10201 DPA10401-DPB10101 DQA10102-DQB10501 DQA10103-DQB10501
AFTIPSINNETPGIRYQYNVLPQGW

SEQ ID NO: 2874 - protein, 14 aa, Human immunodeficiency virus 1
  source 1..14: note = HLAs: DPA10202-DPB10101 DPA10301-DPB10101 DPA10301-DPB10201 DPA10301-DPB10202 DPA10301-DPB110601 DPA10301-DPB16501 DPA10401-DPB10101
AGLKKKKSVTVLDV

SEQ ID NO: 2875 - protein, 15 aa, Human immunodeficiency virus 1
  source 1..15: note = HLAs: DRB1_0101 DRB1_0701 DRB1_0801 DRB1_0804 DRB1_0806 DRB1_0813 DRB1_1001 DRB1_1102 DRB1_1103 DRB1_1104 DRB1_1114 DRB1_1301 DRB1_1302 DRB1_1304 DRB1_1406 DRB1_1501 DPA10103-DPB10101 DPA10103-DPB11501 DPA10103-DPB15001 DPA10104-DPB10101 DPA10104-DPB11501 DPA10105-DPB10101 DPA10105-DPB15001 DPA10202-DPB10101 DPA10202-DPB110601 DPA10202-DPB11901 DPA10301-DPB10101 DPA10301-DPB10201 DPA10301-DPB10202 DPA10301-DPB10401 DPA10301-DPB110601 DPA10301-DPB11801 DPA10301-DPB12301 DPA10301-DPB13901 DPA10301-DPB14001 DPA10301-DPB16501 DPA10401-DPB10101 DPA10401-DPB10201 DPA10401-DPB10202 DPA10401-DPB10301 DPA10401-DPB10501 DPA10401-DPB11401
AGLKKKKSVTVLDVG

SEQ ID NO: 2876 - protein, 16 aa, Human immunodeficiency virus 1
  source 1..16: note = HLAs: DRB1_1102 DRB1_1301 DPA10103-DPB11501 DPA10103-DPB15001 DPA10104-DPB11501 DPA10105-DPB15001 DPA10202-DPB10101 DPA10301-DPB10101 DPA10301-DPB10201 DPA10301-DPB10202 DPA10301-DPB110601 DPA10301-DPB11801 DPA10301-DPB16501 DPA10401-DPB10101 DPA10401-DPB11401
AGLKKKKSVTVLDVGD

SEQ ID NO: 2877 - protein, 17 aa, Human immunodeficiency virus 1
  source 1..17: note = HLAs: DRB1_0101 DRB1_1001 DRB1_1102 DRB1_1103 DRB1_1301 DRB1_1304 DPA10103-DPB10101 DPA10103-DPB11501 DPA10103-DPB15001 DPA10104-DPB10101 DPA10104-DPB11501 DPA10105-DPB10101 DPA10105-DPB15001 DPA10202-DPB10101 DPA10202-DPB110601 DPA10202-DPB11901 DPA10301-DPB10101 DPA10301-DPB10201 DPA10301-DPB10202 DPA10301-DPB110601 DPA10301-DPB11801 DPA10301-DPB14001 DPA10301-DPB16501 DPA10401-DPB10101 DPA10401-DPB11401
AGLKKKKSVTVLDVGDA

SEQ ID NO: 2878 - protein, 18 aa, Human immunodeficiency virus 1
  source 1..18: note = HLAs: DPA10301-DPB10101 DPA10401-DPB10101
AGLKKKKSVTVLDVGDAY

SEQ ID NO: 2879 - protein, 19 aa, Human immunodeficiency virus 1
  source 1..19: note = HLAs: DRB1_0101 DRB1_1001 DRB1_1102 DRB1_1301 DPA10103-DPB10101 DPA10103-DPB11501 DPA10103-DPB15001 DPA10104-DPB10101 DPA10104-DPB11501 DPA10105-DPB10101 DPA10105-DPB15001 DPA10202-DPB10101 DPA10301-DPB10101 DPA10301-DPB10201 DPA10301-DPB10202 DPA10301-DPB10401 DPA10301-DPB110601 DPA10301-DPB11801 DPA10301-DPB12301 DPA10301-DPB13901 DPA10301-DPB14001 DPA10301-DPB16501 DPA10401-DPB10101 DPA10401-DPB10202 DPA10401-DPB10501 DPA10401-DPB11401 DQA10102-DQB10501 DQA10102-DQB10604 DQA10102-DQB10609 DQA10103-DQB10609 DQA10501-DQB10201 DQA10505-DQB10201 DQA10505-DQB10202
AGLKKKKSVTVLDVGDAYF

SEQ ID NO: 2880 - protein, 20 aa, Human immunodeficiency virus 1
  source 1..20: note = HLAs: DRB1_0101 DRB1_0404 DRB1_0410 DRB1_0701 DRB1_0801 DRB1_0804 DRB1_0806 DRB1_0813 DRB1_1001 DRB1_1102 DRB1_1114 DRB1_1301 DRB1_1302 DRB1_1304 DRB1_1406 DPA10103-DPB10101 DPA10103-DPB11501 DPA10103-DPB11901 DPA10103-DPB13101 DPA10103-DPB15001 DPA10104-DPB10101 DPA10104-DPB11501 DPA10105-DPB10101 DPA10105-DPB15001 DPA10202-DPB10101 DPA10202-DPB10501 DPA10202-DPB110601 DPA10202-DPB11101 DPA10202-DPB11901 DPA10202-DPB13801 DPA10202-DPB15501 DPA10301-DPB10101 DPA10301-DPB10201 DPA10301-DPB10202 DPA10301-DPB10401 DPA10301-DPB10402 DPA10301-DPB110501 DPA10301-DPB110601 DPA10301-DPB11101 DPA10301-DPB11801 DPA10301-DPB12301 DPA10301-DPB13901 DPA10301-DPB14001 DPA10301-DPB14901 DPA10301-DPB15501 DPA10301-DPB16501 DPA10301-DPB18001 DPA10401-DPB10101 DPA10401-DPB10201 DPA10401-DPB10202 DPA10401-DPB10301 DPA10401-DPB10501 DPA10401-DPB11401 DQA10102-DQB10501 DQA10102-DQB10503 DQA10102-DQB10604 DQA10102-DQB10609 DQA10103-DQB10501 DQA10103-DQB10609
AGLKKKKSVTVLDVGDAYFS

SEQ ID NO: 2881 - protein, 21 aa, Human immunodeficiency virus 1
  source 1..21: note = HLAs: DRB1_0101 DRB1_0404 DRB1_0410 DRB1_1001 DRB1_1102 DRB1_1301 DRB1_1304 DPA10103-DPB10101 DPA10103-DPB11501 DPA10103-DPB15001 DPA10104-DPB10101 DPA10104-DPB11501 DPA10105-DPB10101 DPA10105-DPB15001 DPA10202-DPB10101 DPA10202-DPB110601 DPA10202-DPB11901 DPA10301-DPB10101 DPA10301-DPB10201 DPA10301-DPB10202 DPA10301-DPB10401 DPA10301-DPB110601 DPA10301-DPB11801 DPA10301-DPB12301 DPA10301-DPB13901 DPA10301-DPB14001 DPA10301-DPB16501 DPA10401-DPB10101 DPA10401-DPB10202 DPA10401-DPB10501 DQA10102-DQB10501 DQA10102-DQB10503 DQA10102-DQB10604 DQA10102-DQB10609 DQA10103-DQB10501 DQA10103-DQB10609
AGLKKKKSVTVLDVGDAYFSV

SEQ ID NO: 2882 - protein, 22 aa, Human immunodeficiency virus 1
  source 1..22: note = HLAs: DRB1_0101 DRB1_0404 DRB1_0410 DRB1_1001 DRB1_1102 DRB1_1301 DRB1_1304 DPA10103-DPB10101 DPA10103-DPB11501 DPA10103-DPB15001 DPA10104-DPB10101 DPA10104-DPB11501 DPA10105-DPB10101 DPA10105-DPB15001 DPA10202-DPB10101 DPA10202-DPB110601 DPA10202-DPB11901 DPA10301-DPB10101 DPA10301-DPB10201 DPA10301-DPB10202 DPA10301-DPB10401 DPA10301-DPB110601 DPA10301-DPB11801 DPA10301-DPB12301 DPA10301-DPB13901 DPA10301-DPB14001 DPA10301-DPB16501 DPA10401-DPB10101 DPA10401-DPB10201 DPA10401-DPB10202 DPA10401-DPB10501 DQA10102-DQB10501 DQA10102-DQB10503 DQA10102-DQB10604 DQA10102-DQB10609 DQA10103-DQB10501 DQA10103-DQB10609
AGLKKKKSVTVLDVGDAYFSVP

SEQ ID NO: 2883 - protein, 23 aa, Human immunodeficiency virus 1
  source 1..23: note = HLAs: DRB1_0101 DRB1_0404 DRB1_0410 DRB1_1001 DRB1_1102 DRB1_1301 DRB1_1304 DRB1_1406 DPA10103-DPB10101 DPA10103-DPB11501 DPA10103-DPB15001 DPA10104-DPB10101 DPA10104-DPB11501 DPA10105-DPB10101 DPA10105-DPB15001 DPA10202-DPB10101 DPA10202-DPB110601 DPA10202-DPB11901 DPA10301-DPB10101 DPA10301-DPB10201 DPA10301-DPB10202 DPA10301-DPB10401 DPA10301-DPB110601 DPA10301-DPB11801 DPA10301-DPB12301 DPA10301-DPB13901 DPA10301-DPB14001 DPA10301-DPB16501 DPA10401-DPB10101 DPA10401-DPB10201 DPA10401-DPB10202 DPA10401-DPB10501 DQA10102-DQB10501 DQA10102-DQB10503 DQA10102-DQB10604 DQA10102-DQB10609 DQA10103-DQB10501 DQA10103-DQB10609
AGLKKKKSVTVLDVGDAYFSVPL

SEQ ID NO: 2884 - protein, 24 aa, Human immunodeficiency virus 1
  source 1..24: note = HLAs: DRB1_0101 DRB1_0404 DRB1_0410 DRB1_1001 DRB1_1102 DRB1_1301 DRB1_1304 DRB1_1406 DPA10103-DPB10101 DPA10103-DPB11501 DPA10103-DPB11901 DPA10103-DPB13101 DPA10103-DPB15001 DPA10104-DPB10101 DPA10104-DPB11501 DPA10105-DPB10101 DPA10105-DPB15001 DPA10202-DPB10101 DPA10202-DPB110601 DPA10202-DPB11901 DPA10301-DPB10101 DPA10301-DPB10201 DPA10301-DPB10202 DPA10301-DPB10401 DPA10301-DPB110601 DPA10301-DPB11801 DPA10301-DPB12301 DPA10301-DPB13901 DPA10301-DPB14001 DPA10301-DPB16501 DPA10401-DPB10101 DPA10401-DPB10201 DPA10401-DPB10202 DPA10401-DPB10501 DQA10101-DQB10501 DQA10102-DQB10501 DQA10102-DQB10503 DQA10102-DQB10604 DQA10102-DQB10609 DQA10103-DQB10501 DQA10103-DQB10609 DQA10104-DQB10501 DQA10105-DQB10501
AGLKKKKSVTVLDVGDAYFSVPLD

SEQ ID NO: 2885 - protein, 20 aa, Human immunodeficiency virus 1
  source 1..20: note = HLAs: DRB1_0101
AHKGIGGNEQVDKLVSSGIR

SEQ ID NO: 2886 - protein, 21 aa, Human immunodeficiency virus 1
  source 1..21: note = HLAs: DRB1_0101
AHKGIGGNEQVDKLVSSGIRK

SEQ ID NO: 2887 - protein, 22 aa, Human immunodeficiency virus 1
  source 1..22: note = HLAs: DRB1_0101 DRB1_0102 DRB1_0701 DRB1_0901 DRB1_1001 DRB1_1102 DRB1_1114 DRB1_1301 DRB1_1302 DRB1_1304 DRB1_1406 DPA10202-DPB10101 DPA10301-DPB10101 DPA10301-DPB10201 DPA10301-DPB10202 DPA10301-DPB10401 DPA10301-DPB11801 DPA10301-DPB12301 DPA10301-DPB13901 DPA10301-DPB14001 DPA10401-DPB10101 DPA10401-DPB10201 DPA10401-DPB10202 DQA10102-DQB10501 DQA10103-DQB10601 DQA10103-DQB10609
AHKGIGGNEQVDKLVSSGIRKV

SEQ ID NO: 2888 - protein, 23 aa, Human immunodeficiency virus 1
  source 1..23: note = HLAs: DRB1_0101 DRB1_0102 DRB1_0701 DRB1_0806 DRB1_0901 DRB1_1001 DRB1_1102 DRB1_1103 DRB1_1104 DRB1_1114 DRB1_1301 DRB1_1302 DRB1_1304 DRB1_1401 DRB1_1406 DRB1_1454 DRB1_1501 DRB1_1602 DPA10103-DPB10201 DPA10103-DPB10202 DPA10103-DPB11501 DPA10103-DPB14801 DPA10104-DPB11501 DPA10202-DPB10101 DPA10202-DPB10201 DPA10202-DPB10202 DPA10202-DPB110601 DPA10202-DPB11901 DPA10301-DPB10101 DPA10301-DPB10201 DPA10301-DPB10202 DPA10301-DPB10401 DPA10301-DPB10402 DPA10301-DPB110501 DPA10301-DPB110601 DPA10301-DPB11801 DPA10301-DPB12301 DPA10301-DPB13901 DPA10301-DPB14001 DPA10301-DPB14901 DPA10301-DPB16501 DPA10301-DPB18001 DPA10401-DPB10101 DPA10401-DPB10201 DPA10401-DPB10202 DQA10102-DQB10501 DQA10102-DQB10601 DQA10103-DQB10501 DQA10103-DQB10601 DQA10103-DQB10602 DQA10103-DQB10609
AHKGIGGNEQVDKLVSSGIRKVL

SEQ ID NO: 2889 - protein, 24 aa, Human immunodeficiency virus 1
  source 1..24: note = HLAs: DRB1_0101 DRB1_0102 DRB1_0404 DRB1_0410 DRB1_0701 DRB1_0801 DRB1_0804 DRB1_0806 DRB1_0813 DRB1_0901 DRB1_1001 DRB1_1102 DRB1_1103 DRB1_1104 DRB1_1114 DRB1_1301 DRB1_1302 DRB1_1303 DRB1_1304 DRB1_1401 DRB1_1402 DRB1_1404 DRB1_1405 DRB1_1406 DRB1_1454 DRB1_1501 DRB1_1602 DPA10103-DPB10101 DPA10103-DPB10201 DPA10103-DPB10202 DPA10103-DPB11501 DPA10103-DPB11601 DPA10103-DPB11801 DPA10103-DPB11901 DPA10103-DPB13401 DPA10103-DPB14801 DPA10103-DPB15001 DPA10104-DPB10101 DPA10104-DPB11501 DPA10105-DPB10101 DPA10105-DPB11801 DPA10105-DPB15001 DPA10201-DPB11501 DPA10202-DPB10101 DPA10202-DPB10201 DPA10202-DPB10202 DPA10202-DPB10501 DPA10202-DPB110601 DPA10202-DPB11801 DPA10202-DPB11901 DPA10202-DPB13101 DPA10202-DPB13801 DPA10202-DPB16501 DPA10301-DPB10101 DPA10301-DPB10201 DPA10301-DPB10202 DPA10301-DPB10401 DPA10301-DPB10402 DPA10301-DPB110501 DPA10301-DPB110601 DPA10301-DPB11801 DPA10301-DPB12301 DPA10301-DPB13901 DPA10301-DPB14001 DPA10301-DPB14901 DPA10301-DPB15501 DPA10301-DPB16501; note = HLAs: DPA10301-DPB17501 DPA10301-DPB18001 DPA10401-DPB10101 DPA10401-DPB10201 DPA10401-DPB10202 DPA10401-DPB10501 DQA10102-DQB10501 DQA10102-DQB10601 DQA10102-DQB10609 DQA10103-DQB10501 DQA10103-DQB10601 DQA10103-DQB10602 DQA10103-DQB10609 DQA10201-DQB10301 DQA10505-DQB10402
AHKGIGGNEQVDKLVSSGIRKVLF

SEQ ID NO: 2890 - protein, 25 aa, Human immunodeficiency virus 1
  source 1..25: note = HLAs: DRB1_0101 DRB1_0102 DRB1_0404 DRB1_0410 DRB1_0701 DRB1_0801 DRB1_0804 DRB1_0806 DRB1_0813 DRB1_0901 DRB1_1001 DRB1_1101 DRB1_1102 DRB1_1103 DRB1_1104 DRB1_1114 DRB1_1201 DRB1_1301 DRB1_1302 DRB1_1303 DRB1_1304 DRB1_1305 DRB1_1312 DRB1_1401 DRB1_1402 DRB1_1404 DRB1_1405 DRB1_1406 DRB1_1454 DRB1_1501 DRB1_1502 DRB1_1503 DRB1_1601 DRB1_1602 DPA10103-DPB10101 DPA10103-DPB10201 DPA10103-DPB10202 DPA10103-DPB11501 DPA10103-DPB11601 DPA10103-DPB11801 DPA10103-DPB11901 DPA10103-DPB13101 DPA10103-DPB13401 DPA10103-DPB14001 DPA10103-DPB14101 DPA10103-DPB14801 DPA10103-DPB15001 DPA10104-DPB10101 DPA10104-DPB11501 DPA10105-DPB10101 DPA10105-DPB11801 DPA10105-DPB15001 DPA10106-DPB10101 DPA10201-DPB10101 DPA10201-DPB110601 DPA10201-DPB11501 DPA10201-DPB11901 DPA10202-DPB10101 DPA10202-DPB10201 DPA10202-DPB10202 DPA10202-DPB10501 DPA10202-DPB110601 DPA10202-DPB11801 DPA10202-DPB11901 DPA10202-DPB13101 DPA10202-DPB13801 DPA10202-DPB16501 DPA10301-DPB10101 DPA10301-DPB10201 DPA10301-DPB10202; note = HLAs: DPA10301-DPB10401 DPA10301-DPB10402 DPA10301-DPB110501 DPA10301-DPB110601 DPA10301-DPB11801 DPA10301-DPB12301 DPA10301-DPB13901 DPA10301-DPB14001 DPA10301-DPB14901 DPA10301-DPB15501 DPA10301-DPB16501 DPA10301-DPB17501 DPA10301-DPB18001 DPA10401-DPB10101 DPA10401-DPB10201 DPA10401-DPB10202 DPA10401-DPB10402 DPA10401-DPB10501 DPA10401-DPB110501 DPA10401-DPB14901 DQA10102-DQB10501 DQA10102-DQB10601 DQA10102-DQB10602 DQA10102-DQB10609 DQA10103-DQB10501 DQA10103-DQB10601 DQA10103-DQB10602 DQA10103-DQB10609 DQA10201-DQB10301 DQA10505-DQB10402
AHKGIGGNEQVDKLVSSGIRKVLFL

SEQ ID NO: 2891 - protein, 14 aa, Human immunodeficiency virus 1
  source 1..14: note = HLAs: DQA10201-DQB10301 DQA10201-DQB10303 DQA10501-DQB10301 DQA10501-DQB10319 DQA10503-DQB10301 DQA10505-DQB10301 DQA10505-DQB10309 DQA10505-DQB10319 DQA10506-DQB10303 DQA10508-DQB10301 DQA10509-DQB10301
AIGTVLVGPTPVNI

SEQ ID NO: 2892 - protein, 15 aa, Human immunodeficiency virus 1
  source 1..15: note = HLAs: DRB1_0101 DRB1_0102 DRB1_0701 DRB1_0813 DRB1_0901 DRB1_1001 DRB1_1114 DRB1_1302 DRB1_1406 DQA10102-DQB10501 DQA10102-DQB10601 DQA10103-DQB10601 DQA10103-DQB10609 DQA10201-DQB10301 DQA10201-DQB10303 DQA10501-DQB10301 DQA10501-DQB10319 DQA10503-DQB10301 DQA10505-DQB10301 DQA10505-DQB10309 DQA10505-DQB10319 DQA10505-DQB10402 DQA10506-DQB10303 DQA10508-DQB10301 DQA10509-DQB10301 DQA10601-DQB10301
AIGTVLVGPTPVNII

SEQ ID NO: 2893 - protein, 16 aa, Human immunodeficiency virus 1
  source 1..16: note = HLAs: DRB1_0101 DQA10102-DQB10501 DQA10102-DQB10601 DQA10103-DQB10601 DQA10103-DQB10609 DQA10201-DQB10301 DQA10201-DQB10303 DQA10501-DQB10301 DQA10501-DQB10319 DQA10503-DQB10301 DQA10505-DQB10301 DQA10505-DQB10309 DQA10505-DQB10319 DQA10506-DQB10303 DQA10508-DQB10301 DQA10509-DQB10301 DQA10601-DQB10301
AIGTVLVGPTPVNIIG

SEQ ID NO: 2894 - protein, 17 aa, Human immunodeficiency virus 1
  source 1..17: note = HLAs: DRB1_0101 DRB1_0701 DRB1_0901 DRB1_1001 DQA10102-DQB10501 DQA10102-DQB10601 DQA10103-DQB10601 DQA10103-DQB10609 DQA10201-DQB10301 DQA10201-DQB10303 DQA10501-DQB10301 DQA10501-DQB10319 DQA10503-DQB10301 DQA10505-DQB10301 DQA10505-DQB10309 DQA10505-DQB10319 DQA10506-DQB10303 DQA10508-DQB10301 DQA10509-DQB10301
AIGTVLVGPTPVNIIGR

SEQ ID NO: 2895 - protein, 18 aa, Human immunodeficiency virus 1
  source 1..18: note = HLAs: DQA10201-DQB10301
AIGTVLVGPTPVNIIGRN

SEQ ID NO: 2896 - protein, 15 aa, Human immunodeficiency virus 1
  source 1..15: note = HLAs: DRB1_1102 DRB1_1103 DRB1_1104 DRB1_1301 DRB1_1304
AIKKKDSTKWRKLVD

SEQ ID NO: 2897 - protein, 16 aa, Human immunodeficiency virus 1
  source 1..16: note = HLAs: DRB1_1103
AIKKKDSTKWRKLVDF

SEQ ID NO: 2898 - protein, 17 aa, Human immunodeficiency virus 1
  source 1..17: note = HLAs: DRB1_1102 DRB1_1103 DRB1_1301 DRB1_1304
AIKKKDSTKWRKLVDFR

SEQ ID NO: 2899 - protein, 19 aa, Human immunodeficiency virus 1
  source 1..19: note = HLAs: DRB1_0405 DRB1_1304 DPA10103-DPB10101 DPA10103-DPB10201 DPA10103-DPB10202 DPA10103-DPB11501 DPA10103-DPB11601 DPA10103-DPB11901 DPA10103-DPB13101 DPA10103-DPB13401 DPA10103-DPB14801 DPA10104-DPB10101 DPA10104-DPB11501 DPA10105-DPB10101 DPA10201-DPB110601 DPA10201-DPB11601 DPA10201-DPB11901 DPA10202-DPB10101 DPA10202-DPB110601 DPA10202-DPB11901 DPA10202-DPB13101 DPA10202-DPB16501 DPA10301-DPB10101 DPA10301-DPB10201 DPA10301-DPB10202 DPA10301-DPB10401 DPA10301-DPB110601 DPA10301-DPB11801 DPA10301-DPB12301 DPA10301-DPB13901 DPA10301-DPB14001 DPA10301-DPB16501 DPA10401-DPB10101 DPA10401-DPB10201 DPA10401-DPB10202 DPA10401-DPB10501
AIKKKDSTKWRKLVDFREL

SEQ ID NO: 2900 - protein, 20 aa, Human immunodeficiency virus 1
  source 1..20: note = HLAs: DRB1_0405 DRB1_0410 DRB1_0806 DRB1_1001 DRB1_1102 DRB1_1103 DRB1_1301 DRB1_1304 DPA10103-DPB10101 DPA10103-DPB10201 DPA10103-DPB10202 DPA10103-DPB10501 DPA10103-DPB11501 DPA10103-DPB11601 DPA10103-DPB11901 DPA10103-DPB13101 DPA10103-DPB13401 DPA10103-DPB14001 DPA10103-DPB14101 DPA10103-DPB14801 DPA10103-DPB15001 DPA10104-DPB10101 DPA10104-DPB11501 DPA10105-DPB10101 DPA10105-DPB15001 DPA10106-DPB10101 DPA10201-DPB10101 DPA10201-DPB10501 DPA10201-DPB110601 DPA10201-DPB11501 DPA10201-DPB11601 DPA10201-DPB11901 DPA10202-DPB10101 DPA10202-DPB10202 DPA10202-DPB10501 DPA10202-DPB110601 DPA10202-DPB11901 DPA10202-DPB13101 DPA10202-DPB13801 DPA10202-DPB16501 DPA10301-DPB10101 DPA10301-DPB10201 DPA10301-DPB10202 DPA10301-DPB10401 DPA10301-DPB110601 DPA10301-DPB11801 DPA10301-DPB12301 DPA10301-DPB13901 DPA10301-DPB14001 DPA10301-DPB15501 DPA10301-DPB16501 DPA10401-DPB10101 DPA10401-DPB10201 DPA10401-DPB10202 DPA10401-DPB10501
AIKKKDSTKWRKLVDFRELN

SEQ ID NO: 2901 - protein, 21 aa, Human immunodeficiency virus 1
  source 1..21: note = HLAs: DRB1_0405 DRB1_0410 DRB1_0806 DRB1_1001 DRB1_1103 DRB1_1304 DPA10103-DPB10101 DPA10103-DPB10201 DPA10103-DPB10202 DPA10103-DPB10501 DPA10103-DPB11501 DPA10103-DPB11601 DPA10103-DPB11901 DPA10103-DPB13101 DPA10103-DPB13401 DPA10103-DPB14001 DPA10103-DPB14101 DPA10103-DPB14801 DPA10103-DPB15001 DPA10104-DPB10101 DPA10104-DPB11501 DPA10105-DPB10101 DPA10105-DPB15001 DPA10106-DPB10101 DPA10201-DPB10101 DPA10201-DPB110601 DPA10201-DPB11501 DPA10201-DPB11601 DPA10201-DPB11901 DPA10202-DPB10101 DPA10202-DPB10501 DPA10202-DPB110601 DPA10202-DPB11901 DPA10202-DPB13101 DPA10202-DPB13801 DPA10202-DPB16501 DPA10301-DPB10101 DPA10301-DPB10201 DPA10301-DPB10202 DPA10301-DPB10401 DPA10301-DPB110601 DPA10301-DPB11801 DPA10301-DPB12301 DPA10301-DPB13901 DPA10301-DPB14001 DPA10301-DPB15501 DPA10301-DPB16501 DPA10401-DPB10101 DPA10401-DPB10201 DPA10401-DPB10202 DPA10401-DPB10501
AIKKKDSTKWRKLVDFRELNK

SEQ ID NO: 2902 - protein, 22 aa, Human immunodeficiency virus 1
  source 1..22: note = HLAs: DRB1_0405 DRB1_0410 DRB1_0806 DRB1_1001 DRB1_1102 DRB1_1103 DRB1_1104 DRB1_1301 DRB1_1304 DPA10103-DPB10101 DPA10103-DPB10201 DPA10103-DPB10202 DPA10103-DPB10501 DPA10103-DPB11501 DPA10103-DPB11601 DPA10103-DPB11801 DPA10103-DPB11901 DPA10103-DPB13101 DPA10103-DPB13401 DPA10103-DPB14001 DPA10103-DPB14101 DPA10103-DPB14801 DPA10103-DPB15001 DPA10104-DPB10101 DPA10104-DPB11501 DPA10105-DPB10101 DPA10105-DPB11801 DPA10105-DPB15001 DPA10106-DPB10101 DPA10201-DPB10101 DPA10201-DPB10501 DPA10201-DPB110601 DPA10201-DPB11501 DPA10201-DPB11601 DPA10201-DPB11901 DPA10202-DPB10101 DPA10202-DPB10201 DPA10202-DPB10202 DPA10202-DPB10501 DPA10202-DPB110601 DPA10202-DPB11901 DPA10202-DPB13101 DPA10202-DPB13801 DPA10202-DPB15501 DPA10202-DPB16501 DPA10301-DPB10101 DPA10301-DPB10201 DPA10301-DPB10202 DPA10301-DPB10401 DPA10301-DPB10402 DPA10301-DPB110501 DPA10301-DPB110601 DPA10301-DPB11801 DPA10301-DPB12301 DPA10301-DPB13901 DPA10301-DPB14001 DPA10301-DPB14901 DPA10301-DPB15501 DPA10301-DPB16501; note = HLAs: DPA10301-DPB18001 DPA10401-DPB10101 DPA10401-DPB10201 DPA10401-DPB10202 DPA10401-DPB10501
AIKKKDSTKWRKLVDFRELNKR

SEQ ID NO: 2903 - protein, 23 aa, Human immunodeficiency virus 1
  source 1..23: note = HLAs: DRB1_0405 DRB1_0410 DRB1_0806 DRB1_1001 DRB1_1102 DRB1_1103 DRB1_1104 DRB1_1301 DRB1_1304 DPA10103-DPB10101 DPA10103-DPB10201 DPA10103-DPB10202 DPA10103-DPB10501 DPA10103-DPB11501 DPA10103-DPB11601 DPA10103-DPB11801 DPA10103-DPB11901 DPA10103-DPB13101 DPA10103-DPB13401 DPA10103-DPB14001 DPA10103-DPB14101 DPA10103-DPB14801 DPA10103-DPB15001 DPA10104-DPB10101 DPA10104-DPB11501 DPA10105-DPB10101 DPA10105-DPB11801 DPA10105-DPB15001 DPA10106-DPB10101 DPA10201-DPB10101 DPA10201-DPB10501 DPA10201-DPB110601 DPA10201-DPB11501 DPA10201-DPB11601 DPA10201-DPB11901 DPA10202-DPB10101 DPA10202-DPB10201 DPA10202-DPB10202 DPA10202-DPB10501 DPA10202-DPB110601 DPA10202-DPB11901 DPA10202-DPB13101 DPA10202-DPB13801 DPA10202-DPB15501 DPA10202-DPB16501 DPA10301-DPB10101 DPA10301-DPB10201 DPA10301-DPB10202 DPA10301-DPB10401 DPA10301-DPB10402 DPA10301-DPB110501 DPA10301-DPB110601 DPA10301-DPB11801 DPA10301-DPB12301 DPA10301-DPB13901 DPA10301-DPB14001 DPA10301-DPB14901 DPA10301-DPB15501 DPA10301-DPB16501; note = HLAs: DPA10301-DPB18001 DPA10401-DPB10101 DPA10401-DPB10201 DPA10401-DPB10202 DPA10401-DPB10501
AIKKKDSTKWRKLVDFRELNKRT

SEQ ID NO: 2904 - protein, 24 aa, Human immunodeficiency virus 1
  source 1..24: note = HLAs: DRB1_0405 DRB1_0410 DRB1_0801 DRB1_0806 DRB1_1001 DRB1_1101 DRB1_1102 DRB1_1103 DRB1_1104 DRB1_1301 DRB1_1304 DRB1_1305 DPA10103-DPB10101 DPA10103-DPB10201 DPA10103-DPB10202 DPA10103-DPB10501 DPA10103-DPB11501 DPA10103-DPB11601 DPA10103-DPB11801 DPA10103-DPB11901 DPA10103-DPB13101 DPA10103-DPB13401 DPA10103-DPB14001 DPA10103-DPB14101 DPA10103-DPB14801 DPA10103-DPB15001 DPA10104-DPB10101 DPA10104-DPB11501 DPA10105-DPB10101 DPA10105-DPB11801 DPA10105-DPB15001 DPA10106-DPB10101 DPA10201-DPB10101 DPA10201-DPB10501 DPA10201-DPB110601 DPA10201-DPB11501 DPA10201-DPB11601 DPA10201-DPB11901 DPA10201-DPB13401 DPA10202-DPB10101 DPA10202-DPB10201 DPA10202-DPB10202 DPA10202-DPB10501 DPA10202-DPB110601 DPA10202-DPB11801 DPA10202-DPB11901 DPA10202-DPB13101 DPA10202-DPB13801 DPA10202-DPB15501 DPA10202-DPB16501 DPA10301-DPB10101 DPA10301-DPB10201 DPA10301-DPB10202 DPA10301-DPB10401 DPA10301-DPB10402 DPA10301-DPB110501 DPA10301-DPB110601 DPA10301-DPB11801 DPA10301-DPB12301 DPA10301-DPB13901; note = HLAs: DPA10301-DPB14001 DPA10301-DPB14901 DPA10301-DPB15501 DPA10301-DPB16501 DPA10301-DPB18001 DPA10401-DPB10101 DPA10401-DPB10201 DPA10401-DPB10202 DPA10401-DPB10501
AIKKKDSTKWRKLVDFRELNKRTQ

SEQ ID NO: 2905 - protein, 25 aa, Human immunodeficiency virus 1
  source 1..25: note = HLAs: DRB1_0405 DRB1_0410 DRB1_0801 DRB1_0806 DRB1_1001 DRB1_1101 DRB1_1102 DRB1_1103 DRB1_1104 DRB1_1301 DRB1_1304 DRB1_1305 DPA10103-DPB10101 DPA10103-DPB10201 DPA10103-DPB10202 DPA10103-DPB10501 DPA10103-DPB11501 DPA10103-DPB11601 DPA10103-DPB11801 DPA10103-DPB11901 DPA10103-DPB13101 DPA10103-DPB13401 DPA10103-DPB14001 DPA10103-DPB14101 DPA10103-DPB14801 DPA10103-DPB15001 DPA10103-DPB15901 DPA10104-DPB10101 DPA10104-DPB11501 DPA10105-DPB10101 DPA10105-DPB11801 DPA10105-DPB15001 DPA10106-DPB10101 DPA10201-DPB10101 DPA10201-DPB10501 DPA10201-DPB110601 DPA10201-DPB11501 DPA10201-DPB11601 DPA10201-DPB11901 DPA10201-DPB13401 DPA10202-DPB10101 DPA10202-DPB10201 DPA10202-DPB10202 DPA10202-DPB10501 DPA10202-DPB110601 DPA10202-DPB11801 DPA10202-DPB11901 DPA10202-DPB13101 DPA10202-DPB13801 DPA10202-DPB15501 DPA10202-DPB16501 DPA10301-DPB10101 DPA10301-DPB10201 DPA10301-DPB10202 DPA10301-DPB10401 DPA10301-DPB10402 DPA10301-DPB110501 DPA10301-DPB110601 DPA10301-DPB11801 DPA10301-DPB12301; note = HLAs: DPA10301-DPB13901 DPA10301-DPB14001 DPA10301-DPB14901 DPA10301-DPB15501 DPA10301-DPB16501 DPA10301-DPB18001 DPA10401-DPB10101 DPA10401-DPB10201 DPA10401-DPB10202 DPA10401-DPB10501
AIKKKDSTKWRKLVDFRELNKRTQD

SEQ ID NO: 2906 - protein, 15 aa, Human immunodeficiency virus 1
  source 1..15: note = HLAs: DRB1_1406
AKEIVASCDKCQLKG

SEQ ID NO: 2907 - protein, 13 aa, Human immunodeficiency virus 1
  source 1..13: note = HLAs: DRB1_0301
AKIIRDYGKQMAG

SEQ ID NO: 2908 - protein, 14 aa, Human immunodeficiency virus 1
  source 1..14: note = HLAs: DRB1_0301 DRB1_1102 DRB1_1103 DRB1_1104 DRB1_1301 DRB1_1304
AKIIRDYGKQMAGD

SEQ ID NO: 2909 - protein, 15 aa, Human immunodeficiency virus 1
  source 1..15: note = HLAs: DRB1_0301 DRB1_0806 DRB1_1102 DRB1_1103 DRB1_1104 DRB1_1114 DRB1_1301 DRB1_1302 DRB1_1304 DRB1_1406 DRB1_1501
AKIIRDYGKQMAGDD

SEQ ID NO: 2910 - protein, 16 aa, Human immunodeficiency virus 1
  source 1..16: note = HLAs: DRB1_0301 DRB1_1102 DRB1_1103 DRB1_1104 DRB1_1301 DRB1_1304
AKIIRDYGKQMAGDDC

SEQ ID NO: 2911 - protein, 17 aa, Human immunodeficiency virus 1
  source 1..17: note = HLAs: DRB1_0301 DRB1_1102 DRB1_1103 DRB1_1104 DRB1_1301 DRB1_1304
AKIIRDYGKQMAGDDCV

SEQ ID NO: 2912 - protein, 19 aa, Human immunodeficiency virus 1
  source 1..19: note = HLAs: DRB1_0301 DRB1_1103 DRB1_1304
AKIIRDYGKQMAGDDCVAG

SEQ ID NO: 2913 - protein, 20 aa, Human immunodeficiency virus 1
  source 1..20: note = HLAs: DRB1_0301 DRB1_1102 DRB1_1103 DRB1_1114 DRB1_1301 DRB1_1302 DRB1_1304 DRB1_1501 DQA10102-DQB10501
AKIIRDYGKQMAGDDCVAGR

SEQ ID NO: 2914 - protein, 21 aa, Human immunodeficiency virus 1
  source 1..21: note = HLAs: DRB1_0301 DRB1_1102 DRB1_1103 DRB1_1301 DRB1_1304
AKIIRDYGKQMAGDDCVAGRQ

SEQ ID NO: 2915 - protein, 22 aa, Human immunodeficiency virus 1
  source 1..22: note = HLAs: DRB1_0301 DRB1_1102 DRB1_1103 DRB1_1301 DRB1_1304
AKIIRDYGKQMAGDDCVAGRQD

SEQ ID NO: 2916 - protein, 23 aa, Human immunodeficiency virus 1
  source 1..23: note = HLAs: DRB1_0301 DRB1_1102 DRB1_1103 DRB1_1301 DRB1_1304
AKIIRDYGKQMAGDDCVAGRQDE

SEQ ID NO: 2917 - protein, 24 aa, Human immunodeficiency virus 1
  source 1..24: note = HLAs: DRB1_0301 DRB1_1102 DRB1_1103 DRB1_1301 DRB1_1304
AKIIRDYGKQMAGDDCVAGRQDED

SEQ ID NO: 2918 - protein, 13 aa, Human immunodeficiency virus 1
  source 1..13: note = HLAs: DRB1_0101 DRB1_0701 DRB1_0901
AKLLWKGEGAVVI

SEQ ID NO: 2919 - protein, 14 aa, Human immunodeficiency virus 1
  source 1..14: note = HLAs: DRB1_0101 DRB1_0102 DRB1_0701 DRB1_0901 DRB1_1001 DRB1_1114 DRB1_1302 DRB1_1602 DPA10301-DPB10101 DPA10301-DPB10201 DPA10301-DPB10202 DPA10401-DPB10101 DQA10102-DQB10501 DQA10201-DQB10301 DQA10501-DQB10301 DQA10501-DQB10319 DQA10503-DQB10301 DQA10505-DQB10301 DQA10505-DQB10309 DQA10505-DQB10319 DQA10508-DQB10301 DQA10509-DQB10301
AKLLWKGEGAVVIQ

SEQ ID NO: 2920 - protein, 15 aa, Human immunodeficiency virus 1
  source 1..15: note = HLAs: DRB1_0101 DRB1_0102 DRB1_0103 DRB1_0701 DRB1_0813 DRB1_0901 DRB1_1001 DRB1_1102 DRB1_1114 DRB1_1301 DRB1_1302 DRB1_1304 DRB1_1502 DRB1_1602 DPA10301-DPB10101 DPA10301-DPB10201 DPA10301-DPB10202 DPA10401-DPB10101 DPA10401-DPB10201 DPA10401-DPB10202 DQA10102-DQB10501 DQA10102-DQB10601 DQA10102-DQB10609 DQA10103-DQB10501 DQA10103-DQB10601 DQA10201-DQB10301 DQA10301-DQB10301 DQA10302-DQB10301 DQA10303-DQB10301 DQA10401-DQB10301 DQA10401-DQB10319 DQA10501-DQB10301 DQA10501-DQB10319 DQA10503-DQB10301 DQA10505-DQB10301 DQA10505-DQB10309 DQA10505-DQB10319 DQA10505-DQB10402 DQA10508-DQB10301 DQA10509-DQB10301 DQA10601-DQB10301
AKLLWKGEGAVVIQD

SEQ ID NO: 2921 - protein, 16 aa, Human immunodeficiency virus 1
  source 1..16: note = HLAs: DRB1_0101 DRB1_0102 DRB1_0701 DRB1_0901 DRB1_1001 DRB1_1114 DRB1_1302 DRB1_1602 DPA10301-DPB10101 DPA10301-DPB10201 DPA10301-DPB10202 DPA10401-DPB10101 DPA10401-DPB10202 DQA10102-DQB10501 DQA10102-DQB10601 DQA10102-DQB10609 DQA10103-DQB10501 DQA10103-DQB10601 DQA10201-DQB10301 DQA10201-DQB10303 DQA10301-DQB10301 DQA10301-DQB10304 DQA10302-DQB10301 DQA10302-DQB10304 DQA10303-DQB10301 DQA10303-DQB10304 DQA10401-DQB10301 DQA10401-DQB10319 DQA10501-DQB10203 DQA10501-DQB10301 DQA10501-DQB10319 DQA10503-DQB10301 DQA10505-DQB10301 DQA10505-DQB10302 DQA10505-DQB10309 DQA10505-DQB10319 DQA10506-DQB10303 DQA10508-DQB10301 DQA10509-DQB10301 DQA10601-DQB10301
AKLLWKGEGAVVIQDN

SEQ ID NO: 2922 - protein, 17 aa, Human immunodeficiency virus 1
  source 1..17: note = HLAs: DRB1_0101 DRB1_0102 DRB1_0701 DRB1_0901 DRB1_1001 DRB1_1114 DRB1_1302 DRB1_1602 DPA10301-DPB10101 DPA10301-DPB10201 DPA10301-DPB10202 DPA10401-DPB10101 DQA10102-DQB10501 DQA10102-DQB10601 DQA10102-DQB10609 DQA10103-DQB10501 DQA10103-DQB10601 DQA10201-DQB10301 DQA10301-DQB10301 DQA10302-DQB10301 DQA10303-DQB10301 DQA10401-DQB10301 DQA10401-DQB10319 DQA10501-DQB10301 DQA10501-DQB10319 DQA10503-DQB10301 DQA10505-DQB10301 DQA10505-DQB10309 DQA10505-DQB10319 DQA10508-DQB10301 DQA10509-DQB10301 DQA10601-DQB10301
AKLLWKGEGAVVIQDNS

SEQ ID NO: 2923 - protein, 15 aa, Human immunodeficiency virus 1
  source 1..15: note = HLAs: DRB1_0101 DRB1_0102 DRB1_0404 DRB1_0410 DRB1_1001 DQA10102-DQB10501
ALGIIQAQPDKSESE

SEQ ID NO: 2924 - protein, 16 aa, Human immunodeficiency virus 1
  source 1..16: note = HLAs: DRB1_1001 DQA10102-DQB10501
ALGIIQAQPDKSESEL

SEQ ID NO: 2925 - protein, 14 aa, Human immunodeficiency virus 1
  source 1..14: note = HLAs: DQA10201-DQB10301
ALSEGATPQDLNTM

SEQ ID NO: 2926 - protein, 15 aa, Human immunodeficiency virus 1
  source 1..15: note = HLAs: DQA10201-DQB10301
ALSEGATPQDLNTML

SEQ ID NO: 2927 - protein, 16 aa, Human immunodeficiency virus 1
  source 1..16: note = HLAs: DQA10201-DQB10301
ALSEGATPQDLNTMLN

SEQ ID NO: 2928 - protein, 20 aa, Human immunodeficiency virus 1
  source 1..20: note = HLAs: DQA10102-DQB10501
ALSEGATPQDLNTMLNTVGG

SEQ ID NO: 2929 - protein, 21 aa, Human immunodeficiency virus 1
  source 1..21: note = HLAs: DRB1_0404
ALSEGATPQDLNTMLNTVGGH

SEQ ID NO: 2930 - protein, 22 aa, Human immunodeficiency virus 1
  source 1..22: note = HLAs: DRB1_0404 DRB1_0408 DRB1_1001
ALSEGATPQDLNTMLNTVGGHQ

SEQ ID NO: 2931 - protein, 23 aa, Human immunodeficiency virus 1
  source 1..23: note = HLAs: DRB1_0404 DRB1_0408 DRB1_1001 DQA10102-DQB10501
ALSEGATPQDLNTMLNTVGGHQA

SEQ ID NO: 2932 - protein, 24 aa, Human immunodeficiency virus 1
  source 1..24: note = HLAs: DRB1_0101 DRB1_0404 DRB1_0408 DRB1_1001 DQA10102-DQB10501
ALSEGATPQDLNTMLNTVGGHQAA

SEQ ID NO: 2933 - protein, 25 aa, Human immunodeficiency virus 1
  source 1..25: note = HLAs: DRB1_0101 DRB1_0404 DRB1_0408 DRB1_1001 DQA10102-DQB10501 DQA10102-DQB10601 DQA10103-DQB10601 DQA10201-DQB10301
ALSEGATPQDLNTMLNTVGGHQAAM

SEQ ID NO: 2934 - protein, 13 aa, Human immunodeficiency virus 1
  source 1..13: note = HLAs: DQA10102-DQB10501
AMASDFNLPPVVA

SEQ ID NO: 2935 - protein, 14 aa, Human immunodeficiency virus 1
  source 1..14: note = HLAs: DQA10102-DQB10501
AMASDFNLPPVVAK

SEQ ID NO: 2936 - protein, 15 aa, Human immunodeficiency virus 1
  source 1..15: note = HLAs: DRB1_0101 DRB1_1001 DQA10102-DQB10501 DQA10102-DQB10503
AMASDFNLPPVVAKE

SEQ ID NO: 2937 - protein, 16 aa, Human immunodeficiency virus 1
  source 1..16: note = HLAs: DRB1_1001 DQA10102-DQB10501 DQA10102-DQB10503
AMASDFNLPPVVAKEI

SEQ ID NO: 2938 - protein, 17 aa, Human immunodeficiency virus 1
  source 1..17: note = HLAs: DRB1_0101 DRB1_1001 DQA10102-DQB10501
AMASDFNLPPVVAKEIV

SEQ ID NO: 2939 - protein, 18 aa, Human immunodeficiency virus 1
  source 1..18: note = HLAs: DQA10102-DQB10501
AMASDFNLPPVVAKEIVA

SEQ ID NO: 2940 - protein, 14 aa, Human immunodeficiency virus 1
  source 1..14: note = HLAs: DQA10102-DQB10501
AMQMLKDTINEEAA

SEQ ID NO: 2941 - protein, 15 aa, Human immunodeficiency virus 1
  source 1..15: note = HLAs: DQA10102-DQB10501
AMQMLKDTINEEAAE

SEQ ID NO: 2942 - protein, 16 aa, Human immunodeficiency virus 1
  source 1..16: note = HLAs: DQA10102-DQB10501 DQA10102-DQB10609
AMQMLKDTINEEAAEW

SEQ ID NO: 2943 - protein, 17 aa, Human immunodeficiency virus 1
  source 1..17: note = HLAs: DQA10102-DQB10501
AMQMLKDTINEEAAEWD

SEQ ID NO: 2944 - protein, 13 aa, Human immunodeficiency virus 1
  source 1..13: note = HLAs: DPA10401-DPB10101 DPA10401-DPB10301 DPA10401-DPB11401
ARVLAEAMSQVTN

SEQ ID NO: 2945 - protein, 15 aa, Human immunodeficiency virus 1
  source 1..15: note = HLAs: DRB1_0101 DRB1_1001
ASDFNLPPVVAKEIV

SEQ ID NO: 2946 - protein, 13 aa, Human immunodeficiency virus 1
  source 1..13: note = HLAs: DRB1_0101 DRB1_0401 DRB1_0408 DRB1_1001 DQA10201-DQB10301 DQA10301-DQB10302 DQA10302-DQB10302 DQA10303-DQB10302 DQA10401-DQB10301 DQA10401-DQB10319 DQA10501-DQB10201 DQA10501-DQB10203 DQA10505-DQB10201 DQA10505-DQB10202
ASGYIEAEVIPAE

SEQ ID NO: 2947 - protein, 14 aa, Human immunodeficiency virus 1
  source 1..14: note = HLAs: DRB1_0101 DRB1_0401 DRB1_0405 DRB1_0408 DRB1_0901 DRB1_1001 DPA10301-DPB10101 DPA10401-DPB10101 DQA10102-DQB10501 DQA10102-DQB10609 DQA10201-DQB10201 DQA10201-DQB10202 DQA10201-DQB10301 DQA10201-DQB10302 DQA10201-DQB10303 DQA10301-DQB10301 DQA10301-DQB10302 DQA10301-DQB10304 DQA10302-DQB10301 DQA10302-DQB10302 DQA10302-DQB10304 DQA10303-DQB10301 DQA10303-DQB10302 DQA10303-DQB10304 DQA10401-DQB10201 DQA10401-DQB10301 DQA10401-DQB10319 DQA10401-DQB10402 DQA10402-DQB10402 DQA10501-DQB10201 DQA10501-DQB10203 DQA10501-DQB10301 DQA10501-DQB10319 DQA10503-DQB10301 DQA10505-DQB10201 DQA10505-DQB10202 DQA10505-DQB10301 DQA10505-DQB10302 DQA10505-DQB10309 DQA10505-DQB10319 DQA10506-DQB10303 DQA10508-DQB10301 DQA10509-DQB10301 DQA10601-DQB10301
ASGYIEAEVIPAET

SEQ ID NO: 2948 - protein, 15 aa, Human immunodeficiency virus 1
  source 1..15: note = HLAs: DRB1_0101 DRB1_0102 DRB1_0401 DRB1_0404 DRB1_0405 DRB1_0408 DRB1_0701 DRB1_0813 DRB1_0901 DRB1_1001 DPA10301-DPB10101 DPA10401-DPB10101 DQA10102-DQB10501 DQA10102-DQB10601 DQA10102-DQB10609 DQA10103-DQB10601 DQA10103-DQB10609 DQA10201-DQB10301 DQA10201-DQB10302 DQA10201-DQB10303 DQA10301-DQB10301 DQA10301-DQB10302 DQA10301-DQB10304 DQA10302-DQB10301 DQA10302-DQB10302 DQA10302-DQB10304 DQA10303-DQB10301 DQA10303-DQB10302 DQA10303-DQB10304 DQA10401-DQB10301 DQA10401-DQB10319 DQA10401-DQB10402 DQA10402-DQB10402 DQA10501-DQB10201 DQA10501-DQB10203 DQA10501-DQB10301 DQA10501-DQB10319 DQA10503-DQB10301 DQA10505-DQB10201 DQA10505-DQB10202 DQA10505-DQB10301 DQA10505-DQB10302 DQA10505-DQB10309 DQA10505-DQB10319 DQA10506-DQB10303 DQA10508-DQB10301 DQA10509-DQB10301 DQA10601-DQB10301
ASGYIEAEVIPAETG

SEQ ID NO: 2949 - protein, 16 aa, Human immunodeficiency virus 1
  source 1..16: note = HLAs: DRB1_0101 DRB1_0401 DRB1_0405 DRB1_0408 DRB1_0901 DRB1_1001 DPA10301-DPB10101 DPA10401-DPB10101 DQA10102-DQB10501 DQA10102-DQB10503 DQA10102-DQB10601 DQA10102-DQB10609 DQA10102-DQB10611 DQA10103-DQB10601 DQA10201-DQB10301 DQA10201-DQB10302 DQA10201-DQB10303 DQA10301-DQB10301 DQA10301-DQB10302 DQA10301-DQB10304 DQA10302-DQB10301 DQA10302-DQB10302 DQA10302-DQB10304 DQA10303-DQB10301 DQA10303-DQB10302 DQA10303-DQB10304 DQA10401-DQB10301 DQA10401-DQB10319 DQA10401-DQB10402 DQA10402-DQB10402 DQA10501-DQB10201 DQA10501-DQB10203 DQA10501-DQB10301 DQA10501-DQB10319 DQA10503-DQB10301 DQA10505-DQB10201 DQA10505-DQB10202 DQA10505-DQB10301 DQA10505-DQB10302 DQA10505-DQB10309 DQA10505-DQB10319 DQA10506-DQB10303 DQA10508-DQB10301 DQA10509-DQB10301 DQA10601-DQB10301
ASGYIEAEVIPAETGQ

SEQ ID NO: 2950 - protein, 17 aa, Human immunodeficiency virus 1
  source 1..17: note = HLAs: DRB1_0101 DRB1_0401 DRB1_0405 DRB1_0408 DRB1_0901 DRB1_1001 DPA10301-DPB10101 DPA10401-DPB10101 DQA10102-DQB10501 DQA10102-DQB10601 DQA10102-DQB10609 DQA10103-DQB10601 DQA10201-DQB10301 DQA10401-DQB10301 DQA10401-DQB10319 DQA10501-DQB10201 DQA10501-DQB10203 DQA10501-DQB10301 DQA10501-DQB10319 DQA10503-DQB10301 DQA10505-DQB10201 DQA10505-DQB10202 DQA10505-DQB10301 DQA10505-DQB10302 DQA10505-DQB10309 DQA10505-DQB10319 DQA10506-DQB10303 DQA10508-DQB10301 DQA10509-DQB10301
ASGYIEAEVIPAETGQE

SEQ ID NO: 2951 - protein, 18 aa, Human immunodeficiency virus 1
  source 1..18: note = HLAs: DRB1_1001 DQA10201-DQB10301 DQA10401-DQB10301 DQA10401-DQB10319 DQA10501-DQB10201 DQA10505-DQB10201 DQA10505-DQB10202
ASGYIEAEVIPAETGQET

SEQ ID NO: 2952 - protein, 19 aa, Human immunodeficiency virus 1
  source 1..19: note = HLAs: DRB1_0101 DRB1_0401 DRB1_0408 DRB1_0901 DRB1_1001 DPA10301-DPB10101 DPA10401-DPB10101 DQA10102-DQB10501 DQA10102-DQB10601 DQA10102-DQB10609 DQA10201-DQB10301 DQA10301-DQB10302 DQA10302-DQB10302 DQA10303-DQB10302 DQA10401-DQB10301 DQA10401-DQB10319 DQA10501-DQB10201 DQA10501-DQB10203 DQA10501-DQB10301 DQA10501-DQB10319 DQA10503-DQB10301 DQA10505-DQB10201 DQA10505-DQB10202 DQA10505-DQB10301 DQA10505-DQB10302 DQA10505-DQB10309 DQA10505-DQB10319 DQA10508-DQB10301 DQA10509-DQB10301
ASGYIEAEVIPAETGQETA

SEQ ID NO: 2953 - protein, 20 aa, Human immunodeficiency virus 1
  source 1..20: note = HLAs: DRB1_0101 DRB1_0401 DRB1_0404 DRB1_0405 DRB1_0408 DRB1_0813 DRB1_0901 DRB1_1001 DPA10301-DPB10101 DPA10401-DPB10101 DQA10102-DQB10501 DQA10102-DQB10503 DQA10102-DQB10601 DQA10102-DQB10609 DQA10103-DQB10601 DQA10103-DQB10609 DQA10201-DQB10301 DQA10201-DQB10303 DQA10401-DQB10301 DQA10401-DQB10319 DQA10501-DQB10201 DQA10501-DQB10203 DQA10501-DQB10301 DQA10501-DQB10319 DQA10503-DQB10301 DQA10505-DQB10201 DQA10505-DQB10202 DQA10505-DQB10301 DQA10505-DQB10309 DQA10505-DQB10319 DQA10506-DQB10303 DQA10508-DQB10301 DQA10509-DQB10301
ASGYIEAEVIPAETGQETAY

SEQ ID NO: 2954 - protein, 21 aa, Human immunodeficiency virus 1
  source 1..21: note = HLAs: DRB1_0101 DRB1_0401 DRB1_0405 DRB1_0408 DRB1_0901 DRB1_1001 DPA10301-DPB10101 DPA10401-DPB10101 DQA10102-DQB10501 DQA10201-DQB10301 DQA10501-DQB10201 DQA10505-DQB10201 DQA10505-DQB10202
ASGYIEAEVIPAETGQETAYF

SEQ ID NO: 2955 - protein, 15 aa, Human immunodeficiency virus 1
  source 1..15: note = HLAs: DRB1_0101 DRB1_0404 DRB1_1001 DQA10201-DQB10301
ATLEEMMTACQGVGG

SEQ ID NO: 2956 - protein, 16 aa, Human immunodeficiency virus 1
  source 1..16: note = HLAs: DQA10201-DQB10301
ATLEEMMTACQGVGGP

SEQ ID NO: 2957 - protein, 15 aa, Human immunodeficiency virus 1
  source 1..15: note = HLAs: DRB1_0101 DRB1_0404 DRB1_0408 DRB1_1001
ATPQDLNTMLNTVGG

SEQ ID NO: 2958 - protein, 16 aa, Human immunodeficiency virus 1
  source 1..16: note = HLAs: DRB1_0404 DQA10102-DQB10501
ATPQDLNTMLNTVGGH

SEQ ID NO: 2959 - protein, 17 aa, Human immunodeficiency virus 1
  source 1..17: note = HLAs: DRB1_0404 DRB1_0408 DRB1_1001
ATPQDLNTMLNTVGGHQ

SEQ ID NO: 2960 - protein, 19 aa, Human immunodeficiency virus 1
  source 1..19: note = HLAs: DRB1_0404 DRB1_1001 DQA10102-DQB10501
ATPQDLNTMLNTVGGHQAA

SEQ ID NO: 2961 - protein, 20 aa, Human immunodeficiency virus 1
  source 1..20: note = HLAs: DRB1_0101 DRB1_0404 DRB1_0408 DRB1_0410 DRB1_1001 DQA10102-DQB10501 DQA10102-DQB10601 DQA10103-DQB10601 DQA10103-DQB10609 DQA10201-DQB10301 DQA10201-DQB10303
ATPQDLNTMLNTVGGHQAAM

SEQ ID NO: 2962 - protein, 21 aa, Human immunodeficiency virus 1
  source 1..21: note = HLAs: DRB1_0101 DRB1_0404 DRB1_0408 DRB1_1001 DQA10102-DQB10501 DQA10103-DQB10601
ATPQDLNTMLNTVGGHQAAMQ

SEQ ID NO: 2963 - protein, 22 aa, Human immunodeficiency virus 1
  source 1..22: note = HLAs: DRB1_0101 DRB1_0404 DRB1_0408 DRB1_1001 DQA10102-DQB10501 DQA10102-DQB10601 DQA10103-DQB10601 DQA10201-DQB10301
ATPQDLNTMLNTVGGHQAAMQM

SEQ ID NO: 2964 - protein, 23 aa, Human immunodeficiency virus 1
  source 1..23: note = HLAs: DRB1_0101 DRB1_0404 DRB1_0408 DRB1_1001 DQA10102-DQB10501 DQA10102-DQB10601 DQA10103-DQB10601 DQA10103-DQB10609 DQA10201-DQB10301 DQA10201-DQB10303
ATPQDLNTMLNTVGGHQAAMQML

SEQ ID NO: 2965 - protein, 24 aa, Human immunodeficiency virus 1
  source 1..24: note = HLAs: DRB1_0101 DRB1_0404 DRB1_0408 DRB1_1001 DQA10102-DQB10501 DQA10102-DQB10601 DQA10103-DQB10601 DQA10103-DQB10609 DQA10201-DQB10301 DQA10201-DQB10303
ATPQDLNTMLNTVGGHQAAMQMLK

SEQ ID NO: 2966 - protein, 15 aa, Human immunodeficiency virus 1
  source 1..15: note = HLAs: DRB1_0101 DRB1_0405 DRB1_0408 DRB1_0701 DRB1_0901 DRB1_1001 DRB1_1602
ATWIPEWEFVNTPPL

SEQ ID NO: 2967 - protein, 16 aa, Human immunodeficiency virus 1
  source 1..16: note = HLAs: DRB1_0101 DRB1_0405 DRB1_0408 DRB1_0701 DRB1_0901 DRB1_1001 DRB1_1602 DPA10301-DPB10101 DQA10102-DQB10501
ATWIPEWEFVNTPPLV

SEQ ID NO: 2968 - protein, 17 aa, Human immunodeficiency virus 1
  source 1..17: note = HLAs: DRB1_0101 DRB1_0401 DRB1_0405 DRB1_0408 DRB1_0701 DRB1_0901 DRB1_1001 DRB1_1114 DRB1_1302 DRB1_1601 DRB1_1602 DPA10103-DPB10101 DPA10103-DPB11501 DPA10104-DPB10101 DPA10104-DPB11501 DPA10105-DPB10101 DPA10202-DPB10101 DPA10202-DPB13101 DPA10301-DPB10101 DPA10301-DPB10201 DPA10301-DPB10202 DPA10301-DPB10401 DPA10301-DPB11801 DPA10301-DPB12301 DPA10301-DPB13901 DPA10301-DPB14001 DPA10401-DPB10101 DQA10102-DQB10501
ATWIPEWEFVNTPPLVK

SEQ ID NO: 2969 - protein, 18 aa, Human immunodeficiency virus 1
  source 1..18: note = HLAs: DRB1_0101 DRB1_0408 DRB1_0701 DRB1_0901 DRB1_1001 DRB1_1602 DPA10202-DPB10101 DPA10301-DPB10101 DPA10301-DPB10201 DPA10301-DPB10202 DPA10401-DPB10101 DQA10102-DQB10501
ATWIPEWEFVNTPPLVKL

SEQ ID NO: 2970 - protein, 19 aa, Human immunodeficiency virus 1
  source 1..19: note = HLAs: DRB1_0101 DRB1_0401 DRB1_0405 DRB1_0408 DRB1_0701 DRB1_0813 DRB1_0901 DRB1_1001 DRB1_1114 DRB1_1302 DRB1_1402 DRB1_1502 DRB1_1601 DRB1_1602 DPA10103-DPB10101 DPA10103-DPB11501 DPA10103-DPB13101 DPA10103-DPB15001 DPA10104-DPB10101 DPA10104-DPB11501 DPA10105-DPB10101 DPA10105-DPB15001 DPA10106-DPB10101 DPA10201-DPB10101 DPA10201-DPB11501 DPA10202-DPB10101 DPA10202-DPB10202 DPA10202-DPB10501 DPA10202-DPB110601 DPA10202-DPB11901 DPA10202-DPB13101 DPA10202-DPB13801 DPA10202-DPB15501 DPA10202-DPB16501 DPA10301-DPB10101 DPA10301-DPB10201 DPA10301-DPB10202 DPA10301-DPB10401 DPA10301-DPB10402 DPA10301-DPB110501 DPA10301-DPB110601 DPA10301-DPB11801 DPA10301-DPB12301 DPA10301-DPB13901 DPA10301-DPB14001 DPA10301-DPB14901 DPA10301-DPB15501 DPA10301-DPB16501 DPA10301-DPB17501 DPA10301-DPB18001 DPA10401-DPB10101 DPA10401-DPB10201 DPA10401-DPB10202 DPA10401-DPB10501 DQA10102-DQB10501 DQA10102-DQB10609 DQA10103-DQB10501
ATWIPEWEFVNTPPLVKLW

SEQ ID NO: 2971 - protein, 20 aa, Human immunodeficiency virus 1
  source 1..20: note = HLAs: DRB1_0101 DRB1_0401 DRB1_0404 DRB1_0405 DRB1_0408 DRB1_0410 DRB1_0701 DRB1_0801 DRB1_0802 DRB1_0803 DRB1_0809 DRB1_0813 DRB1_0901 DRB1_1001 DRB1_1101 DRB1_1102 DRB1_1114 DRB1_1301 DRB1_1302 DRB1_1303 DRB1_1304 DRB1_1305 DRB1_1312 DRB1_1402 DRB1_1406 DRB1_1501 DRB1_1502 DRB1_1601 DRB1_1602 DPA10103-DPB10101 DPA10103-DPB10201 DPA10103-DPB10202 DPA10103-DPB10401 DPA10103-DPB10501 DPA10103-DPB112601 DPA10103-DPB11501 DPA10103-DPB11601 DPA10103-DPB11901 DPA10103-DPB12301 DPA10103-DPB13101 DPA10103-DPB13401 DPA10103-DPB13901 DPA10103-DPB14001 DPA10103-DPB14101 DPA10103-DPB14801 DPA10103-DPB15001 DPA10103-DPB15901 DPA10104-DPB10101 DPA10104-DPB11501 DPA10105-DPB10101 DPA10105-DPB10401 DPA10105-DPB15001 DPA10106-DPB10101 DPA10201-DPB10101 DPA10201-DPB10501 DPA10201-DPB110601 DPA10201-DPB11501 DPA10201-DPB11601 DPA10201-DPB11901 DPA10202-DPB10101 DPA10202-DPB10201 DPA10202-DPB10202 DPA10202-DPB10401 DPA10202-DPB10501 DPA10202-DPB110601 DPA10202-DPB11101 DPA10202-DPB11301; note = HLAs: DPA10202-DPB11401 DPA10202-DPB11801 DPA10202-DPB11901 DPA10202-DPB12101 DPA10202-DPB13001 DPA10202-DPB13101 DPA10202-DPB13801 DPA10202-DPB15501 DPA10202-DPB16501 DPA10202-DPB18501 DPA10301-DPB10101 DPA10301-DPB10201 DPA10301-DPB10202 DPA10301-DPB10401 DPA10301-DPB10402 DPA10301-DPB110501 DPA10301-DPB110601 DPA10301-DPB11101 DPA10301-DPB11301 DPA10301-DPB11801 DPA10301-DPB12301 DPA10301-DPB13901 DPA10301-DPB14001 DPA10301-DPB14901 DPA10301-DPB15501 DPA10301-DPB16501 DPA10301-DPB17501 DPA10301-DPB18001 DPA10401-DPB10101 DPA10401-DPB10201 DPA10401-DPB10202 DPA10401-DPB10301 DPA10401-DPB10402 DPA10401-DPB10501 DPA10401-DPB110501 DPA10401-DPB11301 DPA10401-DPB113301 DPA10401-DPB11401 DPA10401-DPB14901 DQA10102-DQB10501 DQA10102-DQB10503 DQA10102-DQB10609 DQA10103-DQB10501 DQA10103-DQB10609
ATWIPEWEFVNTPPLVKLWY

SEQ ID NO: 2972 - protein, 21 aa, Human immunodeficiency virus 1
  source 1..21: note = HLAs: DRB1_0101 DRB1_0401 DRB1_0405 DRB1_0408 DRB1_0410 DRB1_0701 DRB1_0801 DRB1_0813 DRB1_0901 DRB1_1001 DRB1_1101 DRB1_1114 DRB1_1302 DRB1_1303 DRB1_1304 DRB1_1305 DRB1_1312 DRB1_1402 DRB1_1406 DRB1_1502 DRB1_1601 DRB1_1602 DPA10103-DPB10101 DPA10103-DPB11501 DPA10103-DPB13101 DPA10103-DPB15001 DPA10104-DPB10101 DPA10104-DPB11501 DPA10105-DPB10101 DPA10105-DPB15001 DPA10106-DPB10101 DPA10201-DPB10101 DPA10202-DPB10101 DPA10202-DPB10501 DPA10202-DPB110601 DPA10202-DPB11901 DPA10202-DPB13101 DPA10202-DPB13801 DPA10202-DPB16501 DPA10301-DPB10101 DPA10301-DPB10201 DPA10301-DPB10202 DPA10301-DPB10401 DPA10301-DPB10402 DPA10301-DPB110501 DPA10301-DPB110601 DPA10301-DPB11801 DPA10301-DPB12301 DPA10301-DPB13901 DPA10301-DPB14001 DPA10301-DPB14901 DPA10301-DPB16501 DPA10301-DPB17501 DPA10301-DPB18001 DPA10401-DPB10101 DPA10401-DPB10201 DPA10401-DPB10202 DPA10401-DPB10501 DQA10102-DQB10501 DQA10103-DQB10501
ATWIPEWEFVNTPPLVKLWYQ

SEQ ID NO: 2973 - protein, 22 aa, Human immunodeficiency virus 1
  source 1..22: note = HLAs: DRB1_0101 DRB1_0401 DRB1_0405 DRB1_0408 DRB1_0410 DRB1_0701 DRB1_0801 DRB1_0813 DRB1_0901 DRB1_1001 DRB1_1101 DRB1_1114 DRB1_1302 DRB1_1303 DRB1_1304 DRB1_1305 DRB1_1312 DRB1_1402 DRB1_1406 DRB1_1502 DRB1_1601 DRB1_1602 DPA10103-DPB10101 DPA10103-DPB11501 DPA10103-DPB13101 DPA10103-DPB15001 DPA10104-DPB10101 DPA10104-DPB11501 DPA10105-DPB10101 DPA10105-DPB15001 DPA10106-DPB10101 DPA10201-DPB10101 DPA10201-DPB11501 DPA10202-DPB10101 DPA10202-DPB10202 DPA10202-DPB10501 DPA10202-DPB110601 DPA10202-DPB11901 DPA10202-DPB13101 DPA10202-DPB13801 DPA10202-DPB16501 DPA10301-DPB10101 DPA10301-DPB10201 DPA10301-DPB10202 DPA10301-DPB10401 DPA10301-DPB10402 DPA10301-DPB110501 DPA10301-DPB110601 DPA10301-DPB11801 DPA10301-DPB12301 DPA10301-DPB13901 DPA10301-DPB14001 DPA10301-DPB14901 DPA10301-DPB16501 DPA10301-DPB17501 DPA10301-DPB18001 DPA10401-DPB10101 DPA10401-DPB10201 DPA10401-DPB10202 DPA10401-DPB10501 DQA10102-DQB10501 DQA10103-DQB10501
ATWIPEWEFVNTPPLVKLWYQL

SEQ ID NO: 2974 - protein, 23 aa, Human immunodeficiency virus 1
  source 1..23: note = HLAs: DRB1_0101 DRB1_0401 DRB1_0405 DRB1_0408 DRB1_0410 DRB1_0701 DRB1_0801 DRB1_0813 DRB1_0901 DRB1_1001 DRB1_1101 DRB1_1102 DRB1_1114 DRB1_1301 DRB1_1302 DRB1_1303 DRB1_1304 DRB1_1305 DRB1_1312 DRB1_1402 DRB1_1406 DRB1_1502 DRB1_1601 DRB1_1602 DPA10103-DPB10101 DPA10103-DPB10201 DPA10103-DPB10202 DPA10103-DPB11501 DPA10103-DPB11601 DPA10103-DPB13101 DPA10103-DPB13401 DPA10103-DPB14001 DPA10103-DPB14101 DPA10103-DPB14801 DPA10103-DPB15001 DPA10104-DPB10101 DPA10104-DPB11501 DPA10105-DPB10101 DPA10105-DPB15001 DPA10106-DPB10101 DPA10201-DPB10101 DPA10201-DPB11501 DPA10202-DPB10101 DPA10202-DPB10201 DPA10202-DPB10202 DPA10202-DPB10501 DPA10202-DPB110601 DPA10202-DPB11901 DPA10202-DPB13101 DPA10202-DPB13801 DPA10202-DPB15501 DPA10202-DPB16501 DPA10301-DPB10101 DPA10301-DPB10201 DPA10301-DPB10202 DPA10301-DPB10401 DPA10301-DPB10402 DPA10301-DPB110501 DPA10301-DPB110601 DPA10301-DPB11801 DPA10301-DPB12301 DPA10301-DPB13901 DPA10301-DPB14001 DPA10301-DPB14901 DPA10301-DPB15501; note = HLAs: DPA10301-DPB16501 DPA10301-DPB17501 DPA10301-DPB18001 DPA10401-DPB10101 DPA10401-DPB10201 DPA10401-DPB10202 DPA10401-DPB10501 DPA10401-DPB11401 DQA10102-DQB10501 DQA10103-DQB10501
ATWIPEWEFVNTPPLVKLWYQLE

SEQ ID NO: 2975 - protein, 13 aa, Human immunodeficiency virus 1
  source 1..13: note = HLAs: DRB1_1101 DRB1_1103 DRB1_1104 DRB1_1305
AVFIHNFKRKGGI

SEQ ID NO: 2976 - protein, 14 aa, Human immunodeficiency virus 1
  source 1..14: note = HLAs: DRB1_0804 DRB1_0806 DRB1_1101 DRB1_1102 DRB1_1103 DRB1_1104 DRB1_1301 DRB1_1304 DRB1_1305
AVFIHNFKRKGGIG

SEQ ID NO: 2977 - protein, 15 aa, Human immunodeficiency virus 1
  source 1..15: note = HLAs: DRB1_0801 DRB1_0802 DRB1_0804 DRB1_0806 DRB1_0809 DRB1_1101 DRB1_1102 DRB1_1103 DRB1_1104 DRB1_1301 DRB1_1303 DRB1_1304 DRB1_1305 DRB1_1406
AVFIHNFKRKGGIGG

SEQ ID NO: 2978 - protein, 16 aa, Human immunodeficiency virus 1
  source 1..16: note = HLAs: DRB1_0802 DRB1_0804 DRB1_0806 DRB1_0809 DRB1_1101 DRB1_1102 DRB1_1103 DRB1_1104 DRB1_1301 DRB1_1304 DRB1_1305
AVFIHNFKRKGGIGGY

SEQ ID NO: 2979 - protein, 17 aa, Human immunodeficiency virus 1
  source 1..17: note = HLAs: DRB1_0804 DRB1_0806 DRB1_1101 DRB1_1102 DRB1_1103 DRB1_1104 DRB1_1301 DRB1_1304 DRB1_1305 DRB1_1406
AVFIHNFKRKGGIGGYS

SEQ ID NO: 2980 - protein, 18 aa, Human immunodeficiency virus 1
  source 1..18: note = HLAs: DRB1_1101 DRB1_1103 DRB1_1104 DRB1_1305
AVFIHNFKRKGGIGGYSA

SEQ ID NO: 2981 - protein, 19 aa, Human immunodeficiency virus 1
  source 1..19: note = HLAs: DRB1_0804 DRB1_0806 DRB1_1101 DRB1_1102 DRB1_1103 DRB1_1104 DRB1_1301 DRB1_1304 DRB1_1305
AVFIHNFKRKGGIGGYSAG

SEQ ID NO: 2982 - protein, 20 aa, Human immunodeficiency virus 1
  source 1..20: note = HLAs: DRB1_0101 DRB1_0801 DRB1_0802 DRB1_0804 DRB1_0806 DRB1_0809 DRB1_1101 DRB1_1102 DRB1_1103 DRB1_1104 DRB1_1301 DRB1_1304 DRB1_1305
AVFIHNFKRKGGIGGYSAGE

SEQ ID NO: 2983 - protein, 21 aa, Human immunodeficiency virus 1
  source 1..21: note = HLAs: DRB1_0804 DRB1_0806 DRB1_1101 DRB1_1102 DRB1_1103 DRB1_1104 DRB1_1301 DRB1_1304 DRB1_1305
AVFIHNFKRKGGIGGYSAGER

SEQ ID NO: 2984 - protein, 22 aa, Human immunodeficiency virus 1
  source 1..22: note = HLAs: DRB1_0804 DRB1_0806 DRB1_1101 DRB1_1102 DRB1_1103 DRB1_1104 DRB1_1301 DRB1_1304 DRB1_1305
AVFIHNFKRKGGIGGYSAGERI

SEQ ID NO: 2985 - protein, 23 aa, Human immunodeficiency virus 1
  source 1..23: note = HLAs: DRB1_0804 DRB1_0806 DRB1_1101 DRB1_1102 DRB1_1103 DRB1_1104 DRB1_1301 DRB1_1304 DRB1_1305
AVFIHNFKRKGGIGGYSAGERII

SEQ ID NO: 2986 - protein, 24 aa, Human immunodeficiency virus 1
  source 1..24: note = HLAs: DRB1_0804 DRB1_0806 DRB1_1101 DRB1_1102 DRB1_1103 DRB1_1104 DRB1_1301 DRB1_1304 DRB1_1305
AVFIHNFKRKGGIGGYSAGERIID

SEQ ID NO: 2987 - protein, 25 aa, Human immunodeficiency virus 1
  source 1..25: note = HLAs: DRB1_0804 DRB1_0806 DRB1_1101 DRB1_1102 DRB1_1103 DRB1_1104 DRB1_1301 DRB1_1304 DRB1_1305
AVFIHNFKRKGGIGGYSAGERIIDI

SEQ ID NO: 2988 - protein, 13 aa, Human immunodeficiency virus 1
  source 1..13: note = HLAs: DQA10201-DQB10301 DQA10301-DQB10302 DQA10301-DQB10304 DQA10302-DQB10302 DQA10302-DQB10304 DQA10303-DQB10302 DQA10303-DQB10304 DQA10401-DQB10301 DQA10401-DQB10319 DQA10401-DQB10402 DQA10402-DQB10402 DQA10501-DQB10201 DQA10505-DQB10201 DQA10505-DQB10202 DQA10505-DQB10302 DQA10601-DQB10301
AVHVASGYIEAEV

SEQ ID NO: 2989 - protein, 14 aa, Human immunodeficiency virus 1
  source 1..14: note = HLAs: DPA10301-DPB10101 DPA10401-DPB10101 DQA10102-DQB10501 DQA10102-DQB10503 DQA10102-DQB10601 DQA10102-DQB10609 DQA10103-DQB10609 DQA10201-DQB10201 DQA10201-DQB10202 DQA10201-DQB10301 DQA10201-DQB10302 DQA10201-DQB10303 DQA10301-DQB10301 DQA10301-DQB10302 DQA10301-DQB10303 DQA10301-DQB10304 DQA10301-DQB10305 DQA10302-DQB10301 DQA10302-DQB10302 DQA10302-DQB10303 DQA10302-DQB10304 DQA10303-DQB10301 DQA10303-DQB10302 DQA10303-DQB10303 DQA10303-DQB10304 DQA10401-DQB10201 DQA10401-DQB10301 DQA10401-DQB10319 DQA10401-DQB10402 DQA10402-DQB10402 DQA10501-DQB10201 DQA10501-DQB10203 DQA10501-DQB10301 DQA10501-DQB10319 DQA10503-DQB10301 DQA10505-DQB10201 DQA10505-DQB10202 DQA10505-DQB10301 DQA10505-DQB10302 DQA10505-DQB10309 DQA10505-DQB10319 DQA10506-DQB10303 DQA10508-DQB10301 DQA10509-DQB10301 DQA10601-DQB10301
AVHVASGYIEAEVI

SEQ ID NO: 2990 - protein, 15 aa, Human immunodeficiency virus 1
  source 1..15: note = HLAs: DPA10103-DPB11501 DPA10104-DPB11501 DPA10301-DPB10101 DPA10301-DPB10201 DPA10301-DPB10202 DPA10401-DPB10101 DQA10102-DQB10501 DQA10102-DQB10502 DQA10102-DQB10503 DQA10102-DQB10601 DQA10102-DQB10604 DQA10102-DQB10609 DQA10102-DQB10611 DQA10103-DQB10601 DQA10103-DQB10609 DQA10201-DQB10201 DQA10201-DQB10202 DQA10201-DQB10301 DQA10201-DQB10302 DQA10201-DQB10303 DQA10301-DQB10301 DQA10301-DQB10302 DQA10301-DQB10303 DQA10301-DQB10304 DQA10301-DQB10305 DQA10302-DQB10301 DQA10302-DQB10302 DQA10302-DQB10303 DQA10302-DQB10304 DQA10303-DQB10301 DQA10303-DQB10302 DQA10303-DQB10303 DQA10303-DQB10304 DQA10401-DQB10201 DQA10401-DQB10301 DQA10401-DQB10319 DQA10401-DQB10402 DQA10402-DQB10402 DQA10501-DQB10201 DQA10501-DQB10203 DQA10501-DQB10301 DQA10501-DQB10319 DQA10503-DQB10301 DQA10505-DQB10201 DQA10505-DQB10202 DQA10505-DQB10301 DQA10505-DQB10302 DQA10505-DQB10309 DQA10505-DQB10319 DQA10506-DQB10303 DQA10508-DQB10301 DQA10509-DQB10301 DQA10601-DQB10301
AVHVASGYIEAEVIP

SEQ ID NO: 2991 - protein, 16 aa, Human immunodeficiency virus 1
  source 1..16: note = HLAs: DRB1_0101 DRB1_0401 DRB1_0408 DRB1_0901 DRB1_1001 DPA10103-DPB11501 DPA10104-DPB11501 DPA10301-DPB10101 DPA10301-DPB10201 DPA10301-DPB10202 DPA10301-DPB110601 DPA10301-DPB16501 DPA10401-DPB10101 DQA10101-DQB10601 DQA10102-DQB10501 DQA10102-DQB10502 DQA10102-DQB10503 DQA10102-DQB10601 DQA10102-DQB10602 DQA10102-DQB10604 DQA10102-DQB10609 DQA10102-DQB10610 DQA10102-DQB10611 DQA10103-DQB10501 DQA10103-DQB10601 DQA10103-DQB10609 DQA10201-DQB10201 DQA10201-DQB10202 DQA10201-DQB10301 DQA10201-DQB10302 DQA10201-DQB10303 DQA10301-DQB10301 DQA10301-DQB10302 DQA10301-DQB10303 DQA10301-DQB10304 DQA10301-DQB10305 DQA10302-DQB10301 DQA10302-DQB10302 DQA10302-DQB10303 DQA10302-DQB10304 DQA10303-DQB10301 DQA10303-DQB10302 DQA10303-DQB10303 DQA10303-DQB10304 DQA10401-DQB10201 DQA10401-DQB10301 DQA10401-DQB10319 DQA10401-DQB10402 DQA10402-DQB10402 DQA10501-DQB10201 DQA10501-DQB10203 DQA10501-DQB10301 DQA10501-DQB10319 DQA10503-DQB10301 DQA10505-DQB10201 DQA10505-DQB10202 DQA10505-DQB10301; note = HLAs: DQA10505-DQB10302 DQA10505-DQB10309 DQA10505-DQB10319 DQA10506-DQB10303 DQA10508-DQB10301 DQA10509-DQB10301 DQA10601-DQB10301
AVHVASGYIEAEVIPA

SEQ ID NO: 2992 - protein, 17 aa, Human immunodeficiency virus 1
  source 1..17: note = HLAs: DRB1_0101 DRB1_0401 DRB1_0405 DRB1_0408 DRB1_0901 DRB1_1001 DPA10103-DPB11501 DPA10104-DPB11501 DPA10301-DPB10101 DPA10301-DPB10201 DPA10301-DPB10202 DPA10301-DPB110601 DPA10301-DPB16501 DPA10401-DPB10101 DQA10101-DQB10601 DQA10102-DQB10501 DQA10102-DQB10502 DQA10102-DQB10503 DQA10102-DQB10601 DQA10102-DQB10602 DQA10102-DQB10604 DQA10102-DQB10609 DQA10102-DQB10610 DQA10102-DQB10611 DQA10103-DQB10501 DQA10103-DQB10601 DQA10103-DQB10609 DQA10201-DQB10201 DQA10201-DQB10202 DQA10201-DQB10301 DQA10201-DQB10302 DQA10201-DQB10303 DQA10301-DQB10301 DQA10301-DQB10302 DQA10301-DQB10303 DQA10301-DQB10304 DQA10301-DQB10305 DQA10302-DQB10301 DQA10302-DQB10302 DQA10302-DQB10303 DQA10302-DQB10304 DQA10303-DQB10301 DQA10303-DQB10302 DQA10303-DQB10303 DQA10303-DQB10304 DQA10401-DQB10201 DQA10401-DQB10301 DQA10401-DQB10319 DQA10401-DQB10402 DQA10402-DQB10402 DQA10501-DQB10201 DQA10501-DQB10203 DQA10501-DQB10301 DQA10501-DQB10319 DQA10503-DQB10301 DQA10505-DQB10201 DQA10505-DQB10202; note = HLAs: DQA10505-DQB10301 DQA10505-DQB10302 DQA10505-DQB10309 DQA10505-DQB10319 DQA10506-DQB10303 DQA10508-DQB10301 DQA10509-DQB10301 DQA10601-DQB10301
AVHVASGYIEAEVIPAE

SEQ ID NO: 2993 - protein, 18 aa, Human immunodeficiency virus 1
  source 1..18: note = HLAs: DRB1_0408 DRB1_1001 DPA10301-DPB10101 DPA10401-DPB10101 DQA10102-DQB10501 DQA10102-DQB10503 DQA10102-DQB10601 DQA10102-DQB10609 DQA10102-DQB10611 DQA10201-DQB10201 DQA10201-DQB10202 DQA10201-DQB10301 DQA10201-DQB10302 DQA10301-DQB10301 DQA10301-DQB10302 DQA10301-DQB10303 DQA10301-DQB10304 DQA10302-DQB10301 DQA10302-DQB10302 DQA10302-DQB10303 DQA10302-DQB10304 DQA10303-DQB10301 DQA10303-DQB10302 DQA10303-DQB10303 DQA10303-DQB10304 DQA10401-DQB10201 DQA10401-DQB10301 DQA10401-DQB10319 DQA10401-DQB10402 DQA10402-DQB10402 DQA10501-DQB10201 DQA10501-DQB10203 DQA10501-DQB10301 DQA10501-DQB10319 DQA10503-DQB10301 DQA10505-DQB10201 DQA10505-DQB10202 DQA10505-DQB10301 DQA10505-DQB10302 DQA10505-DQB10309 DQA10505-DQB10319 DQA10506-DQB10303 DQA10508-DQB10301 DQA10509-DQB10301 DQA10601-DQB10301
AVHVASGYIEAEVIPAET

SEQ ID NO: 2994 - protein, 19 aa, Human immunodeficiency virus 1
  source 1..19: note = HLAs: DRB1_0101 DRB1_0401 DRB1_0408 DRB1_0901 DRB1_1001 DPA10103-DPB11501 DPA10104-DPB11501 DPA10301-DPB10101 DPA10301-DPB10201 DPA10301-DPB10202 DPA10301-DPB110601 DPA10301-DPB16501 DPA10401-DPB10101 DQA10102-DQB10501 DQA10102-DQB10502 DQA10102-DQB10503 DQA10102-DQB10601 DQA10102-DQB10602 DQA10102-DQB10604 DQA10102-DQB10609 DQA10102-DQB10610 DQA10102-DQB10611 DQA10103-DQB10501 DQA10103-DQB10601 DQA10103-DQB10609 DQA10201-DQB10201 DQA10201-DQB10202 DQA10201-DQB10301 DQA10201-DQB10302 DQA10201-DQB10303 DQA10301-DQB10301 DQA10301-DQB10302 DQA10301-DQB10303 DQA10301-DQB10304 DQA10301-DQB10305 DQA10302-DQB10301 DQA10302-DQB10302 DQA10302-DQB10303 DQA10302-DQB10304 DQA10303-DQB10301 DQA10303-DQB10302 DQA10303-DQB10303 DQA10303-DQB10304 DQA10401-DQB10201 DQA10401-DQB10301 DQA10401-DQB10319 DQA10401-DQB10402 DQA10402-DQB10402 DQA10501-DQB10201 DQA10501-DQB10203 DQA10501-DQB10301 DQA10501-DQB10319 DQA10503-DQB10301 DQA10505-DQB10201 DQA10505-DQB10202 DQA10505-DQB10301 DQA10505-DQB10302; note = HLAs: DQA10505-DQB10309 DQA10505-DQB10319 DQA10506-DQB10303 DQA10508-DQB10301 DQA10509-DQB10301 DQA10601-DQB10301
AVHVASGYIEAEVIPAETG

SEQ ID NO: 2995 - protein, 20 aa, Human immunodeficiency virus 1
  source 1..20: note = HLAs: DRB1_0101 DRB1_0401 DRB1_0404 DRB1_0405 DRB1_0408 DRB1_0701 DRB1_0802 DRB1_0809 DRB1_0813 DRB1_0901 DRB1_1001 DRB1_1602 DPA10103-DPB10101 DPA10103-DPB11501 DPA10103-DPB15001 DPA10104-DPB10101 DPA10104-DPB11501 DPA10105-DPB10101 DPA10105-DPB15001 DPA10202-DPB10101 DPA10301-DPB10101 DPA10301-DPB10201 DPA10301-DPB10202 DPA10301-DPB10401 DPA10301-DPB110601 DPA10301-DPB11801 DPA10301-DPB12301 DPA10301-DPB13901 DPA10301-DPB14001 DPA10301-DPB15501 DPA10301-DPB16501 DPA10401-DPB10101 DPA10401-DPB10202 DPA10401-DPB10301 DPA10401-DPB11401 DQA10101-DQB10501 DQA10101-DQB10601 DQA10102-DQB10501 DQA10102-DQB10502 DQA10102-DQB10503 DQA10102-DQB10601 DQA10102-DQB10602 DQA10102-DQB10604 DQA10102-DQB10609 DQA10102-DQB10610 DQA10102-DQB10611 DQA10103-DQB10501 DQA10103-DQB10601 DQA10103-DQB10609 DQA10104-DQB10501 DQA10105-DQB10501 DQA10201-DQB10201 DQA10201-DQB10202 DQA10201-DQB10301 DQA10201-DQB10302 DQA10201-DQB10303 DQA10301-DQB10301 DQA10301-DQB10302 DQA10301-DQB10303 DQA10301-DQB10304; note = HLAs: DQA10301-DQB10305 DQA10302-DQB10301 DQA10302-DQB10302 DQA10302-DQB10303 DQA10302-DQB10304 DQA10303-DQB10301 DQA10303-DQB10302 DQA10303-DQB10303 DQA10303-DQB10304 DQA10401-DQB10201 DQA10401-DQB10301 DQA10401-DQB10319 DQA10401-DQB10402 DQA10402-DQB10402 DQA10501-DQB10201 DQA10501-DQB10203 DQA10501-DQB10301 DQA10501-DQB10319 DQA10503-DQB10301 DQA10505-DQB10201 DQA10505-DQB10202 DQA10505-DQB10301 DQA10505-DQB10302 DQA10505-DQB10309 DQA10505-DQB10319 DQA10506-DQB10303 DQA10508-DQB10301 DQA10509-DQB10301 DQA10601-DQB10301
AVHVASGYIEAEVIPAETGQ

SEQ ID NO: 2996 - protein, 21 aa, Human immunodeficiency virus 1
  source 1..21: note = HLAs: DRB1_0101 DRB1_0401 DRB1_0405 DRB1_0408 DRB1_0901 DRB1_1001 DPA10301-DPB10101 DPA10301-DPB10201 DPA10301-DPB10202 DPA10301-DPB16501 DPA10401-DPB10101 DQA10102-DQB10501 DQA10102-DQB10502 DQA10102-DQB10503 DQA10102-DQB10601 DQA10102-DQB10609 DQA10103-DQB10501 DQA10103-DQB10601 DQA10103-DQB10609 DQA10201-DQB10201 DQA10201-DQB10202 DQA10201-DQB10301 DQA10201-DQB10302 DQA10201-DQB10303 DQA10301-DQB10301 DQA10301-DQB10302 DQA10301-DQB10304 DQA10302-DQB10301 DQA10302-DQB10302 DQA10302-DQB10304 DQA10303-DQB10301 DQA10303-DQB10302 DQA10303-DQB10304 DQA10401-DQB10201 DQA10401-DQB10301 DQA10401-DQB10319 DQA10401-DQB10402 DQA10402-DQB10402 DQA10501-DQB10201 DQA10501-DQB10203 DQA10501-DQB10301 DQA10501-DQB10319 DQA10503-DQB10301 DQA10505-DQB10201 DQA10505-DQB10202 DQA10505-DQB10301 DQA10505-DQB10302 DQA10505-DQB10309 DQA10505-DQB10319 DQA10506-DQB10303 DQA10508-DQB10301 DQA10509-DQB10301 DQA10601-DQB10301
AVHVASGYIEAEVIPAETGQE

SEQ ID NO: 2997 - protein, 22 aa, Human immunodeficiency virus 1
  source 1..22: note = HLAs: DRB1_0101 DRB1_0401 DRB1_0405 DRB1_0408 DRB1_0901 DRB1_1001 DPA10301-DPB10101 DPA10301-DPB10201 DPA10301-DPB10202 DPA10301-DPB16501 DPA10401-DPB10101 DQA10102-DQB10501 DQA10102-DQB10502 DQA10102-DQB10503 DQA10102-DQB10601 DQA10102-DQB10609 DQA10103-DQB10501 DQA10103-DQB10601 DQA10103-DQB10609 DQA10201-DQB10201 DQA10201-DQB10202 DQA10201-DQB10301 DQA10201-DQB10302 DQA10201-DQB10303 DQA10301-DQB10301 DQA10301-DQB10302 DQA10301-DQB10304 DQA10302-DQB10301 DQA10302-DQB10302 DQA10302-DQB10304 DQA10303-DQB10301 DQA10303-DQB10302 DQA10303-DQB10304 DQA10401-DQB10201 DQA10401-DQB10301 DQA10401-DQB10319 DQA10401-DQB10402 DQA10402-DQB10402 DQA10501-DQB10201 DQA10501-DQB10203 DQA10501-DQB10301 DQA10501-DQB10319 DQA10503-DQB10301 DQA10505-DQB10201 DQA10505-DQB10202 DQA10505-DQB10301 DQA10505-DQB10302 DQA10505-DQB10309 DQA10505-DQB10319 DQA10506-DQB10303 DQA10508-DQB10301 DQA10509-DQB10301 DQA10601-DQB10301
AVHVASGYIEAEVIPAETGQET

SEQ ID NO: 2998 - protein, 23 aa, Human immunodeficiency virus 1
  source 1..23: note = HLAs: DRB1_0101 DRB1_0401 DRB1_0405 DRB1_0408 DRB1_0901 DRB1_1001 DPA10301-DPB10101 DPA10301-DPB10201 DPA10301-DPB10202 DPA10301-DPB110601 DPA10301-DPB16501 DPA10401-DPB10101 DQA10102-DQB10501 DQA10102-DQB10502 DQA10102-DQB10503 DQA10102-DQB10601 DQA10102-DQB10604 DQA10102-DQB10609 DQA10102-DQB10611 DQA10103-DQB10501 DQA10103-DQB10601 DQA10103-DQB10609 DQA10201-DQB10201 DQA10201-DQB10202 DQA10201-DQB10301 DQA10201-DQB10302 DQA10201-DQB10303 DQA10301-DQB10301 DQA10301-DQB10302 DQA10301-DQB10304 DQA10302-DQB10301 DQA10302-DQB10302 DQA10302-DQB10304 DQA10303-DQB10301 DQA10303-DQB10302 DQA10303-DQB10304 DQA10401-DQB10201 DQA10401-DQB10301 DQA10401-DQB10319 DQA10401-DQB10402 DQA10402-DQB10402 DQA10501-DQB10201 DQA10501-DQB10203 DQA10501-DQB10301 DQA10501-DQB10319 DQA10503-DQB10301 DQA10505-DQB10201 DQA10505-DQB10202 DQA10505-DQB10301 DQA10505-DQB10302 DQA10505-DQB10309 DQA10505-DQB10319 DQA10506-DQB10303 DQA10508-DQB10301 DQA10509-DQB10301 DQA10601-DQB10301
AVHVASGYIEAEVIPAETGQETA

SEQ ID NO: 2999 - protein, 24 aa, Human immunodeficiency virus 1
  source 1..24: note = HLAs: DRB1_0101 DRB1_0401 DRB1_0405 DRB1_0408 DRB1_0901 DRB1_1001 DPA10301-DPB10101 DPA10301-DPB10201 DPA10301-DPB10202 DPA10301-DPB110601 DPA10301-DPB16501 DPA10401-DPB10101 DQA10102-DQB10501 DQA10102-DQB10502 DQA10102-DQB10503 DQA10102-DQB10601 DQA10102-DQB10604 DQA10102-DQB10609 DQA10102-DQB10611 DQA10103-DQB10501 DQA10103-DQB10601 DQA10103-DQB10609 DQA10201-DQB10201 DQA10201-DQB10202 DQA10201-DQB10301 DQA10201-DQB10302 DQA10201-DQB10303 DQA10301-DQB10301 DQA10301-DQB10302 DQA10301-DQB10304 DQA10302-DQB10301 DQA10302-DQB10302 DQA10302-DQB10304 DQA10303-DQB10301 DQA10303-DQB10302 DQA10303-DQB10304 DQA10401-DQB10201 DQA10401-DQB10301 DQA10401-DQB10319 DQA10401-DQB10402 DQA10402-DQB10402 DQA10501-DQB10201 DQA10501-DQB10203 DQA10501-DQB10301 DQA10501-DQB10319 DQA10503-DQB10301 DQA10505-DQB10201 DQA10505-DQB10202 DQA10505-DQB10301 DQA10505-DQB10302 DQA10505-DQB10309 DQA10505-DQB10319 DQA10506-DQB10303 DQA10508-DQB10301 DQA10509-DQB10301 DQA10601-DQB10301
AVHVASGYIEAEVIPAETGQETAY

SEQ ID NO: 3000 - protein, 25 aa, Human immunodeficiency virus 1
  source 1..25: note = HLAs: DRB1_0101 DRB1_0401 DRB1_0405 DRB1_0408 DRB1_0901 DRB1_1001 DPA10103-DPB11501 DPA10104-DPB11501 DPA10301-DPB10101 DPA10301-DPB10201 DPA10301-DPB10202 DPA10301-DPB110601 DPA10301-DPB16501 DPA10401-DPB10101 DQA10102-DQB10501 DQA10102-DQB10502 DQA10102-DQB10503 DQA10102-DQB10601 DQA10102-DQB10604 DQA10102-DQB10609 DQA10102-DQB10611 DQA10103-DQB10501 DQA10103-DQB10601 DQA10103-DQB10609 DQA10201-DQB10201 DQA10201-DQB10202 DQA10201-DQB10301 DQA10201-DQB10302 DQA10201-DQB10303 DQA10301-DQB10301 DQA10301-DQB10302 DQA10301-DQB10304 DQA10302-DQB10301 DQA10302-DQB10302 DQA10302-DQB10304 DQA10303-DQB10301 DQA10303-DQB10302 DQA10303-DQB10304 DQA10401-DQB10201 DQA10401-DQB10301 DQA10401-DQB10319 DQA10401-DQB10402 DQA10402-DQB10402 DQA10501-DQB10201 DQA10501-DQB10203 DQA10501-DQB10301 DQA10501-DQB10319 DQA10503-DQB10301 DQA10505-DQB10201 DQA10505-DQB10202 DQA10505-DQB10301 DQA10505-DQB10302 DQA10505-DQB10309 DQA10505-DQB10319 DQA10506-DQB10303 DQA10508-DQB10301 DQA10509-DQB10301; note = HLAs: DQA10601-DQB10301
AVHVASGYIEAEVIPAETGQETAYF

SEQ ID NO: 3001 - protein, 13 aa, Human immunodeficiency virus 1
  source 1..13: note = HLAs: DPA10103-DPB10101 DPA10103-DPB10201 DPA10103-DPB10202 DPA10103-DPB11501 DPA10103-DPB14801 DPA10104-DPB10101 DPA10104-DPB11501 DPA10105-DPB10101 DPA10201-DPB11501 DPA10202-DPB10101 DPA10301-DPB10101 DPA10301-DPB10201 DPA10301-DPB10202 DPA10301-DPB10401 DPA10301-DPB110601 DPA10301-DPB11801 DPA10301-DPB12301 DPA10301-DPB13901 DPA10301-DPB14001 DPA10301-DPB16501 DPA10401-DPB10101 DPA10401-DPB10201 DPA10401-DPB10202 DQA10102-DQB10501
AVQMAVFIHNFKR

SEQ ID NO: 3002 - protein, 14 aa, Human immunodeficiency virus 1
  source 1..14: note = HLAs: DRB1_0804 DRB1_0806 DRB1_1001 DRB1_1102 DRB1_1103 DRB1_1104 DRB1_1301 DRB1_1304 DRB1_1406 DRB1_1501 DRB1_1601 DRB1_1602 DPA10103-DPB10101 DPA10103-DPB10201 DPA10103-DPB10202 DPA10103-DPB10501 DPA10103-DPB11501 DPA10103-DPB11601 DPA10103-DPB11801 DPA10103-DPB11901 DPA10103-DPB13101 DPA10103-DPB13401 DPA10103-DPB14001 DPA10103-DPB14101 DPA10103-DPB14801 DPA10103-DPB15001 DPA10104-DPB10101 DPA10104-DPB11501 DPA10105-DPB10101 DPA10105-DPB11801 DPA10105-DPB15001 DPA10106-DPB10101 DPA10201-DPB10101 DPA10201-DPB110601 DPA10201-DPB11501 DPA10201-DPB11601 DPA10201-DPB11901 DPA10202-DPB10101 DPA10202-DPB10201 DPA10202-DPB10202 DPA10202-DPB10501 DPA10202-DPB110601 DPA10202-DPB11801 DPA10202-DPB11901 DPA10202-DPB13101 DPA10202-DPB13801 DPA10202-DPB16501 DPA10301-DPB10101 DPA10301-DPB10201 DPA10301-DPB10202 DPA10301-DPB10401 DPA10301-DPB10402 DPA10301-DPB110501 DPA10301-DPB110601 DPA10301-DPB11801 DPA10301-DPB12301 DPA10301-DPB13901 DPA10301-DPB14001 DPA10301-DPB14901 DPA10301-DPB15501; note = HLAs: DPA10301-DPB16501 DPA10301-DPB17501 DPA10301-DPB18001 DPA10401-DPB10101 DPA10401-DPB10201 DPA10401-DPB10202 DPA10401-DPB10501 DQA10102-DQB10501 DQA10103-DQB10501
AVQMAVFIHNFKRK

SEQ ID NO: 3003 - protein, 15 aa, Human immunodeficiency virus 1
  source 1..15: note = HLAs: DRB1_0101 DRB1_0102 DRB1_0404 DRB1_0410 DRB1_0801 DRB1_0802 DRB1_0804 DRB1_0806 DRB1_0809 DRB1_1001 DRB1_1101 DRB1_1102 DRB1_1103 DRB1_1104 DRB1_1114 DRB1_1202 DRB1_1301 DRB1_1302 DRB1_1303 DRB1_1304 DRB1_1305 DRB1_1312 DRB1_1401 DRB1_1402 DRB1_1406 DRB1_1454 DRB1_1501 DRB1_1503 DRB1_1601 DRB1_1602 DPA10103-DPB10101 DPA10103-DPB10201 DPA10103-DPB10202 DPA10103-DPB10401 DPA10103-DPB10501 DPA10103-DPB112601 DPA10103-DPB11501 DPA10103-DPB11601 DPA10103-DPB11801 DPA10103-DPB11901 DPA10103-DPB12301 DPA10103-DPB13101 DPA10103-DPB13401 DPA10103-DPB13901 DPA10103-DPB14001 DPA10103-DPB14101 DPA10103-DPB14801 DPA10103-DPB15001 DPA10103-DPB15901 DPA10104-DPB10101 DPA10104-DPB11501 DPA10105-DPB10101 DPA10105-DPB10401 DPA10105-DPB11801 DPA10105-DPB15001 DPA10106-DPB10101 DPA10201-DPB10101 DPA10201-DPB10201 DPA10201-DPB10202 DPA10201-DPB10501 DPA10201-DPB110601 DPA10201-DPB11501 DPA10201-DPB11601 DPA10201-DPB11801 DPA10201-DPB11901 DPA10201-DPB13401 DPA10202-DPB10101 DPA10202-DPB10201; note = HLAs: DPA10202-DPB10202 DPA10202-DPB10401 DPA10202-DPB10501 DPA10202-DPB110601 DPA10202-DPB11801 DPA10202-DPB11901 DPA10202-DPB13101 DPA10202-DPB13801 DPA10202-DPB15501 DPA10202-DPB16501 DPA10301-DPB10101 DPA10301-DPB10201 DPA10301-DPB10202 DPA10301-DPB10401 DPA10301-DPB10402 DPA10301-DPB110501 DPA10301-DPB110601 DPA10301-DPB11101 DPA10301-DPB11801 DPA10301-DPB12301 DPA10301-DPB13901 DPA10301-DPB14001 DPA10301-DPB14901 DPA10301-DPB15501 DPA10301-DPB16501 DPA10301-DPB17501 DPA10301-DPB18001 DPA10401-DPB10101 DPA10401-DPB10201 DPA10401-DPB10202 DPA10401-DPB10402 DPA10401-DPB10501 DPA10401-DPB110501 DPA10401-DPB14901 DQA10102-DQB10501 DQA10102-DQB10601 DQA10102-DQB10609 DQA10103-DQB10501 DQA10103-DQB10601 DQA10103-DQB10609
AVQMAVFIHNFKRKG

SEQ ID NO: 3004 - protein, 16 aa, Human immunodeficiency virus 1
  source 1..16: note = HLAs: DRB1_0101 DRB1_0801 DRB1_0802 DRB1_0804 DRB1_0806 DRB1_0809 DRB1_1001 DRB1_1101 DRB1_1102 DRB1_1103 DRB1_1104 DRB1_1301 DRB1_1304 DRB1_1305 DRB1_1406 DRB1_1501 DRB1_1503 DRB1_1601 DRB1_1602 DPA10103-DPB10101 DPA10103-DPB10201 DPA10103-DPB10202 DPA10103-DPB10501 DPA10103-DPB11501 DPA10103-DPB11601 DPA10103-DPB11801 DPA10103-DPB11901 DPA10103-DPB13101 DPA10103-DPB13401 DPA10103-DPB14001 DPA10103-DPB14101 DPA10103-DPB14801 DPA10103-DPB15001 DPA10104-DPB10101 DPA10104-DPB11501 DPA10105-DPB10101 DPA10105-DPB11801 DPA10105-DPB15001 DPA10106-DPB10101 DPA10201-DPB10101 DPA10201-DPB10202 DPA10201-DPB110601 DPA10201-DPB11501 DPA10201-DPB11601 DPA10201-DPB11901 DPA10202-DPB10101 DPA10202-DPB10201 DPA10202-DPB10202 DPA10202-DPB10501 DPA10202-DPB110601 DPA10202-DPB11801 DPA10202-DPB11901 DPA10202-DPB13101 DPA10202-DPB13801 DPA10202-DPB15501 DPA10202-DPB16501 DPA10301-DPB10101 DPA10301-DPB10201 DPA10301-DPB10202 DPA10301-DPB10401 DPA10301-DPB10402 DPA10301-DPB110501 DPA10301-DPB110601; note = HLAs: DPA10301-DPB11101 DPA10301-DPB11801 DPA10301-DPB12301 DPA10301-DPB13901 DPA10301-DPB14001 DPA10301-DPB14901 DPA10301-DPB15501 DPA10301-DPB16501 DPA10301-DPB17501 DPA10301-DPB18001 DPA10401-DPB10101 DPA10401-DPB10201 DPA10401-DPB10202 DPA10401-DPB10501 DQA10102-DQB10501 DQA10102-DQB10503 DQA10102-DQB10609 DQA10103-DQB10501
AVQMAVFIHNFKRKGG

SEQ ID NO: 3005 - protein, 17 aa, Human immunodeficiency virus 1
  source 1..17: note = HLAs: DRB1_0101 DRB1_0801 DRB1_0802 DRB1_0804 DRB1_0806 DRB1_0809 DRB1_1001 DRB1_1101 DRB1_1102 DRB1_1103 DRB1_1104 DRB1_1301 DRB1_1304 DRB1_1305 DRB1_1406 DRB1_1501 DRB1_1503 DRB1_1601 DRB1_1602 DPA10103-DPB10101 DPA10103-DPB10201 DPA10103-DPB10202 DPA10103-DPB10501 DPA10103-DPB11501 DPA10103-DPB11601 DPA10103-DPB11801 DPA10103-DPB11901 DPA10103-DPB13101 DPA10103-DPB13401 DPA10103-DPB14001 DPA10103-DPB14101 DPA10103-DPB14801 DPA10103-DPB15001 DPA10104-DPB10101 DPA10104-DPB11501 DPA10105-DPB10101 DPA10105-DPB11801 DPA10105-DPB15001 DPA10106-DPB10101 DPA10201-DPB10101 DPA10201-DPB10202 DPA10201-DPB110601 DPA10201-DPB11501 DPA10201-DPB11601 DPA10201-DPB11901 DPA10202-DPB10101 DPA10202-DPB10201 DPA10202-DPB10202 DPA10202-DPB10501 DPA10202-DPB110601 DPA10202-DPB11801 DPA10202-DPB11901 DPA10202-DPB13101 DPA10202-DPB13801 DPA10202-DPB16501 DPA10301-DPB10101 DPA10301-DPB10201 DPA10301-DPB10202 DPA10301-DPB10401 DPA10301-DPB10402 DPA10301-DPB110501 DPA10301-DPB110601 DPA10301-DPB11801; note = HLAs: DPA10301-DPB12301 DPA10301-DPB13901 DPA10301-DPB14001 DPA10301-DPB14901 DPA10301-DPB15501 DPA10301-DPB16501 DPA10301-DPB17501 DPA10301-DPB18001 DPA10401-DPB10101 DPA10401-DPB10201 DPA10401-DPB10202 DPA10401-DPB10501 DQA10102-DQB10501 DQA10103-DQB10501
AVQMAVFIHNFKRKGGI

SEQ ID NO: 3006 - protein, 18 aa, Human immunodeficiency virus 1
  source 1..18: note = HLAs: DRB1_0804 DRB1_0806 DRB1_1101 DRB1_1102 DRB1_1103 DRB1_1104 DRB1_1301 DRB1_1304 DRB1_1305 DPA10103-DPB10101 DPA10103-DPB11501 DPA10104-DPB10101 DPA10104-DPB11501 DPA10105-DPB10101 DPA10201-DPB11501 DPA10202-DPB10101 DPA10202-DPB110601 DPA10202-DPB11901 DPA10301-DPB10101 DPA10301-DPB10201 DPA10301-DPB10202 DPA10301-DPB10401 DPA10301-DPB110601 DPA10301-DPB11801 DPA10301-DPB12301 DPA10301-DPB13901 DPA10301-DPB14001 DPA10301-DPB16501 DPA10401-DPB10101 DPA10401-DPB10201 DPA10401-DPB10202 DPA10401-DPB10501 DQA10102-DQB10501
AVQMAVFIHNFKRKGGIG

SEQ ID NO: 3007 - protein, 19 aa, Human immunodeficiency virus 1
  source 1..19: note = HLAs: DRB1_0101 DRB1_0801 DRB1_0802 DRB1_0804 DRB1_0806 DRB1_0809 DRB1_1001 DRB1_1101 DRB1_1102 DRB1_1103 DRB1_1104 DRB1_1301 DRB1_1304 DRB1_1305 DRB1_1406 DRB1_1501 DRB1_1601 DPA10103-DPB10101 DPA10103-DPB10201 DPA10103-DPB10202 DPA10103-DPB10501 DPA10103-DPB11501 DPA10103-DPB11601 DPA10103-DPB11901 DPA10103-DPB13401 DPA10103-DPB14001 DPA10103-DPB14101 DPA10103-DPB14801 DPA10103-DPB15001 DPA10104-DPB10101 DPA10104-DPB11501 DPA10105-DPB10101 DPA10105-DPB15001 DPA10201-DPB11501 DPA10202-DPB10101 DPA10202-DPB10201 DPA10202-DPB10202 DPA10202-DPB10501 DPA10202-DPB110601 DPA10202-DPB11801 DPA10202-DPB11901 DPA10202-DPB13101 DPA10202-DPB13801 DPA10301-DPB10101 DPA10301-DPB10201 DPA10301-DPB10202 DPA10301-DPB10401 DPA10301-DPB110601 DPA10301-DPB11801 DPA10301-DPB12301 DPA10301-DPB13901 DPA10301-DPB14001 DPA10301-DPB16501 DPA10401-DPB10101 DPA10401-DPB10201 DPA10401-DPB10202 DPA10401-DPB10501 DQA10102-DQB10501 DQA10103-DQB10501
AVQMAVFIHNFKRKGGIGG

SEQ ID NO: 3008 - protein, 20 aa, Human immunodeficiency virus 1
  source 1..20: note = HLAs: DRB1_0101 DRB1_0801 DRB1_0802 DRB1_0804 DRB1_0806 DRB1_0809 DRB1_1001 DRB1_1101 DRB1_1102 DRB1_1103 DRB1_1104 DRB1_1301 DRB1_1303 DRB1_1304 DRB1_1305 DRB1_1406 DRB1_1501 DRB1_1503 DRB1_1601 DRB1_1602 DPA10103-DPB10101 DPA10103-DPB10201 DPA10103-DPB10202 DPA10103-DPB10501 DPA10103-DPB11501 DPA10103-DPB11601 DPA10103-DPB11801 DPA10103-DPB11901 DPA10103-DPB13101 DPA10103-DPB13401 DPA10103-DPB14001 DPA10103-DPB14101 DPA10103-DPB14801 DPA10103-DPB15001 DPA10104-DPB10101 DPA10104-DPB11501 DPA10105-DPB10101 DPA10105-DPB11801 DPA10105-DPB15001 DPA10201-DPB110601 DPA10201-DPB11501 DPA10201-DPB11601 DPA10201-DPB11901 DPA10202-DPB10101 DPA10202-DPB10201 DPA10202-DPB10202 DPA10202-DPB10501 DPA10202-DPB110601 DPA10202-DPB11801 DPA10202-DPB11901 DPA10202-DPB13101 DPA10202-DPB13801 DPA10202-DPB16501 DPA10301-DPB10101 DPA10301-DPB10201 DPA10301-DPB10202 DPA10301-DPB10401 DPA10301-DPB10402 DPA10301-DPB110501 DPA10301-DPB110601 DPA10301-DPB11801 DPA10301-DPB12301 DPA10301-DPB13901; note = HLAs: DPA10301-DPB14001 DPA10301-DPB14901 DPA10301-DPB16501 DPA10301-DPB18001 DPA10401-DPB10101 DPA10401-DPB10201 DPA10401-DPB10202 DPA10401-DPB10501 DQA10102-DQB10501 DQA10103-DQB10501
AVQMAVFIHNFKRKGGIGGY

SEQ ID NO: 3009 - protein, 21 aa, Human immunodeficiency virus 1
  source 1..21: note = HLAs: DRB1_0101 DRB1_0801 DRB1_0802 DRB1_0804 DRB1_0806 DRB1_0809 DRB1_1001 DRB1_1101 DRB1_1102 DRB1_1103 DRB1_1104 DRB1_1301 DRB1_1304 DRB1_1305 DRB1_1406 DRB1_1501 DRB1_1601 DPA10103-DPB11501 DPA10103-DPB11601 DPA10104-DPB11501 DPA10202-DPB10101 DPA10202-DPB10501 DPA10202-DPB110601 DPA10202-DPB11901 DPA10202-DPB13801 DPA10301-DPB10101 DPA10301-DPB10201 DPA10301-DPB10202 DPA10301-DPB10401 DPA10301-DPB110601 DPA10301-DPB11801 DPA10301-DPB12301 DPA10301-DPB13901 DPA10301-DPB14001 DPA10301-DPB16501 DPA10401-DPB10101 DPA10401-DPB10201 DPA10401-DPB10202 DPA10401-DPB10501 DQA10102-DQB10501
AVQMAVFIHNFKRKGGIGGYS

SEQ ID NO: 3010 - protein, 22 aa, Human immunodeficiency virus 1
  source 1..22: note = HLAs: DRB1_0101 DRB1_0801 DRB1_0802 DRB1_0804 DRB1_0806 DRB1_0809 DRB1_1001 DRB1_1101 DRB1_1102 DRB1_1103 DRB1_1104 DRB1_1301 DRB1_1304 DRB1_1305 DRB1_1406 DRB1_1501 DRB1_1601 DPA10103-DPB11501 DPA10103-DPB11601 DPA10104-DPB11501 DPA10202-DPB10101 DPA10202-DPB10501 DPA10202-DPB110601 DPA10202-DPB11901 DPA10202-DPB13801 DPA10301-DPB10101 DPA10301-DPB10201 DPA10301-DPB10202 DPA10301-DPB10401 DPA10301-DPB110601 DPA10301-DPB11801 DPA10301-DPB12301 DPA10301-DPB13901 DPA10301-DPB14001 DPA10301-DPB16501 DPA10401-DPB10101 DPA10401-DPB10201 DPA10401-DPB10202 DPA10401-DPB10501 DQA10102-DQB10501
AVQMAVFIHNFKRKGGIGGYSA

SEQ ID NO: 3011 - protein, 23 aa, Human immunodeficiency virus 1
  source 1..23: note = HLAs: DRB1_0101 DRB1_0801 DRB1_0802 DRB1_0804 DRB1_0806 DRB1_0809 DRB1_1001 DRB1_1101 DRB1_1102 DRB1_1103 DRB1_1104 DRB1_1301 DRB1_1304 DRB1_1305 DRB1_1406 DRB1_1501 DRB1_1601 DPA10103-DPB11501 DPA10103-DPB11601 DPA10104-DPB11501 DPA10202-DPB10101 DPA10202-DPB10501 DPA10202-DPB110601 DPA10202-DPB11901 DPA10202-DPB13801 DPA10301-DPB10101 DPA10301-DPB10201 DPA10301-DPB10202 DPA10301-DPB10401 DPA10301-DPB110601 DPA10301-DPB11801 DPA10301-DPB12301 DPA10301-DPB13901 DPA10301-DPB14001 DPA10301-DPB16501 DPA10401-DPB10101 DPA10401-DPB10201 DPA10401-DPB10202 DPA10401-DPB10501 DQA10102-DQB10501
AVQMAVFIHNFKRKGGIGGYSAG

SEQ ID NO: 3012 - protein, 24 aa, Human immunodeficiency virus 1
  source 1..24: note = HLAs: DRB1_0101 DRB1_0801 DRB1_0802 DRB1_0804 DRB1_0806 DRB1_0809 DRB1_1001 DRB1_1101 DRB1_1102 DRB1_1103 DRB1_1104 DRB1_1301 DRB1_1304 DRB1_1305 DRB1_1406 DRB1_1501 DRB1_1601 DPA10103-DPB11501 DPA10103-DPB11601 DPA10103-DPB15001 DPA10104-DPB11501 DPA10105-DPB15001 DPA10202-DPB10101 DPA10202-DPB10501 DPA10202-DPB110601 DPA10202-DPB11901 DPA10202-DPB13801 DPA10301-DPB10101 DPA10301-DPB10201 DPA10301-DPB10202 DPA10301-DPB10401 DPA10301-DPB110601 DPA10301-DPB11801 DPA10301-DPB12301 DPA10301-DPB13901 DPA10301-DPB14001 DPA10301-DPB16501 DPA10401-DPB10101 DPA10401-DPB10201 DPA10401-DPB10202 DPA10401-DPB10501 DQA10102-DQB10501
AVQMAVFIHNFKRKGGIGGYSAGE

SEQ ID NO: 3013 - protein, 25 aa, Human immunodeficiency virus 1
  source 1..25: note = HLAs: DRB1_0101 DRB1_0801 DRB1_0802 DRB1_0804 DRB1_0806 DRB1_0809 DRB1_1001 DRB1_1101 DRB1_1102 DRB1_1103 DRB1_1104 DRB1_1301 DRB1_1304 DRB1_1305 DRB1_1406 DRB1_1501 DRB1_1601 DPA10103-DPB11501 DPA10103-DPB11601 DPA10103-DPB15001 DPA10104-DPB11501 DPA10105-DPB15001 DPA10202-DPB10101 DPA10202-DPB10501 DPA10202-DPB110601 DPA10202-DPB11901 DPA10202-DPB13801 DPA10301-DPB10101 DPA10301-DPB10201 DPA10301-DPB10202 DPA10301-DPB10401 DPA10301-DPB110601 DPA10301-DPB11801 DPA10301-DPB12301 DPA10301-DPB13901 DPA10301-DPB14001 DPA10301-DPB16501 DPA10401-DPB10101 DPA10401-DPB10201 DPA10401-DPB10202 DPA10401-DPB10501 DQA10102-DQB10501
AVQMAVFIHNFKRKGGIGGYSAGER

SEQ ID NO: 3014 - protein, 15 aa, Human immunodeficiency virus 1
  source 1..15: note = HLAs: DRB1_0101 DRB1_1001
AWVKVVEEKAFSPEV

SEQ ID NO: 3015 - protein, 16 aa, Human immunodeficiency virus 1
  source 1..16: note = HLAs: DRB1_1001 DPA10301-DPB10101 DPA10301-DPB10201 DPA10301-DPB10202 DPA10401-DPB10101 DQA10102-DQB10501
AWVKVVEEKAFSPEVI

SEQ ID NO: 3016 - protein, 17 aa, Human immunodeficiency virus 1
  source 1..17: note = HLAs: DRB1_1001 DPA10301-DPB10101 DPA10301-DPB10201 DPA10401-DPB10101 DQA10102-DQB10501
AWVKVVEEKAFSPEVIP

SEQ ID NO: 3017 - protein, 19 aa, Human immunodeficiency virus 1
  source 1..19: note = HLAs: DRB1_1001 DPA10103-DPB10101 DPA10103-DPB11501 DPA10104-DPB10101 DPA10104-DPB11501 DPA10105-DPB10101 DPA10202-DPB10101 DPA10301-DPB10101 DPA10301-DPB10201 DPA10301-DPB10202 DPA10301-DPB10401 DPA10301-DPB110601 DPA10301-DPB11801 DPA10301-DPB12301 DPA10301-DPB13901 DPA10301-DPB14001 DPA10301-DPB16501 DPA10401-DPB10101 DPA10401-DPB10202 DQA10102-DQB10501 DQA10102-DQB10609
AWVKVVEEKAFSPEVIPMF

SEQ ID NO: 3018 - protein, 13 aa, Human immunodeficiency virus 1
  source 1..13: note = HLAs: DRB1_0101 DRB1_0102 DRB1_0801 DRB1_0802 DRB1_0804 DRB1_0806 DRB1_0809 DRB1_0901 DRB1_1001 DRB1_1101 DRB1_1102 DRB1_1103 DRB1_1104 DRB1_1114 DRB1_1301 DRB1_1302 DRB1_1304 DRB1_1305 DRB1_1401 DRB1_1404 DRB1_1406 DRB1_1454 DRB1_1501 DRB1_1601 DRB1_1602 DPA10103-DPB11501 DPA10104-DPB11501 DPA10301-DPB10201 DPA10301-DPB11801 DQA10102-DQB10501
AYFILKLAGRWPV

SEQ ID NO: 3019 - protein, 15 aa, Human immunodeficiency virus 1
  source 1..15: note = HLAs: DRB1_0101 DRB1_0401 DRB1_0405
CSPGIWQLDCTHLEG

SEQ ID NO: 3020 - protein, 16 aa, Human immunodeficiency virus 1
  source 1..16: note = HLAs: DRB1_0401 DRB1_0405
CSPGIWQLDCTHLEGK

SEQ ID NO: 3021 - protein, 17 aa, Human immunodeficiency virus 1
  source 1..17: note = HLAs: DRB1_0401 DRB1_0405 DRB1_0408
CSPGIWQLDCTHLEGKI

SEQ ID NO: 3022 - protein, 19 aa, Human immunodeficiency virus 1
  source 1..19: note = HLAs: DRB1_0101 DRB1_0401 DRB1_0405
CSPGIWQLDCTHLEGKIIL

SEQ ID NO: 3023 - protein, 20 aa, Human immunodeficiency virus 1
  source 1..20: note = HLAs: DRB1_0101 DRB1_0401 DRB1_0405 DRB1_0408 DRB1_1001 DRB1_1303 DPA10301-DPB10101 DPA10301-DPB11801 DQA10102-DQB10501
CSPGIWQLDCTHLEGKIILV

SEQ ID NO: 3024 - protein, 21 aa, Human immunodeficiency virus 1
  source 1..21: note = HLAs: DRB1_0101 DRB1_0401 DRB1_0405 DRB1_1001 DPA10301-DPB10101 DPA10301-DPB10201 DPA10301-DPB10202 DPA10401-DPB10101 DQA10102-DQB10501
CSPGIWQLDCTHLEGKIILVA

SEQ ID NO: 3025 - protein, 22 aa, Human immunodeficiency virus 1
  source 1..22: note = HLAs: DRB1_0101 DRB1_0401 DRB1_0405 DRB1_1001 DPA10301-DPB10101 DPA10301-DPB10201 DPA10301-DPB10202 DPA10301-DPB110601 DPA10301-DPB11801 DPA10301-DPB14001 DPA10401-DPB10101 DQA10102-DQB10501
CSPGIWQLDCTHLEGKIILVAV

SEQ ID NO: 3026 - protein, 23 aa, Human immunodeficiency virus 1
  source 1..23: note = HLAs: DRB1_0101 DRB1_0401 DRB1_0405 DRB1_1001 DPA10103-DPB11501 DPA10104-DPB11501 DPA10301-DPB10101 DPA10301-DPB10201 DPA10301-DPB10202 DPA10301-DPB110601 DPA10301-DPB11801 DPA10301-DPB14001 DPA10301-DPB16501 DPA10401-DPB10101 DQA10102-DQB10501
CSPGIWQLDCTHLEGKIILVAVH

SEQ ID NO: 3027 - protein, 24 aa, Human immunodeficiency virus 1
  source 1..24: note = HLAs: DRB1_0101 DRB1_0401 DRB1_0405 DRB1_1001 DPA10103-DPB11501 DPA10104-DPB11501 DPA10301-DPB10101 DPA10301-DPB10201 DPA10301-DPB10202 DPA10301-DPB110601 DPA10301-DPB11801 DPA10301-DPB14001 DPA10301-DPB16501 DPA10401-DPB10101 DPA10401-DPB10201 DPA10401-DPB10202 DQA10102-DQB10501
CSPGIWQLDCTHLEGKIILVAVHV

SEQ ID NO: 3028 - protein, 25 aa, Human immunodeficiency virus 1
  source 1..25: note = HLAs: DRB1_0101 DRB1_0102 DRB1_0401 DRB1_0405 DRB1_0408 DRB1_0410 DRB1_1001 DPA10103-DPB11501 DPA10104-DPB11501 DPA10202-DPB10101 DPA10301-DPB10101 DPA10301-DPB10201 DPA10301-DPB10202 DPA10301-DPB10401 DPA10301-DPB110601 DPA10301-DPB11801 DPA10301-DPB12301 DPA10301-DPB13901 DPA10301-DPB14001 DPA10301-DPB16501 DPA10401-DPB10101 DPA10401-DPB10201 DPA10401-DPB10202 DQA10102-DQB10501 DQA10103-DQB10501
CSPGIWQLDCTHLEGKIILVAVHVA

SEQ ID NO: 3029 - protein, 13 aa, Human immunodeficiency virus 1
  source 1..13: note = HLAs: DPA10301-DPB10201 DPA10301-DPB10202
CTHLEGKIILVAV

SEQ ID NO: 3030 - protein, 14 aa, Human immunodeficiency virus 1
  source 1..14: note = HLAs: DRB1_1001 DPA10103-DPB11501 DPA10104-DPB11501 DPA10301-DPB10101 DPA10301-DPB10201 DPA10301-DPB10202 DPA10301-DPB110601 DPA10301-DPB11801 DPA10301-DPB14001 DPA10401-DPB10101 DPA10401-DPB10201 DPA10401-DPB10202 DQA10102-DQB10501
CTHLEGKIILVAVH

SEQ ID NO: 3031 - protein, 15 aa, Human immunodeficiency virus 1
  source 1..15: note = HLAs: DRB1_0101 DRB1_0102 DRB1_0404 DRB1_0410 DRB1_0804 DRB1_0806 DRB1_1001 DRB1_1304 DRB1_1406 DPA10103-DPB10101 DPA10103-DPB10201 DPA10103-DPB10202 DPA10103-DPB11501 DPA10103-DPB11901 DPA10103-DPB14801 DPA10103-DPB15001 DPA10104-DPB10101 DPA10104-DPB11501 DPA10105-DPB10101 DPA10105-DPB15001 DPA10202-DPB10101 DPA10202-DPB110601 DPA10202-DPB11901 DPA10301-DPB10101 DPA10301-DPB10201 DPA10301-DPB10202 DPA10301-DPB10401 DPA10301-DPB10402 DPA10301-DPB110501 DPA10301-DPB110601 DPA10301-DPB11801 DPA10301-DPB12301 DPA10301-DPB13901 DPA10301-DPB14001 DPA10301-DPB14901 DPA10301-DPB16501 DPA10301-DPB17501 DPA10301-DPB18001 DPA10401-DPB10101 DPA10401-DPB10201 DPA10401-DPB10202 DQA10102-DQB10501 DQA10102-DQB10601 DQA10102-DQB10602 DQA10103-DQB10501 DQA10103-DQB10601 DQA10103-DQB10602 DQA10201-DQB10301
CTHLEGKIILVAVHV

SEQ ID NO: 3032 - protein, 16 aa, Human immunodeficiency virus 1
  source 1..16: note = HLAs: DRB1_0101 DRB1_0404 DRB1_0408 DRB1_1001 DPA10103-DPB10101 DPA10103-DPB10202 DPA10103-DPB11501 DPA10103-DPB11901 DPA10104-DPB10101 DPA10104-DPB11501 DPA10105-DPB10101 DPA10202-DPB10101 DPA10301-DPB10101 DPA10301-DPB10201 DPA10301-DPB10202 DPA10301-DPB10401 DPA10301-DPB110601 DPA10301-DPB11801 DPA10301-DPB12301 DPA10301-DPB13901 DPA10301-DPB14001 DPA10301-DPB16501 DPA10401-DPB10101 DPA10401-DPB10201 DPA10401-DPB10202 DQA10102-DQB10501 DQA10102-DQB10503 DQA10102-DQB10601 DQA10102-DQB10602 DQA10102-DQB10609 DQA10102-DQB10611 DQA10103-DQB10501 DQA10103-DQB10601 DQA10103-DQB10602 DQA10103-DQB10609 DQA10201-DQB10301
CTHLEGKIILVAVHVA

SEQ ID NO: 3033 - protein, 17 aa, Human immunodeficiency virus 1
  source 1..17: note = HLAs: DRB1_0101 DRB1_0404 DRB1_0408 DRB1_0410 DRB1_0802 DRB1_0804 DRB1_0806 DRB1_0809 DRB1_0813 DRB1_1001 DRB1_1104 DRB1_1406 DRB1_1501 DPA10103-DPB10101 DPA10103-DPB10202 DPA10103-DPB11501 DPA10103-DPB11901 DPA10103-DPB15001 DPA10104-DPB10101 DPA10104-DPB11501 DPA10105-DPB10101 DPA10105-DPB15001 DPA10202-DPB10101 DPA10202-DPB110601 DPA10202-DPB11901 DPA10301-DPB10101 DPA10301-DPB10201 DPA10301-DPB10202 DPA10301-DPB10401 DPA10301-DPB110601 DPA10301-DPB11801 DPA10301-DPB12301 DPA10301-DPB13901 DPA10301-DPB14001 DPA10301-DPB16501 DPA10301-DPB17501 DPA10401-DPB10101 DPA10401-DPB10201 DPA10401-DPB10202 DPA10401-DPB10301 DPA10401-DPB10501 DPA10401-DPB11401 DQA10102-DQB10501 DQA10102-DQB10503 DQA10102-DQB10601 DQA10102-DQB10602 DQA10102-DQB10609 DQA10102-DQB10611 DQA10103-DQB10501 DQA10103-DQB10601 DQA10103-DQB10602 DQA10103-DQB10609
CTHLEGKIILVAVHVAS

SEQ ID NO: 3034 - protein, 18 aa, Human immunodeficiency virus 1
  source 1..18: note = HLAs: DRB1_1001 DPA10103-DPB11501 DPA10104-DPB11501 DPA10301-DPB10101 DPA10301-DPB10201 DPA10301-DPB10202 DPA10301-DPB110601 DPA10301-DPB11801 DPA10401-DPB10101 DQA10102-DQB10501 DQA10102-DQB10503 DQA10102-DQB10602 DQA10102-DQB10609 DQA10102-DQB10611 DQA10103-DQB10501
CTHLEGKIILVAVHVASG

SEQ ID NO: 3035 - protein, 19 aa, Human immunodeficiency virus 1
  source 1..19: note = HLAs: DRB1_0101 DRB1_0404 DRB1_0408 DRB1_0410 DRB1_0802 DRB1_0804 DRB1_0809 DRB1_0813 DRB1_1001 DRB1_1406 DPA10103-DPB11501 DPA10104-DPB11501 DPA10301-DPB10101 DPA10301-DPB10201 DPA10301-DPB10202 DPA10301-DPB10401 DPA10301-DPB110601 DPA10301-DPB11801 DPA10301-DPB12301 DPA10301-DPB13901 DPA10301-DPB14001 DPA10301-DPB16501 DPA10401-DPB10101 DPA10401-DPB10201 DPA10401-DPB10202 DQA10102-DQB10501 DQA10102-DQB10503 DQA10102-DQB10601 DQA10102-DQB10602 DQA10102-DQB10609 DQA10102-DQB10611 DQA10103-DQB10501 DQA10103-DQB10601 DQA10103-DQB10602 DQA10103-DQB10609
CTHLEGKIILVAVHVASGY

SEQ ID NO: 3036 - protein, 14 aa, Human immunodeficiency virus 1
  source 1..14: note = HLAs: DPA10301-DPB10101 DQA10102-DQB10501
CTLNFPISPIETVP

SEQ ID NO: 3037 - protein, 15 aa, Human immunodeficiency virus 1
  source 1..15: note = HLAs: DRB1_0101 DRB1_0102 DRB1_0404 DRB1_0405 DRB1_0408 DRB1_0410 DRB1_0701 DRB1_0813 DRB1_0901 DRB1_1001 DRB1_1114 DRB1_1302 DRB1_1304 DRB1_1404 DRB1_1406 DPA10103-DPB11501 DPA10104-DPB11501 DPA10202-DPB10101 DPA10301-DPB10101 DPA10301-DPB10201 DPA10301-DPB10202 DPA10301-DPB10401 DPA10301-DPB11801 DPA10301-DPB12301 DPA10301-DPB13901 DPA10301-DPB14001 DPA10301-DPB16501 DPA10401-DPB10101 DQA10102-DQB10501 DQA10102-DQB10601 DQA10102-DQB10609 DQA10103-DQB10501 DQA10103-DQB10601 DQA10103-DQB10609 DQA10201-DQB10301 DQA10201-DQB10303 DQA10505-DQB10402 DQA10506-DQB10303
CTLNFPISPIETVPV

SEQ ID NO: 3038 - protein, 16 aa, Human immunodeficiency virus 1
  source 1..16: note = HLAs: DRB1_0101 DRB1_0102 DRB1_0404 DRB1_0408 DRB1_0410 DRB1_0701 DRB1_0813 DRB1_0901 DRB1_1001 DRB1_1114 DRB1_1302 DPA10103-DPB11501 DPA10104-DPB11501 DPA10202-DPB10101 DPA10301-DPB10101 DPA10301-DPB10201 DPA10301-DPB10202 DPA10301-DPB10401 DPA10301-DPB11801 DPA10301-DPB12301 DPA10301-DPB13901 DPA10301-DPB16501 DPA10401-DPB10101 DQA10102-DQB10501 DQA10102-DQB10601 DQA10102-DQB10609 DQA10103-DQB10501 DQA10103-DQB10601 DQA10103-DQB10609 DQA10201-DQB10301 DQA10201-DQB10303 DQA10505-DQB10402 DQA10506-DQB10303
CTLNFPISPIETVPVK

SEQ ID NO: 3039 - protein, 17 aa, Human immunodeficiency virus 1
  source 1..17: note = HLAs: DRB1_0101 DRB1_0102 DRB1_0401 DRB1_0404 DRB1_0405 DRB1_0408 DRB1_0410 DRB1_0701 DRB1_0813 DRB1_0901 DRB1_1001 DRB1_1102 DRB1_1114 DRB1_1201 DRB1_1301 DRB1_1302 DRB1_1304 DRB1_1401 DRB1_1404 DRB1_1406 DRB1_1454 DRB1_1501 DRB1_1502 DRB1_1602 DPA10103-DPB11501 DPA10104-DPB11501 DPA10202-DPB10101 DPA10301-DPB10101 DPA10301-DPB10201 DPA10301-DPB10202 DPA10301-DPB10401 DPA10301-DPB11801 DPA10301-DPB12301 DPA10301-DPB13901 DPA10301-DPB14001 DPA10301-DPB16501 DPA10401-DPB10101 DQA10102-DQB10501 DQA10102-DQB10601 DQA10102-DQB10609 DQA10103-DQB10501 DQA10103-DQB10601 DQA10103-DQB10609 DQA10201-DQB10301 DQA10201-DQB10303 DQA10505-DQB10402 DQA10506-DQB10303
CTLNFPISPIETVPVKL

SEQ ID NO: 3040 - protein, 18 aa, Human immunodeficiency virus 1
  source 1..18: note = HLAs: DRB1_0101 DRB1_0102 DRB1_0404 DRB1_0701 DRB1_0813 DRB1_1001 DRB1_1114 DRB1_1302 DPA10202-DPB10101 DPA10301-DPB10101 DPA10401-DPB10101 DQA10102-DQB10501 DQA10102-DQB10609 DQA10103-DQB10601 DQA10103-DQB10609
CTLNFPISPIETVPVKLK

SEQ ID NO: 3041 - protein, 19 aa, Human immunodeficiency virus 1
  source 1..19: note = HLAs: DRB1_0101 DRB1_0102 DRB1_0401 DRB1_0404 DRB1_0405 DRB1_0408 DRB1_0410 DRB1_0701 DRB1_0802 DRB1_0809 DRB1_0813 DRB1_0901 DRB1_1001 DRB1_1102 DRB1_1114 DRB1_1201 DRB1_1301 DRB1_1302 DRB1_1304 DRB1_1401 DRB1_1402 DRB1_1404 DRB1_1406 DRB1_1454 DRB1_1501 DRB1_1502 DRB1_1602 DPA10103-DPB10101 DPA10103-DPB11501 DPA10104-DPB10101 DPA10104-DPB11501 DPA10105-DPB10101 DPA10202-DPB10101 DPA10202-DPB13101 DPA10301-DPB10101 DPA10301-DPB10201 DPA10301-DPB10202 DPA10301-DPB10401 DPA10301-DPB110601 DPA10301-DPB11801 DPA10301-DPB12301 DPA10301-DPB13901 DPA10301-DPB14001 DPA10301-DPB16501 DPA10401-DPB10101 DQA10102-DQB10501 DQA10102-DQB10503 DQA10102-DQB10601 DQA10102-DQB10609 DQA10103-DQB10501 DQA10103-DQB10601 DQA10103-DQB10609 DQA10201-DQB10301 DQA10201-DQB10303 DQA10505-DQB10402 DQA10506-DQB10303
CTLNFPISPIETVPVKLKP

SEQ ID NO: 3042 - protein, 20 aa, Human immunodeficiency virus 1
  source 1..20: note = HLAs: DRB1_0101 DRB1_0102 DRB1_0401 DRB1_0404 DRB1_0405 DRB1_0408 DRB1_0410 DRB1_0701 DRB1_0801 DRB1_0802 DRB1_0803 DRB1_0804 DRB1_0806 DRB1_0809 DRB1_0813 DRB1_0901 DRB1_1001 DRB1_1102 DRB1_1103 DRB1_1114 DRB1_1201 DRB1_1301 DRB1_1302 DRB1_1304 DRB1_1401 DRB1_1402 DRB1_1403 DRB1_1404 DRB1_1406 DRB1_1454 DRB1_1501 DRB1_1502 DRB1_1503 DRB1_1601 DRB1_1602 DPA10103-DPB10101 DPA10103-DPB11501 DPA10103-DPB13101 DPA10103-DPB15001 DPA10104-DPB10101 DPA10104-DPB11501 DPA10105-DPB10101 DPA10105-DPB15001 DPA10106-DPB10101 DPA10201-DPB10101 DPA10201-DPB11501 DPA10202-DPB10101 DPA10202-DPB10201 DPA10202-DPB10202 DPA10202-DPB10501 DPA10202-DPB110601 DPA10202-DPB11801 DPA10202-DPB11901 DPA10202-DPB13101 DPA10202-DPB13801 DPA10202-DPB15501 DPA10202-DPB16501 DPA10301-DPB10101 DPA10301-DPB10201 DPA10301-DPB10202 DPA10301-DPB10401 DPA10301-DPB10402 DPA10301-DPB110501 DPA10301-DPB110601 DPA10301-DPB11801 DPA10301-DPB12301 DPA10301-DPB13901 DPA10301-DPB14001 DPA10301-DPB14901 DPA10301-DPB16501; note = HLAs: DPA10301-DPB17501 DPA10301-DPB18001 DPA10401-DPB10101 DPA10401-DPB10201 DPA10401-DPB10202 DPA10401-DPB10501 DQA10102-DQB10501 DQA10102-DQB10503 DQA10102-DQB10601 DQA10102-DQB10609 DQA10103-DQB10501 DQA10103-DQB10601 DQA10103-DQB10602 DQA10103-DQB10604 DQA10103-DQB10608 DQA10103-DQB10609 DQA10201-DQB10301 DQA10201-DQB10303 DQA10505-DQB10402 DQA10506-DQB10303
CTLNFPISPIETVPVKLKPG

SEQ ID NO: 3043 - protein, 21 aa, Human immunodeficiency virus 1
  source 1..21: note = HLAs: DRB1_0101 DRB1_0102 DRB1_0401 DRB1_0404 DRB1_0405 DRB1_0408 DRB1_0410 DRB1_0701 DRB1_0802 DRB1_0803 DRB1_0804 DRB1_0806 DRB1_0809 DRB1_0813 DRB1_0901 DRB1_1001 DRB1_1102 DRB1_1103 DRB1_1114 DRB1_1201 DRB1_1301 DRB1_1302 DRB1_1304 DRB1_1401 DRB1_1402 DRB1_1404 DRB1_1406 DRB1_1454 DRB1_1501 DRB1_1502 DRB1_1602 DPA10103-DPB10101 DPA10103-DPB11501 DPA10104-DPB10101 DPA10104-DPB11501 DPA10105-DPB10101 DPA10202-DPB10101 DPA10301-DPB10101 DPA10301-DPB10201 DPA10301-DPB10202 DPA10301-DPB10401 DPA10301-DPB110601 DPA10301-DPB11801 DPA10301-DPB12301 DPA10301-DPB13901 DPA10301-DPB14001 DPA10301-DPB16501 DPA10401-DPB10101 DQA10102-DQB10501 DQA10102-DQB10601 DQA10102-DQB10609 DQA10103-DQB10501 DQA10103-DQB10601 DQA10103-DQB10609 DQA10505-DQB10402
CTLNFPISPIETVPVKLKPGM

SEQ ID NO: 3044 - protein, 22 aa, Human immunodeficiency virus 1
  source 1..22: note = HLAs: DRB1_0101 DRB1_0102 DRB1_0401 DRB1_0404 DRB1_0405 DRB1_0408 DRB1_0410 DRB1_0701 DRB1_0801 DRB1_0802 DRB1_0803 DRB1_0804 DRB1_0806 DRB1_0809 DRB1_0813 DRB1_0901 DRB1_1001 DRB1_1102 DRB1_1103 DRB1_1114 DRB1_1201 DRB1_1301 DRB1_1302 DRB1_1304 DRB1_1401 DRB1_1402 DRB1_1404 DRB1_1406 DRB1_1454 DRB1_1501 DRB1_1502 DRB1_1602 DPA10103-DPB10101 DPA10103-DPB11501 DPA10104-DPB10101 DPA10104-DPB11501 DPA10105-DPB10101 DPA10202-DPB10101 DPA10202-DPB13101 DPA10301-DPB10101 DPA10301-DPB10201 DPA10301-DPB10202 DPA10301-DPB10401 DPA10301-DPB110601 DPA10301-DPB11801 DPA10301-DPB12301 DPA10301-DPB13901 DPA10301-DPB14001 DPA10301-DPB16501 DPA10401-DPB10101 DQA10102-DQB10501 DQA10102-DQB10601 DQA10102-DQB10609 DQA10103-DQB10501 DQA10103-DQB10601 DQA10103-DQB10609 DQA10505-DQB10402
CTLNFPISPIETVPVKLKPGMD

SEQ ID NO: 3045 - protein, 23 aa, Human immunodeficiency virus 1
  source 1..23: note = HLAs: DRB1_0101 DRB1_0102 DRB1_0401 DRB1_0404 DRB1_0405 DRB1_0408 DRB1_0410 DRB1_0701 DRB1_0801 DRB1_0802 DRB1_0803 DRB1_0804 DRB1_0806 DRB1_0809 DRB1_0813 DRB1_0901 DRB1_1001 DRB1_1102 DRB1_1103 DRB1_1104 DRB1_1114 DRB1_1201 DRB1_1301 DRB1_1302 DRB1_1304 DRB1_1401 DRB1_1402 DRB1_1404 DRB1_1406 DRB1_1454 DRB1_1501 DRB1_1502 DRB1_1602 DPA10103-DPB10101 DPA10103-DPB11501 DPA10104-DPB10101 DPA10104-DPB11501 DPA10105-DPB10101 DPA10202-DPB10101 DPA10202-DPB13101 DPA10301-DPB10101 DPA10301-DPB10201 DPA10301-DPB10202 DPA10301-DPB10401 DPA10301-DPB110601 DPA10301-DPB11801 DPA10301-DPB12301 DPA10301-DPB13901 DPA10301-DPB14001 DPA10301-DPB16501 DPA10401-DPB10101 DQA10102-DQB10501 DQA10102-DQB10601 DQA10102-DQB10609 DQA10103-DQB10501 DQA10103-DQB10601 DQA10103-DQB10609 DQA10505-DQB10402
CTLNFPISPIETVPVKLKPGMDG

SEQ ID NO: 3046 - protein, 24 aa, Human immunodeficiency virus 1
  source 1..24: note = HLAs: DRB1_0101 DRB1_0102 DRB1_0401 DRB1_0404 DRB1_0405 DRB1_0408 DRB1_0410 DRB1_0701 DRB1_0801 DRB1_0802 DRB1_0803 DRB1_0804 DRB1_0806 DRB1_0809 DRB1_0813 DRB1_0901 DRB1_1001 DRB1_1102 DRB1_1103 DRB1_1104 DRB1_1114 DRB1_1201 DRB1_1301 DRB1_1302 DRB1_1304 DRB1_1401 DRB1_1402 DRB1_1404 DRB1_1406 DRB1_1454 DRB1_1501 DRB1_1502 DRB1_1602 DPA10103-DPB10101 DPA10103-DPB11501 DPA10104-DPB10101 DPA10104-DPB11501 DPA10105-DPB10101 DPA10202-DPB10101 DPA10202-DPB13101 DPA10301-DPB10101 DPA10301-DPB10201 DPA10301-DPB10202 DPA10301-DPB10401 DPA10301-DPB110601 DPA10301-DPB11801 DPA10301-DPB12301 DPA10301-DPB13901 DPA10301-DPB14001 DPA10301-DPB16501 DPA10401-DPB10101 DQA10102-DQB10501 DQA10102-DQB10601 DQA10102-DQB10609 DQA10103-DQB10501 DQA10103-DQB10601 DQA10103-DQB10609 DQA10505-DQB10402
CTLNFPISPIETVPVKLKPGMDGP

SEQ ID NO: 3047 - protein, 25 aa, Human immunodeficiency virus 1
  source 1..25: note = HLAs: DRB1_0101 DRB1_0102 DRB1_0401 DRB1_0404 DRB1_0405 DRB1_0408 DRB1_0410 DRB1_0701 DRB1_0801 DRB1_0802 DRB1_0803 DRB1_0804 DRB1_0806 DRB1_0809 DRB1_0813 DRB1_0901 DRB1_1001 DRB1_1102 DRB1_1103 DRB1_1104 DRB1_1114 DRB1_1201 DRB1_1301 DRB1_1302 DRB1_1304 DRB1_1401 DRB1_1402 DRB1_1404 DRB1_1406 DRB1_1454 DRB1_1501 DRB1_1502 DRB1_1602 DPA10103-DPB10101 DPA10103-DPB11501 DPA10104-DPB10101 DPA10104-DPB11501 DPA10105-DPB10101 DPA10202-DPB10101 DPA10202-DPB13101 DPA10301-DPB10101 DPA10301-DPB10201 DPA10301-DPB10202 DPA10301-DPB10401 DPA10301-DPB110601 DPA10301-DPB11801 DPA10301-DPB12301 DPA10301-DPB13901 DPA10301-DPB14001 DPA10301-DPB16501 DPA10401-DPB10101 DQA10102-DQB10501 DQA10102-DQB10601 DQA10102-DQB10609 DQA10103-DQB10501 DQA10103-DQB10601 DQA10103-DQB10609 DQA10505-DQB10402
CTLNFPISPIETVPVKLKPGMDGPK

SEQ ID NO: 3048 - protein, 17 aa, Human immunodeficiency virus 1
  source 1..17: note = HLAs: DRB1_0401 DRB1_0405
DCSPGIWQLDCTHLEGK

SEQ ID NO: 3049 - protein, 19 aa, Human immunodeficiency virus 1
  source 1..19: note = HLAs: DRB1_0401 DRB1_0405
DCSPGIWQLDCTHLEGKII

SEQ ID NO: 3050 - protein, 14 aa, Human immunodeficiency virus 1
  source 1..14: note = HLAs: DRB1_0101 DPA10103-DPB11501 DPA10104-DPB11501 DPA10301-DPB10101 DPA10301-DPB10201 DPA10301-DPB10202 DPA10301-DPB11801 DPA10401-DPB10202
DCTHLEGKIILVAV

SEQ ID NO: 3051 - protein, 15 aa, Human immunodeficiency virus 1
  source 1..15: note = HLAs: DRB1_0101 DRB1_0102 DRB1_0701 DRB1_0901 DRB1_1001 DRB1_1304 DPA10103-DPB10201 DPA10103-DPB10202 DPA10103-DPB11501 DPA10103-DPB14801 DPA10104-DPB11501 DPA10202-DPB10101 DPA10202-DPB110601 DPA10202-DPB11901 DPA10301-DPB10101 DPA10301-DPB10201 DPA10301-DPB10202 DPA10301-DPB10401 DPA10301-DPB110601 DPA10301-DPB11801 DPA10301-DPB12301 DPA10301-DPB13901 DPA10301-DPB14001 DPA10301-DPB16501 DPA10401-DPB10101 DPA10401-DPB10201 DPA10401-DPB10202 DQA10102-DQB10501 DQA10102-DQB10601 DQA10103-DQB10601 DQA10201-DQB10301
DCTHLEGKIILVAVH

SEQ ID NO: 3052 - protein, 16 aa, Human immunodeficiency virus 1
  source 1..16: note = HLAs: DRB1_0101 DRB1_1001 DPA10103-DPB10201 DPA10103-DPB10202 DPA10103-DPB11501 DPA10103-DPB14801 DPA10104-DPB11501 DPA10301-DPB10101 DPA10301-DPB10201 DPA10301-DPB10202 DPA10301-DPB10401 DPA10301-DPB110601 DPA10301-DPB11801 DPA10301-DPB12301 DPA10301-DPB13901 DPA10301-DPB14001 DPA10301-DPB16501 DPA10401-DPB10101 DPA10401-DPB10201 DPA10401-DPB10202 DQA10102-DQB10501 DQA10102-DQB10601 DQA10103-DQB10601 DQA10201-DQB10301
DCTHLEGKIILVAVHV

SEQ ID NO: 3053 - protein, 17 aa, Human immunodeficiency virus 1
  source 1..17: note = HLAs: DRB1_0101 DRB1_0404 DRB1_0408 DRB1_0410 DRB1_0802 DRB1_0804 DRB1_0809 DRB1_0813 DRB1_1001 DRB1_1406 DRB1_1501 DPA10103-DPB10101 DPA10103-DPB10202 DPA10103-DPB11501 DPA10103-DPB11901 DPA10103-DPB15001 DPA10104-DPB10101 DPA10104-DPB11501 DPA10105-DPB10101 DPA10105-DPB15001 DPA10202-DPB10101 DPA10202-DPB110601 DPA10202-DPB11901 DPA10301-DPB10101 DPA10301-DPB10201 DPA10301-DPB10202 DPA10301-DPB10401 DPA10301-DPB10402 DPA10301-DPB110501 DPA10301-DPB110601 DPA10301-DPB11801 DPA10301-DPB12301 DPA10301-DPB13901 DPA10301-DPB14001 DPA10301-DPB14901 DPA10301-DPB16501 DPA10301-DPB17501 DPA10301-DPB18001 DPA10401-DPB10101 DPA10401-DPB10201 DPA10401-DPB10202 DPA10401-DPB10501 DQA10102-DQB10501 DQA10102-DQB10503 DQA10102-DQB10601 DQA10102-DQB10602 DQA10102-DQB10609 DQA10102-DQB10611 DQA10103-DQB10501 DQA10103-DQB10601 DQA10103-DQB10602 DQA10103-DQB10609
DCTHLEGKIILVAVHVA

SEQ ID NO: 3054 - protein, 18 aa, Human immunodeficiency virus 1
  source 1..18: note = HLAs: DRB1_1001 DPA10103-DPB11501 DPA10104-DPB11501 DPA10301-DPB10101 DPA10301-DPB10201 DPA10301-DPB10202 DPA10301-DPB110601 DPA10301-DPB11801 DPA10401-DPB10101 DPA10401-DPB10202 DQA10102-DQB10501
DCTHLEGKIILVAVHVAS

SEQ ID NO: 3055 - protein, 19 aa, Human immunodeficiency virus 1
  source 1..19: note = HLAs: DRB1_0101 DRB1_0404 DRB1_0408 DRB1_0813 DRB1_1001 DRB1_1406 DPA10103-DPB11501 DPA10104-DPB11501 DPA10301-DPB10101 DPA10301-DPB10201 DPA10301-DPB10202 DPA10301-DPB10401 DPA10301-DPB110601 DPA10301-DPB11801 DPA10301-DPB12301 DPA10301-DPB13901 DPA10301-DPB14001 DPA10301-DPB16501 DPA10401-DPB10101 DPA10401-DPB10201 DPA10401-DPB10202 DQA10102-DQB10501 DQA10102-DQB10503 DQA10102-DQB10601 DQA10102-DQB10602 DQA10102-DQB10609 DQA10102-DQB10611 DQA10103-DQB10501 DQA10103-DQB10601 DQA10103-DQB10602 DQA10103-DQB10609
DCTHLEGKIILVAVHVASG

SEQ ID NO: 3056 - protein, 20 aa, Human immunodeficiency virus 1
  source 1..20: note = HLAs: DRB1_0101 DRB1_0404 DRB1_0408 DRB1_0410 DRB1_0701 DRB1_0802 DRB1_0804 DRB1_0806 DRB1_0809 DRB1_0813 DRB1_0901 DRB1_1001 DRB1_1104 DRB1_1406 DRB1_1501 DPA10103-DPB10101 DPA10103-DPB11501 DPA10103-DPB11901 DPA10103-DPB15001 DPA10104-DPB10101 DPA10104-DPB11501 DPA10105-DPB10101 DPA10105-DPB15001 DPA10202-DPB10101 DPA10202-DPB110601 DPA10202-DPB11901 DPA10301-DPB10101 DPA10301-DPB10201 DPA10301-DPB10202 DPA10301-DPB10401 DPA10301-DPB110601 DPA10301-DPB11801 DPA10301-DPB12301 DPA10301-DPB13901 DPA10301-DPB14001 DPA10301-DPB15501 DPA10301-DPB16501 DPA10301-DPB17501 DPA10401-DPB10101 DPA10401-DPB10201 DPA10401-DPB10202 DPA10401-DPB10301 DPA10401-DPB10501 DPA10401-DPB11401 DQA10102-DQB10501 DQA10102-DQB10503 DQA10102-DQB10601 DQA10102-DQB10602 DQA10102-DQB10609 DQA10102-DQB10611 DQA10103-DQB10501 DQA10103-DQB10601 DQA10103-DQB10602 DQA10103-DQB10609 DQA10201-DQB10301
DCTHLEGKIILVAVHVASGY

SEQ ID NO: 3057 - protein, 15 aa, Human immunodeficiency virus 1
  source 1..15: note = HLAs: DQA10102-DQB10501 DQA10102-DQB10609
DDLYVGSDLEIGQHR

SEQ ID NO: 3058 - protein, 16 aa, Human immunodeficiency virus 1
  source 1..16: note = HLAs: DQA10102-DQB10501 DQA10102-DQB10609
DDLYVGSDLEIGQHRA

SEQ ID NO: 3059 - protein, 14 aa, Human immunodeficiency virus 1
  source 1..14: note = HLAs: DRB1_1101 DRB1_1305
DFRELNKRTQDFWE

SEQ ID NO: 3060 - protein, 15 aa, Human immunodeficiency virus 1
  source 1..15: note = HLAs: DRB1_0806 DRB1_1101 DRB1_1103 DRB1_1104 DRB1_1305
DFRELNKRTQDFWEV

SEQ ID NO: 3061 - protein, 16 aa, Human immunodeficiency virus 1
  source 1..16: note = HLAs: DRB1_1101 DRB1_1305 DPA10401-DPB10101
DFRELNKRTQDFWEVQ

SEQ ID NO: 3062 - protein, 17 aa, Human immunodeficiency virus 1
  source 1..17: note = HLAs: DRB1_1101 DRB1_1104 DRB1_1305 DPA10103-DPB11501 DPA10104-DPB11501 DPA10301-DPB10101 DPA10301-DPB10201 DPA10301-DPB10202 DPA10401-DPB10101
DFRELNKRTQDFWEVQL

SEQ ID NO: 3063 - protein, 19 aa, Human immunodeficiency virus 1
  source 1..19: note = HLAs: DPA10103-DPB10101 DPA10103-DPB11501 DPA10103-DPB13101 DPA10104-DPB10101 DPA10104-DPB11501 DPA10105-DPB10101 DPA10301-DPB10101 DPA10301-DPB10201 DPA10301-DPB10202 DPA10301-DPB110601 DPA10301-DPB14001 DPA10301-DPB16501 DPA10401-DPB10101 DQA10102-DQB10501
DFRELNKRTQDFWEVQLGI

SEQ ID NO: 3064 - protein, 20 aa, Human immunodeficiency virus 1
  source 1..20: note = HLAs: DRB1_1101 DRB1_1305 DPA10103-DPB10101 DPA10103-DPB11501 DPA10103-DPB11601 DPA10103-DPB13101 DPA10103-DPB15001 DPA10104-DPB10101 DPA10104-DPB11501 DPA10105-DPB10101 DPA10105-DPB15001 DPA10106-DPB10101 DPA10201-DPB10101 DPA10202-DPB10101 DPA10202-DPB110601 DPA10202-DPB11901 DPA10202-DPB13101 DPA10301-DPB10101 DPA10301-DPB10201 DPA10301-DPB10202 DPA10301-DPB10401 DPA10301-DPB110601 DPA10301-DPB11801 DPA10301-DPB12301 DPA10301-DPB13901 DPA10301-DPB14001 DPA10301-DPB16501 DPA10401-DPB10101 DPA10401-DPB10201 DPA10401-DPB10202 DPA10401-DPB10501 DQA10102-DQB10501 DQA10102-DQB10503
DFRELNKRTQDFWEVQLGIP

SEQ ID NO: 3065 - protein, 21 aa, Human immunodeficiency virus 1
  source 1..21: note = HLAs: DPA10103-DPB10101 DPA10103-DPB11501 DPA10103-DPB13101 DPA10103-DPB15001 DPA10104-DPB10101 DPA10104-DPB11501 DPA10105-DPB10101 DPA10105-DPB15001 DPA10202-DPB10101 DPA10301-DPB10101 DPA10301-DPB10201 DPA10301-DPB10202 DPA10301-DPB10401 DPA10301-DPB110601 DPA10301-DPB11801 DPA10301-DPB12301 DPA10301-DPB13901 DPA10301-DPB14001 DPA10301-DPB16501 DPA10401-DPB10101 DQA10102-DQB10501
DFRELNKRTQDFWEVQLGIPH

SEQ ID NO: 3066 - protein, 22 aa, Human immunodeficiency virus 1
  source 1..22: note = HLAs: DRB1_1001 DPA10103-DPB10101 DPA10103-DPB11501 DPA10103-DPB13101 DPA10103-DPB15001 DPA10104-DPB10101 DPA10104-DPB11501 DPA10105-DPB10101 DPA10105-DPB15001 DPA10202-DPB10101 DPA10301-DPB10101 DPA10301-DPB10201 DPA10301-DPB10202 DPA10301-DPB10401 DPA10301-DPB110601 DPA10301-DPB11801 DPA10301-DPB12301 DPA10301-DPB13901 DPA10301-DPB14001 DPA10301-DPB16501 DPA10401-DPB10101 DPA10401-DPB10201 DPA10401-DPB10202 DPA10401-DPB10501 DQA10102-DQB10501
DFRELNKRTQDFWEVQLGIPHP

SEQ ID NO: 3067 - protein, 23 aa, Human immunodeficiency virus 1
  source 1..23: note = HLAs: DRB1_0101 DRB1_1001 DPA10103-DPB10101 DPA10103-DPB11501 DPA10103-DPB11601 DPA10103-DPB13101 DPA10103-DPB15001 DPA10104-DPB10101 DPA10104-DPB11501 DPA10105-DPB10101 DPA10105-DPB15001 DPA10202-DPB10101 DPA10301-DPB10101 DPA10301-DPB10201 DPA10301-DPB10202 DPA10301-DPB10401 DPA10301-DPB110601 DPA10301-DPB11801 DPA10301-DPB12301 DPA10301-DPB13901 DPA10301-DPB14001 DPA10301-DPB16501 DPA10401-DPB10101 DPA10401-DPB10201 DPA10401-DPB10202 DPA10401-DPB10501 DQA10102-DQB10501 DQA10102-DQB10503 DQA10102-DQB10601 DQA10103-DQB10501 DQA10103-DQB10601 DQA10201-DQB10301 DQA10501-DQB10301 DQA10501-DQB10319 DQA10503-DQB10301 DQA10505-DQB10301 DQA10505-DQB10309 DQA10505-DQB10319 DQA10508-DQB10301 DQA10509-DQB10301 DQA10601-DQB10301
DFRELNKRTQDFWEVQLGIPHPA

SEQ ID NO: 3068 - protein, 24 aa, Human immunodeficiency virus 1
  source 1..24: note = HLAs: DRB1_0101 DRB1_1001 DPA10103-DPB10101 DPA10103-DPB11501 DPA10103-DPB11601 DPA10103-DPB13101 DPA10103-DPB15001 DPA10104-DPB10101 DPA10104-DPB11501 DPA10105-DPB10101 DPA10105-DPB15001 DPA10106-DPB10101 DPA10201-DPB10101 DPA10202-DPB10101 DPA10301-DPB10101 DPA10301-DPB10201 DPA10301-DPB10202 DPA10301-DPB10401 DPA10301-DPB110601 DPA10301-DPB11801 DPA10301-DPB12301 DPA10301-DPB13901 DPA10301-DPB14001 DPA10301-DPB16501 DPA10401-DPB10101 DPA10401-DPB10201 DPA10401-DPB10202 DPA10401-DPB10501 DQA10102-DQB10501 DQA10102-DQB10503 DQA10102-DQB10601 DQA10103-DQB10501 DQA10103-DQB10601 DQA10201-DQB10301 DQA10301-DQB10301 DQA10302-DQB10301 DQA10303-DQB10301 DQA10501-DQB10301 DQA10501-DQB10319 DQA10503-DQB10301 DQA10505-DQB10301 DQA10505-DQB10309 DQA10505-DQB10319 DQA10506-DQB10303 DQA10508-DQB10301 DQA10509-DQB10301 DQA10601-DQB10301
DFRELNKRTQDFWEVQLGIPHPAG

SEQ ID NO: 3069 - protein, 25 aa, Human immunodeficiency virus 1
  source 1..25: note = HLAs: DRB1_0101 DRB1_0102 DRB1_0901 DRB1_1001 DRB1_1101 DRB1_1305 DPA10103-DPB10101 DPA10103-DPB11501 DPA10103-DPB11601 DPA10103-DPB13101 DPA10103-DPB15001 DPA10104-DPB10101 DPA10104-DPB11501 DPA10105-DPB10101 DPA10105-DPB15001 DPA10106-DPB10101 DPA10201-DPB10101 DPA10202-DPB10101 DPA10301-DPB10101 DPA10301-DPB10201 DPA10301-DPB10202 DPA10301-DPB10401 DPA10301-DPB110601 DPA10301-DPB11801 DPA10301-DPB12301 DPA10301-DPB13901 DPA10301-DPB14001 DPA10301-DPB16501 DPA10401-DPB10101 DPA10401-DPB10201 DPA10401-DPB10202 DPA10401-DPB10501 DQA10102-DQB10501 DQA10102-DQB10503 DQA10102-DQB10601 DQA10102-DQB10609 DQA10103-DQB10501 DQA10103-DQB10601 DQA10103-DQB10609 DQA10201-DQB10301 DQA10201-DQB10303 DQA10301-DQB10301 DQA10302-DQB10301 DQA10303-DQB10301 DQA10501-DQB10301 DQA10501-DQB10319 DQA10503-DQB10301 DQA10505-DQB10301 DQA10505-DQB10309 DQA10505-DQB10319 DQA10505-DQB10402 DQA10506-DQB10303 DQA10508-DQB10301 DQA10509-DQB10301 DQA10601-DQB10301
DFRELNKRTQDFWEVQLGIPHPAGL

SEQ ID NO: 3070 - protein, 13 aa, Human immunodeficiency virus 1
  source 1..13: note = HLAs: DRB1_0405 DRB1_0701 DRB1_0901 DRB1_1001 DRB1_1501 DRB1_1502 DRB1_1503 DRB1_1601 DRB1_1602 DPA10103-DPB10101 DPA10103-DPB11501 DPA10103-DPB13101 DPA10103-DPB15001 DPA10104-DPB10101 DPA10104-DPB11501 DPA10105-DPB10101 DPA10105-DPB15001 DPA10201-DPB11501 DPA10202-DPB10101 DPA10202-DPB10202 DPA10202-DPB110601 DPA10202-DPB11901 DPA10202-DPB15501 DPA10301-DPB10101 DPA10301-DPB10201 DPA10301-DPB10202 DPA10301-DPB10401 DPA10301-DPB110601 DPA10301-DPB11801 DPA10301-DPB12301 DPA10301-DPB13901 DPA10301-DPB14001 DPA10301-DPB16501 DPA10401-DPB10101 DPA10401-DPB10201 DPA10401-DPB10202 DQA10102-DQB10501 DQA10102-DQB10503 DQA10102-DQB10609 DQA10103-DQB10501 DQA10103-DQB10609 DQA10505-DQB10402
DFRKYTAFTIPSI

SEQ ID NO: 3071 - protein, 14 aa, Human immunodeficiency virus 1
  source 1..14: note = HLAs: DRB1_0101 DRB1_0401 DRB1_0405 DRB1_0408 DRB1_0410 DRB1_0701 DRB1_0801 DRB1_0813 DRB1_0901 DRB1_1001 DRB1_1501 DRB1_1502 DRB1_1503 DRB1_1601 DRB1_1602 DPA10103-DPB10101 DPA10103-DPB10201 DPA10103-DPB10202 DPA10103-DPB10301 DPA10103-DPB10601 DPA10103-DPB11101 DPA10103-DPB112401 DPA10103-DPB11501 DPA10103-DPB11601 DPA10103-DPB11901 DPA10103-DPB12001 DPA10103-DPB13101 DPA10103-DPB13401 DPA10103-DPB14101 DPA10103-DPB14801 DPA10103-DPB15001 DPA10103-DPB15501 DPA10104-DPB10101 DPA10104-DPB10301 DPA10104-DPB11501 DPA10105-DPB10101 DPA10105-DPB10301 DPA10105-DPB15001 DPA10106-DPB10101 DPA10201-DPB10101 DPA10201-DPB110601 DPA10201-DPB11501 DPA10201-DPB11601 DPA10201-DPB11901 DPA10201-DPB15501 DPA10202-DPB10101 DPA10202-DPB10201 DPA10202-DPB10202 DPA10202-DPB110601 DPA10202-DPB11101 DPA10202-DPB11301 DPA10202-DPB113101 DPA10202-DPB11701 DPA10202-DPB11901 DPA10202-DPB13101 DPA10202-DPB15501 DPA10202-DPB16501 DPA10202-DPB18501 DPA10301-DPB10101 DPA10301-DPB10201 DPA10301-DPB10202; note = HLAs: DPA10301-DPB10401 DPA10301-DPB10402 DPA10301-DPB110501 DPA10301-DPB110601 DPA10301-DPB11101 DPA10301-DPB11301 DPA10301-DPB11701 DPA10301-DPB11801 DPA10301-DPB12301 DPA10301-DPB13901 DPA10301-DPB14001 DPA10301-DPB14901 DPA10301-DPB15501 DPA10301-DPB16501 DPA10301-DPB17501 DPA10301-DPB18001 DPA10401-DPB10101 DPA10401-DPB10201 DPA10401-DPB10202 DPA10401-DPB10301 DPA10401-DPB10501 DPA10401-DPB11301 DPA10401-DPB113301 DPA10401-DPB11401 DQA10102-DQB10501 DQA10102-DQB10503 DQA10102-DQB10601 DQA10102-DQB10604 DQA10102-DQB10609 DQA10103-DQB10501 DQA10103-DQB10503 DQA10103-DQB10601 DQA10103-DQB10604 DQA10103-DQB10609 DQA10201-DQB10301 DQA10201-DQB10303 DQA10505-DQB10402 DQA10506-DQB10303
DFRKYTAFTIPSIN

SEQ ID NO: 3072 - protein, 15 aa, Human immunodeficiency virus 1
  source 1..15: note = HLAs: DRB1_0101 DRB1_0102 DRB1_0103 DRB1_0401 DRB1_0404 DRB1_0405 DRB1_0408 DRB1_0410 DRB1_0701 DRB1_0801 DRB1_0802 DRB1_0803 DRB1_0806 DRB1_0809 DRB1_0813 DRB1_0901 DRB1_1001 DRB1_1101 DRB1_1102 DRB1_1103 DRB1_1104 DRB1_1301 DRB1_1304 DRB1_1305 DRB1_1312 DRB1_1404 DRB1_1406 DRB1_1501 DRB1_1502 DRB1_1503 DRB1_1601 DRB1_1602 DPA10103-DPB10101 DPA10103-DPB10201 DPA10103-DPB10202 DPA10103-DPB10301 DPA10103-DPB10401 DPA10103-DPB10501 DPA10103-DPB10601 DPA10103-DPB11101 DPA10103-DPB112401 DPA10103-DPB112601 DPA10103-DPB11401 DPA10103-DPB11501 DPA10103-DPB11601 DPA10103-DPB11801 DPA10103-DPB11901 DPA10103-DPB12001 DPA10103-DPB12301 DPA10103-DPB12901 DPA10103-DPB13101 DPA10103-DPB13401 DPA10103-DPB13901 DPA10103-DPB14001 DPA10103-DPB14101 DPA10103-DPB14801 DPA10103-DPB15001 DPA10103-DPB15501 DPA10103-DPB15901 DPA10104-DPB10101 DPA10104-DPB10301 DPA10104-DPB11501 DPA10105-DPB10101 DPA10105-DPB10301 DPA10105-DPB10401 DPA10105-DPB11801 DPA10105-DPB15001 DPA10106-DPB10101 DPA10106-DPB11101; note = HLAs: DPA10201-DPB10101 DPA10201-DPB10201 DPA10201-DPB10202 DPA10201-DPB10601 DPA10201-DPB110601 DPA10201-DPB11101 DPA10201-DPB11301 DPA10201-DPB113301 DPA10201-DPB11501 DPA10201-DPB11601 DPA10201-DPB11901 DPA10201-DPB13401 DPA10201-DPB15501 DPA10202-DPB10101 DPA10202-DPB10201 DPA10202-DPB10202 DPA10202-DPB10301 DPA10202-DPB10401 DPA10202-DPB10501 DPA10202-DPB10901 DPA10202-DPB110601 DPA10202-DPB11101 DPA10202-DPB11301 DPA10202-DPB113101 DPA10202-DPB11401 DPA10202-DPB11701 DPA10202-DPB11801 DPA10202-DPB11901 DPA10202-DPB12101 DPA10202-DPB12901 DPA10202-DPB13001 DPA10202-DPB13101 DPA10202-DPB13801 DPA10202-DPB14501 DPA10202-DPB15501 DPA10202-DPB16501 DPA10202-DPB18501 DPA10301-DPB10101 DPA10301-DPB10201 DPA10301-DPB10202 DPA10301-DPB10301 DPA10301-DPB10401 DPA10301-DPB10402 DPA10301-DPB110501 DPA10301-DPB110601 DPA10301-DPB11101 DPA10301-DPB11301 DPA10301-DPB11701 DPA10301-DPB11801 DPA10301-DPB12301 DPA10301-DPB13901 DPA10301-DPB14001 DPA10301-DPB14901 DPA10301-DPB15501; note = HLAs: DPA10301-DPB16501 DPA10301-DPB17501 DPA10301-DPB18001 DPA10401-DPB10101 DPA10401-DPB10201 DPA10401-DPB10202 DPA10401-DPB10301 DPA10401-DPB10402 DPA10401-DPB10501 DPA10401-DPB110501 DPA10401-DPB11301 DPA10401-DPB113301 DPA10401-DPB11401 DPA10401-DPB14901 DQA10102-DQB10501 DQA10102-DQB10503 DQA10102-DQB10601 DQA10102-DQB10604 DQA10102-DQB10609 DQA10103-DQB10501 DQA10103-DQB10503 DQA10103-DQB10601 DQA10103-DQB10602 DQA10103-DQB10604 DQA10103-DQB10608 DQA10103-DQB10609 DQA10201-DQB10301 DQA10201-DQB10303 DQA10301-DQB10301 DQA10302-DQB10301 DQA10303-DQB10301 DQA10501-DQB10301 DQA10501-DQB10319 DQA10501-DQB10501 DQA10503-DQB10301 DQA10505-DQB10301 DQA10505-DQB10302 DQA10505-DQB10309 DQA10505-DQB10319 DQA10505-DQB10402 DQA10505-DQB10501 DQA10506-DQB10303 DQA10508-DQB10301 DQA10509-DQB10301 DQA10601-DQB10301
DFRKYTAFTIPSINN

SEQ ID NO: 3073 - protein, 16 aa, Human immunodeficiency virus 1
  source 1..16: note = HLAs: DRB1_0101 DRB1_0401 DRB1_0405 DRB1_0408 DRB1_0410 DRB1_0701 DRB1_0801 DRB1_0813 DRB1_0901 DRB1_1001 DRB1_1501 DRB1_1502 DRB1_1503 DRB1_1601 DRB1_1602 DPA10103-DPB10101 DPA10103-DPB10201 DPA10103-DPB10202 DPA10103-DPB10301 DPA10103-DPB10401 DPA10103-DPB10501 DPA10103-DPB10601 DPA10103-DPB11101 DPA10103-DPB112401 DPA10103-DPB112601 DPA10103-DPB11401 DPA10103-DPB11501 DPA10103-DPB11601 DPA10103-DPB11901 DPA10103-DPB12001 DPA10103-DPB12301 DPA10103-DPB12901 DPA10103-DPB13101 DPA10103-DPB13401 DPA10103-DPB13901 DPA10103-DPB14101 DPA10103-DPB14801 DPA10103-DPB15001 DPA10103-DPB15501 DPA10104-DPB10101 DPA10104-DPB10301 DPA10104-DPB11501 DPA10105-DPB10101 DPA10105-DPB10301 DPA10105-DPB10401 DPA10105-DPB15001 DPA10106-DPB10101 DPA10106-DPB11101 DPA10201-DPB10101 DPA10201-DPB10202 DPA10201-DPB10601 DPA10201-DPB110601 DPA10201-DPB11101 DPA10201-DPB11301 DPA10201-DPB113301 DPA10201-DPB11501 DPA10201-DPB11601 DPA10201-DPB11901 DPA10201-DPB15501 DPA10202-DPB10101 DPA10202-DPB10201; note = HLAs: DPA10202-DPB10202 DPA10202-DPB10401 DPA10202-DPB10501 DPA10202-DPB10901 DPA10202-DPB110601 DPA10202-DPB11101 DPA10202-DPB11301 DPA10202-DPB113101 DPA10202-DPB11701 DPA10202-DPB11901 DPA10202-DPB12101 DPA10202-DPB12901 DPA10202-DPB13001 DPA10202-DPB13101 DPA10202-DPB13801 DPA10202-DPB15501 DPA10202-DPB16501 DPA10202-DPB18501 DPA10301-DPB10101 DPA10301-DPB10201 DPA10301-DPB10202 DPA10301-DPB10301 DPA10301-DPB10401 DPA10301-DPB10402 DPA10301-DPB10901 DPA10301-DPB110501 DPA10301-DPB110601 DPA10301-DPB11101 DPA10301-DPB11301 DPA10301-DPB11701 DPA10301-DPB11801 DPA10301-DPB12301 DPA10301-DPB13901 DPA10301-DPB14001 DPA10301-DPB14901 DPA10301-DPB15501 DPA10301-DPB16501 DPA10301-DPB17501 DPA10301-DPB18001 DPA10401-DPB10101 DPA10401-DPB10201 DPA10401-DPB10202 DPA10401-DPB10301 DPA10401-DPB10501 DPA10401-DPB11301 DPA10401-DPB113301 DPA10401-DPB11401 DQA10101-DQB10501 DQA10102-DQB10501 DQA10102-DQB10503 DQA10102-DQB10601 DQA10102-DQB10604 DQA10102-DQB10609 DQA10103-DQB10501; note = HLAs: DQA10103-DQB10503 DQA10103-DQB10601 DQA10103-DQB10602 DQA10103-DQB10604 DQA10103-DQB10609 DQA10104-DQB10501 DQA10105-DQB10501 DQA10201-DQB10301 DQA10201-DQB10303 DQA10301-DQB10301 DQA10302-DQB10301 DQA10303-DQB10301 DQA10501-DQB10301 DQA10501-DQB10319 DQA10501-DQB10501 DQA10503-DQB10301 DQA10505-DQB10301 DQA10505-DQB10302 DQA10505-DQB10309 DQA10505-DQB10319 DQA10505-DQB10402 DQA10505-DQB10501 DQA10506-DQB10303 DQA10508-DQB10301 DQA10509-DQB10301 DQA10601-DQB10301
DFRKYTAFTIPSINNE

SEQ ID NO: 3074 - protein, 17 aa, Human immunodeficiency virus 1
  source 1..17: note = HLAs: DRB1_0101 DRB1_0401 DRB1_0404 DRB1_0405 DRB1_0408 DRB1_0410 DRB1_0701 DRB1_0801 DRB1_0803 DRB1_0813 DRB1_0901 DRB1_1001 DRB1_1501 DRB1_1502 DRB1_1503 DRB1_1601 DRB1_1602 DPA10103-DPB10101 DPA10103-DPB10201 DPA10103-DPB10202 DPA10103-DPB10301 DPA10103-DPB10401 DPA10103-DPB10501 DPA10103-DPB10601 DPA10103-DPB11101 DPA10103-DPB112401 DPA10103-DPB112601 DPA10103-DPB11401 DPA10103-DPB11501 DPA10103-DPB11601 DPA10103-DPB11901 DPA10103-DPB12001 DPA10103-DPB12301 DPA10103-DPB13101 DPA10103-DPB13401 DPA10103-DPB13901 DPA10103-DPB14001 DPA10103-DPB14101 DPA10103-DPB14801 DPA10103-DPB15001 DPA10103-DPB15501 DPA10103-DPB15901 DPA10104-DPB10101 DPA10104-DPB10301 DPA10104-DPB11501 DPA10105-DPB10101 DPA10105-DPB10301 DPA10105-DPB10401 DPA10105-DPB15001 DPA10106-DPB10101 DPA10106-DPB11101 DPA10201-DPB10101 DPA10201-DPB10202 DPA10201-DPB110601 DPA10201-DPB11101 DPA10201-DPB11501 DPA10201-DPB11601 DPA10201-DPB11901 DPA10201-DPB15501 DPA10202-DPB10101 DPA10202-DPB10201 DPA10202-DPB10202; note = HLAs: DPA10202-DPB10401 DPA10202-DPB10501 DPA10202-DPB110601 DPA10202-DPB11101 DPA10202-DPB11301 DPA10202-DPB113101 DPA10202-DPB11701 DPA10202-DPB11901 DPA10202-DPB12101 DPA10202-DPB12901 DPA10202-DPB13001 DPA10202-DPB13101 DPA10202-DPB13801 DPA10202-DPB15501 DPA10202-DPB16501 DPA10202-DPB18501 DPA10301-DPB10101 DPA10301-DPB10201 DPA10301-DPB10202 DPA10301-DPB10301 DPA10301-DPB10401 DPA10301-DPB10402 DPA10301-DPB110501 DPA10301-DPB110601 DPA10301-DPB11101 DPA10301-DPB11301 DPA10301-DPB11701 DPA10301-DPB11801 DPA10301-DPB12301 DPA10301-DPB13901 DPA10301-DPB14001 DPA10301-DPB14901 DPA10301-DPB15501 DPA10301-DPB16501 DPA10301-DPB17501 DPA10301-DPB18001 DPA10401-DPB10101 DPA10401-DPB10201 DPA10401-DPB10202 DPA10401-DPB10301 DPA10401-DPB10501 DPA10401-DPB11301 DPA10401-DPB113301 DPA10401-DPB11401 DQA10102-DQB10501 DQA10102-DQB10503 DQA10102-DQB10601 DQA10102-DQB10604 DQA10102-DQB10609 DQA10103-DQB10501 DQA10103-DQB10503 DQA10103-DQB10601 DQA10103-DQB10602 DQA10103-DQB10604; note = HLAs: DQA10103-DQB10609 DQA10201-DQB10301 DQA10201-DQB10303 DQA10505-DQB10402 DQA10506-DQB10303
DFRKYTAFTIPSINNET

SEQ ID NO: 3075 - protein, 18 aa, Human immunodeficiency virus 1
  source 1..18: note = HLAs: DRB1_0405 DRB1_0701 DRB1_0901 DRB1_1001 DRB1_1501 DRB1_1502 DRB1_1503 DRB1_1601 DRB1_1602 DPA10103-DPB10101 DPA10103-DPB10202 DPA10103-DPB11501 DPA10103-DPB11601 DPA10103-DPB11901 DPA10103-DPB13101 DPA10103-DPB15001 DPA10104-DPB10101 DPA10104-DPB11501 DPA10105-DPB10101 DPA10105-DPB15001 DPA10201-DPB11501 DPA10202-DPB10101 DPA10202-DPB10202 DPA10202-DPB110601 DPA10202-DPB11901 DPA10202-DPB13101 DPA10202-DPB15501 DPA10301-DPB10101 DPA10301-DPB10201 DPA10301-DPB10202 DPA10301-DPB10401 DPA10301-DPB110601 DPA10301-DPB11801 DPA10301-DPB12301 DPA10301-DPB13901 DPA10301-DPB14001 DPA10301-DPB15501 DPA10301-DPB16501 DPA10401-DPB10101 DPA10401-DPB10201 DPA10401-DPB10202 DPA10401-DPB10301 DPA10401-DPB10501 DPA10401-DPB11401 DQA10102-DQB10501 DQA10102-DQB10503 DQA10102-DQB10601 DQA10102-DQB10609 DQA10103-DQB10501 DQA10103-DQB10601 DQA10103-DQB10609 DQA10201-DQB10301 DQA10505-DQB10402
DFRKYTAFTIPSINNETP

SEQ ID NO: 3076 - protein, 19 aa, Human immunodeficiency virus 1
  source 1..19: note = HLAs: DRB1_0101 DRB1_0401 DRB1_0405 DRB1_0408 DRB1_0410 DRB1_0701 DRB1_0801 DRB1_0901 DRB1_1001 DRB1_1501 DRB1_1502 DRB1_1503 DRB1_1601 DRB1_1602 DPA10103-DPB10101 DPA10103-DPB10201 DPA10103-DPB10202 DPA10103-DPB10301 DPA10103-DPB10401 DPA10103-DPB10501 DPA10103-DPB10601 DPA10103-DPB11101 DPA10103-DPB112401 DPA10103-DPB112601 DPA10103-DPB11501 DPA10103-DPB11601 DPA10103-DPB11901 DPA10103-DPB12001 DPA10103-DPB12301 DPA10103-DPB13101 DPA10103-DPB13401 DPA10103-DPB13901 DPA10103-DPB14101 DPA10103-DPB14801 DPA10103-DPB15001 DPA10103-DPB15501 DPA10104-DPB10101 DPA10104-DPB10301 DPA10104-DPB11501 DPA10105-DPB10101 DPA10105-DPB10301 DPA10105-DPB10401 DPA10105-DPB15001 DPA10106-DPB10101 DPA10201-DPB10101 DPA10201-DPB110601 DPA10201-DPB11501 DPA10201-DPB11901 DPA10201-DPB15501 DPA10202-DPB10101 DPA10202-DPB10201 DPA10202-DPB10202 DPA10202-DPB110601 DPA10202-DPB11101 DPA10202-DPB11301 DPA10202-DPB11901 DPA10202-DPB13101 DPA10202-DPB15501 DPA10202-DPB16501 DPA10202-DPB18501 DPA10301-DPB10101; note = HLAs: DPA10301-DPB10201 DPA10301-DPB10202 DPA10301-DPB10301 DPA10301-DPB10401 DPA10301-DPB10402 DPA10301-DPB110501 DPA10301-DPB110601 DPA10301-DPB11101 DPA10301-DPB11301 DPA10301-DPB11701 DPA10301-DPB11801 DPA10301-DPB12301 DPA10301-DPB13901 DPA10301-DPB14001 DPA10301-DPB14901 DPA10301-DPB15501 DPA10301-DPB16501 DPA10301-DPB17501 DPA10301-DPB18001 DPA10401-DPB10101 DPA10401-DPB10201 DPA10401-DPB10202 DPA10401-DPB10301 DPA10401-DPB10501 DPA10401-DPB11301 DPA10401-DPB113301 DPA10401-DPB11401 DQA10101-DQB10501 DQA10102-DQB10501 DQA10102-DQB10503 DQA10102-DQB10601 DQA10102-DQB10604 DQA10102-DQB10609 DQA10103-DQB10501 DQA10103-DQB10503 DQA10103-DQB10601 DQA10103-DQB10604 DQA10103-DQB10609 DQA10104-DQB10501 DQA10105-DQB10501 DQA10201-DQB10301 DQA10201-DQB10303 DQA10505-DQB10402 DQA10506-DQB10303
DFRKYTAFTIPSINNETPG

SEQ ID NO: 3077 - protein, 13 aa, Human immunodeficiency virus 1
  source 1..13: note = HLAs: DQA10102-DQB10601 DQA10201-DQB10301 DQA10301-DQB10301 DQA10302-DQB10301 DQA10303-DQB10301 DQA10401-DQB10301 DQA10401-DQB10319 DQA10501-DQB10301 DQA10501-DQB10319 DQA10503-DQB10301 DQA10505-DQB10301 DQA10505-DQB10309 DQA10505-DQB10319 DQA10506-DQB10303 DQA10508-DQB10301 DQA10509-DQB10301 DQA10601-DQB10301
DFWEVQLGIPHPA

SEQ ID NO: 3078 - protein, 14 aa, Human immunodeficiency virus 1
  source 1..14: note = HLAs: DRB1_0101 DRB1_1001 DQA10102-DQB10601 DQA10103-DQB10601 DQA10201-DQB10301 DQA10201-DQB10303 DQA10301-DQB10301 DQA10302-DQB10301 DQA10303-DQB10301 DQA10401-DQB10301 DQA10401-DQB10319 DQA10501-DQB10301 DQA10501-DQB10319 DQA10503-DQB10301 DQA10505-DQB10301 DQA10505-DQB10309 DQA10505-DQB10319 DQA10505-DQB10402 DQA10506-DQB10303 DQA10508-DQB10301 DQA10509-DQB10301 DQA10601-DQB10301
DFWEVQLGIPHPAG

SEQ ID NO: 3079 - protein, 15 aa, Human immunodeficiency virus 1
  source 1..15: note = HLAs: DRB1_0101 DRB1_0102 DRB1_0901 DRB1_1001 DQA10101-DQB10601 DQA10102-DQB10501 DQA10102-DQB10503 DQA10102-DQB10601 DQA10103-DQB10501 DQA10103-DQB10601 DQA10103-DQB10602 DQA10201-DQB10301 DQA10201-DQB10303 DQA10301-DQB10301 DQA10301-DQB10304 DQA10302-DQB10301 DQA10302-DQB10304 DQA10303-DQB10301 DQA10303-DQB10304 DQA10401-DQB10301 DQA10401-DQB10319 DQA10501-DQB10301 DQA10501-DQB10319 DQA10503-DQB10301 DQA10505-DQB10301 DQA10505-DQB10309 DQA10505-DQB10319 DQA10505-DQB10402 DQA10506-DQB10303 DQA10508-DQB10301 DQA10509-DQB10301 DQA10601-DQB10301
DFWEVQLGIPHPAGL

SEQ ID NO: 3080 - protein, 16 aa, Human immunodeficiency virus 1
  source 1..16: note = HLAs: DRB1_0101 DRB1_0102 DRB1_0901 DRB1_1001 DQA10101-DQB10601 DQA10102-DQB10501 DQA10102-DQB10503 DQA10102-DQB10601 DQA10102-DQB10602 DQA10102-DQB10611 DQA10103-DQB10501 DQA10103-DQB10601 DQA10103-DQB10602 DQA10201-DQB10301 DQA10201-DQB10303 DQA10301-DQB10301 DQA10301-DQB10304 DQA10302-DQB10301 DQA10302-DQB10304 DQA10303-DQB10301 DQA10303-DQB10304 DQA10401-DQB10301 DQA10401-DQB10319 DQA10501-DQB10301 DQA10501-DQB10319 DQA10503-DQB10301 DQA10505-DQB10301 DQA10505-DQB10309 DQA10505-DQB10319 DQA10505-DQB10402 DQA10506-DQB10303 DQA10508-DQB10301 DQA10509-DQB10301 DQA10601-DQB10301
DFWEVQLGIPHPAGLK

SEQ ID NO: 3081 - protein, 17 aa, Human immunodeficiency virus 1
  source 1..17: note = HLAs: DRB1_0101 DRB1_0102 DRB1_0901 DRB1_1001 DQA10101-DQB10601 DQA10102-DQB10501 DQA10102-DQB10503 DQA10102-DQB10601 DQA10103-DQB10601 DQA10103-DQB10602 DQA10201-DQB10301 DQA10201-DQB10303 DQA10301-DQB10301 DQA10302-DQB10301 DQA10303-DQB10301 DQA10401-DQB10301 DQA10401-DQB10319 DQA10501-DQB10301 DQA10501-DQB10319 DQA10503-DQB10301 DQA10505-DQB10301 DQA10505-DQB10309 DQA10505-DQB10319 DQA10505-DQB10402 DQA10506-DQB10303 DQA10508-DQB10301 DQA10509-DQB10301 DQA10601-DQB10301
DFWEVQLGIPHPAGLKK

SEQ ID NO: 3082 - protein, 18 aa, Human immunodeficiency virus 1
  source 1..18: note = HLAs: DRB1_0101 DRB1_1001 DQA10102-DQB10501 DQA10102-DQB10601 DQA10103-DQB10601 DQA10201-DQB10301 DQA10201-DQB10303 DQA10301-DQB10301 DQA10302-DQB10301 DQA10303-DQB10301 DQA10401-DQB10301 DQA10401-DQB10319 DQA10501-DQB10301 DQA10501-DQB10319 DQA10503-DQB10301 DQA10505-DQB10301 DQA10505-DQB10309 DQA10505-DQB10319 DQA10505-DQB10402 DQA10506-DQB10303 DQA10508-DQB10301 DQA10509-DQB10301 DQA10601-DQB10301
DFWEVQLGIPHPAGLKKK

SEQ ID NO: 3083 - protein, 19 aa, Human immunodeficiency virus 1
  source 1..19: note = HLAs: DRB1_0101 DRB1_0102 DRB1_0901 DRB1_1001 DQA10101-DQB10601 DQA10102-DQB10501 DQA10102-DQB10503 DQA10102-DQB10601 DQA10103-DQB10601 DQA10201-DQB10301 DQA10201-DQB10303 DQA10301-DQB10301 DQA10302-DQB10301 DQA10303-DQB10301 DQA10401-DQB10301 DQA10401-DQB10319 DQA10501-DQB10301 DQA10501-DQB10319 DQA10503-DQB10301 DQA10505-DQB10301 DQA10505-DQB10309 DQA10505-DQB10319 DQA10505-DQB10402 DQA10506-DQB10303 DQA10508-DQB10301 DQA10509-DQB10301 DQA10601-DQB10301
DFWEVQLGIPHPAGLKKKK

SEQ ID NO: 3084 - protein, 20 aa, Human immunodeficiency virus 1
  source 1..20: note = HLAs: DRB1_0101 DRB1_0102 DRB1_0901 DRB1_1001 DPA10301-DPB10101 DPA10401-DPB10101 DQA10101-DQB10601 DQA10102-DQB10501 DQA10102-DQB10503 DQA10102-DQB10601 DQA10103-DQB10501 DQA10103-DQB10601 DQA10103-DQB10602 DQA10201-DQB10301 DQA10201-DQB10303 DQA10301-DQB10301 DQA10302-DQB10301 DQA10303-DQB10301 DQA10401-DQB10301 DQA10401-DQB10319 DQA10501-DQB10301 DQA10501-DQB10319 DQA10503-DQB10301 DQA10505-DQB10301 DQA10505-DQB10309 DQA10505-DQB10319 DQA10505-DQB10402 DQA10506-DQB10303 DQA10508-DQB10301 DQA10509-DQB10301 DQA10601-DQB10301
DFWEVQLGIPHPAGLKKKKS

SEQ ID NO: 3085 - protein, 21 aa, Human immunodeficiency virus 1
  source 1..21: note = HLAs: DRB1_0101 DRB1_0102 DRB1_1001 DQA10102-DQB10501 DQA10102-DQB10601 DQA10103-DQB10601 DQA10201-DQB10301 DQA10201-DQB10303 DQA10301-DQB10301 DQA10302-DQB10301 DQA10303-DQB10301 DQA10501-DQB10301 DQA10501-DQB10319 DQA10503-DQB10301 DQA10505-DQB10301 DQA10505-DQB10309 DQA10505-DQB10319 DQA10505-DQB10402 DQA10506-DQB10303 DQA10508-DQB10301 DQA10509-DQB10301 DQA10601-DQB10301
DFWEVQLGIPHPAGLKKKKSV

SEQ ID NO: 3086 - protein, 22 aa, Human immunodeficiency virus 1
  source 1..22: note = HLAs: DRB1_0101 DRB1_0102 DRB1_1001 DQA10102-DQB10501 DQA10102-DQB10601 DQA10103-DQB10601 DQA10201-DQB10301 DQA10201-DQB10303 DQA10301-DQB10301 DQA10302-DQB10301 DQA10303-DQB10301 DQA10501-DQB10301 DQA10501-DQB10319 DQA10503-DQB10301 DQA10505-DQB10301 DQA10505-DQB10309 DQA10505-DQB10319 DQA10505-DQB10402 DQA10506-DQB10303 DQA10508-DQB10301 DQA10509-DQB10301 DQA10601-DQB10301
DFWEVQLGIPHPAGLKKKKSVT

SEQ ID NO: 3087 - protein, 23 aa, Human immunodeficiency virus 1
  source 1..23: note = HLAs: DRB1_0101 DRB1_0102 DRB1_1001 DRB1_1102 DRB1_1103 DRB1_1104 DRB1_1301 DRB1_1304 DQA10102-DQB10501 DQA10102-DQB10601 DQA10103-DQB10601 DQA10201-DQB10301 DQA10201-DQB10303 DQA10301-DQB10301 DQA10302-DQB10301 DQA10303-DQB10301 DQA10501-DQB10301 DQA10501-DQB10319 DQA10503-DQB10301 DQA10505-DQB10301 DQA10505-DQB10309 DQA10505-DQB10319 DQA10505-DQB10402 DQA10506-DQB10303 DQA10508-DQB10301 DQA10509-DQB10301 DQA10601-DQB10301
DFWEVQLGIPHPAGLKKKKSVTV

SEQ ID NO: 3088 - protein, 24 aa, Human immunodeficiency virus 1
  source 1..24: note = HLAs: DRB1_0101 DRB1_0102 DRB1_0806 DRB1_0901 DRB1_1001 DRB1_1102 DRB1_1103 DRB1_1104 DRB1_1301 DRB1_1304 DRB1_1406 DQA10102-DQB10501 DQA10102-DQB10601 DQA10103-DQB10601 DQA10201-DQB10301 DQA10201-DQB10303 DQA10301-DQB10301 DQA10302-DQB10301 DQA10303-DQB10301 DQA10501-DQB10301 DQA10501-DQB10319 DQA10503-DQB10301 DQA10505-DQB10301 DQA10505-DQB10309 DQA10505-DQB10319 DQA10505-DQB10402 DQA10506-DQB10303 DQA10508-DQB10301 DQA10509-DQB10301 DQA10601-DQB10301
DFWEVQLGIPHPAGLKKKKSVTVL

SEQ ID NO: 3089 - protein, 25 aa, Human immunodeficiency virus 1
  source 1..25: note = HLAs: DRB1_0101 DRB1_0102 DRB1_0806 DRB1_0901 DRB1_1001 DRB1_1102 DRB1_1103 DRB1_1104 DRB1_1301 DRB1_1304 DRB1_1406 DQA10102-DQB10501 DQA10102-DQB10601 DQA10103-DQB10601 DQA10201-DQB10301 DQA10201-DQB10303 DQA10301-DQB10301 DQA10302-DQB10301 DQA10303-DQB10301 DQA10501-DQB10301 DQA10501-DQB10319 DQA10503-DQB10301 DQA10505-DQB10301 DQA10505-DQB10309 DQA10505-DQB10319 DQA10505-DQB10402 DQA10506-DQB10303 DQA10508-DQB10301 DQA10509-DQB10301 DQA10601-DQB10301
DFWEVQLGIPHPAGLKKKKSVTVLD

SEQ ID NO: 3090 - protein, 15 aa, Human immunodeficiency virus 1
  source 1..15: note = HLAs: DRB1_0301 DPA10301-DPB11801
DIIATDIQTKELQKQ

SEQ ID NO: 3091 - protein, 16 aa, Human immunodeficiency virus 1
  source 1..16: note = HLAs: DPA10301-DPB11801
DIIATDIQTKELQKQI

SEQ ID NO: 3092 - protein, 14 aa, Human immunodeficiency virus 1
  source 1..14: note = HLAs: DRB1_0101 DRB1_0102 DRB1_0804 DRB1_0806 DRB1_1001 DRB1_1104
DIQKLVGKLNWASQ

SEQ ID NO: 3093 - protein, 15 aa, Human immunodeficiency virus 1
  source 1..15: note = HLAs: DRB1_0101 DRB1_0102 DRB1_0402 DRB1_0404 DRB1_0410 DRB1_0801 DRB1_0802 DRB1_0804 DRB1_0806 DRB1_0809 DRB1_0813 DRB1_1001 DRB1_1101 DRB1_1102 DRB1_1103 DRB1_1104 DRB1_1114 DRB1_1202 DRB1_1301 DRB1_1302 DRB1_1304 DRB1_1305 DRB1_1406 DRB1_1501 DRB1_1503 DRB1_1601 DRB1_1602 DQA10102-DQB10501 DQA10103-DQB10601
DIQKLVGKLNWASQI

SEQ ID NO: 3094 - protein, 16 aa, Human immunodeficiency virus 1
  source 1..16: note = HLAs: DRB1_0101 DRB1_0102 DRB1_0402 DRB1_0404 DRB1_0801 DRB1_0802 DRB1_0804 DRB1_0806 DRB1_0809 DRB1_0813 DRB1_1001 DRB1_1102 DRB1_1103 DRB1_1104 DRB1_1114 DRB1_1301 DRB1_1302 DRB1_1304 DRB1_1406 DRB1_1501 DRB1_1503 DQA10102-DQB10501 DQA10103-DQB10501
DIQKLVGKLNWASQIY

SEQ ID NO: 3095 - protein, 17 aa, Human immunodeficiency virus 1
  source 1..17: note = HLAs: DRB1_0101 DRB1_0102 DRB1_0402 DRB1_0404 DRB1_0410 DRB1_0801 DRB1_0802 DRB1_0804 DRB1_0806 DRB1_0809 DRB1_0813 DRB1_1001 DRB1_1101 DRB1_1102 DRB1_1103 DRB1_1104 DRB1_1114 DRB1_1301 DRB1_1302 DRB1_1304 DRB1_1305 DRB1_1406 DRB1_1501 DRB1_1503 DPA10301-DPB11801 DQA10102-DQB10501 DQA10103-DQB10501
DIQKLVGKLNWASQIYP

SEQ ID NO: 3096 - protein, 18 aa, Human immunodeficiency virus 1
  source 1..18: note = HLAs: DRB1_1001 DQA10102-DQB10501 DQA10102-DQB10601 DQA10102-DQB10602 DQA10102-DQB10609 DQA10102-DQB10611 DQA10103-DQB10601 DQA10103-DQB10602 DQA10103-DQB10609
DIQKLVGKLNWASQIYPG

SEQ ID NO: 3097 - protein, 19 aa, Human immunodeficiency virus 1
  source 1..19: note = HLAs: DRB1_0101 DRB1_0804 DRB1_0806 DRB1_1001 DRB1_1102 DRB1_1104 DRB1_1114 DRB1_1301 DRB1_1302 DRB1_1304 DRB1_1501 DPA10103-DPB11501 DPA10104-DPB11501 DPA10301-DPB10101 DPA10301-DPB10201 DPA10301-DPB10202 DPA10301-DPB110601 DPA10301-DPB11801 DPA10301-DPB14001 DPA10401-DPB10101 DPA10401-DPB10202 DQA10101-DQB10601 DQA10102-DQB10501 DQA10102-DQB10503 DQA10102-DQB10601 DQA10102-DQB10602 DQA10102-DQB10609 DQA10102-DQB10610 DQA10102-DQB10611 DQA10102-DQB10614 DQA10103-DQB10501 DQA10103-DQB10503 DQA10103-DQB10601 DQA10103-DQB10602 DQA10103-DQB10603 DQA10103-DQB10609 DQA10201-DQB10301 DQA10501-DQB10301 DQA10501-DQB10319 DQA10503-DQB10301 DQA10505-DQB10301 DQA10505-DQB10309 DQA10505-DQB10319 DQA10508-DQB10301 DQA10509-DQB10301
DIQKLVGKLNWASQIYPGI

SEQ ID NO: 3098 - protein, 20 aa, Human immunodeficiency virus 1
  source 1..20: note = HLAs: DRB1_0101 DRB1_0102 DRB1_0404 DRB1_0410 DRB1_0701 DRB1_0801 DRB1_0802 DRB1_0804 DRB1_0806 DRB1_0809 DRB1_0813 DRB1_0901 DRB1_1001 DRB1_1101 DRB1_1102 DRB1_1103 DRB1_1104 DRB1_1114 DRB1_1301 DRB1_1302 DRB1_1304 DRB1_1305 DRB1_1406 DRB1_1501 DRB1_1502 DRB1_1503 DRB1_1601 DRB1_1602 DPA10103-DPB10101 DPA10103-DPB10201 DPA10103-DPB10202 DPA10103-DPB11501 DPA10103-DPB11601 DPA10103-DPB11901 DPA10103-DPB13101 DPA10103-DPB13401 DPA10103-DPB14801 DPA10103-DPB15001 DPA10104-DPB10101 DPA10104-DPB11501 DPA10105-DPB10101 DPA10105-DPB15001 DPA10202-DPB10101 DPA10202-DPB10201 DPA10202-DPB10202 DPA10202-DPB110601 DPA10202-DPB11901 DPA10202-DPB13101 DPA10202-DPB15501 DPA10202-DPB16501 DPA10301-DPB10101 DPA10301-DPB10201 DPA10301-DPB10202 DPA10301-DPB10401 DPA10301-DPB110601 DPA10301-DPB11801 DPA10301-DPB12301 DPA10301-DPB13901 DPA10301-DPB14001 DPA10301-DPB15501 DPA10301-DPB16501 DPA10401-DPB10101 DPA10401-DPB10201 DPA10401-DPB10202 DPA10401-DPB10501 DQA10101-DQB10601 DQA10101-DQB10602; note = HLAs: DQA10102-DQB10501 DQA10102-DQB10503 DQA10102-DQB10601 DQA10102-DQB10602 DQA10102-DQB10603 DQA10102-DQB10609 DQA10102-DQB10610 DQA10102-DQB10611 DQA10102-DQB10614 DQA10103-DQB10501 DQA10103-DQB10503 DQA10103-DQB10601 DQA10103-DQB10602 DQA10103-DQB10603 DQA10103-DQB10604 DQA10103-DQB10608 DQA10103-DQB10609 DQA10103-DQB10614 DQA10104-DQB10602 DQA10105-DQB10602 DQA10201-DQB10301 DQA10201-DQB10303 DQA10301-DQB10301 DQA10302-DQB10301 DQA10303-DQB10301 DQA10501-DQB10301 DQA10501-DQB10319 DQA10503-DQB10301 DQA10505-DQB10301 DQA10505-DQB10309 DQA10505-DQB10319 DQA10505-DQB10402 DQA10506-DQB10303 DQA10508-DQB10301 DQA10509-DQB10301 DQA10601-DQB10301
DIQKLVGKLNWASQIYPGIK

SEQ ID NO: 3099 - protein, 21 aa, Human immunodeficiency virus 1
  source 1..21: note = HLAs: DRB1_0101 DRB1_0804 DRB1_0806 DRB1_0813 DRB1_0901 DRB1_1001 DRB1_1102 DRB1_1104 DRB1_1114 DRB1_1301 DRB1_1302 DRB1_1304 DRB1_1406 DRB1_1501 DRB1_1502 DRB1_1602 DPA10103-DPB10101 DPA10103-DPB11501 DPA10104-DPB10101 DPA10104-DPB11501 DPA10105-DPB10101 DPA10202-DPB10101 DPA10301-DPB10101 DPA10301-DPB10201 DPA10301-DPB10202 DPA10301-DPB10401 DPA10301-DPB110601 DPA10301-DPB11801 DPA10301-DPB12301 DPA10301-DPB13901 DPA10301-DPB14001 DPA10301-DPB16501 DPA10401-DPB10101 DPA10401-DPB10201 DPA10401-DPB10202 DQA10101-DQB10601 DQA10101-DQB10602 DQA10102-DQB10501 DQA10102-DQB10503 DQA10102-DQB10601 DQA10102-DQB10602 DQA10102-DQB10603 DQA10102-DQB10609 DQA10102-DQB10610 DQA10102-DQB10611 DQA10102-DQB10614 DQA10103-DQB10501 DQA10103-DQB10503 DQA10103-DQB10601 DQA10103-DQB10602 DQA10103-DQB10603 DQA10103-DQB10608 DQA10103-DQB10609 DQA10103-DQB10614 DQA10104-DQB10602 DQA10105-DQB10602 DQA10201-DQB10301 DQA10501-DQB10301 DQA10501-DQB10319 DQA10503-DQB10301 DQA10505-DQB10301 DQA10505-DQB10309; note = HLAs: DQA10505-DQB10319 DQA10508-DQB10301 DQA10509-DQB10301
DIQKLVGKLNWASQIYPGIKV

SEQ ID NO: 3100 - protein, 18 aa, Human immunodeficiency virus 1
  source 1..18: note = HLAs: DPA10103-DPB10101 DPA10103-DPB10202 DPA10103-DPB11501 DPA10103-DPB13101 DPA10104-DPB10101 DPA10104-DPB11501 DPA10105-DPB10101 DPA10106-DPB10101 DPA10201-DPB10101 DPA10202-DPB10101 DPA10301-DPB10101 DPA10301-DPB10201 DPA10301-DPB10202 DPA10301-DPB10401 DPA10301-DPB10402 DPA10301-DPB110501 DPA10301-DPB110601 DPA10301-DPB11801 DPA10301-DPB12301 DPA10301-DPB13901 DPA10301-DPB14001 DPA10301-DPB14901 DPA10301-DPB16501 DPA10301-DPB18001 DPA10401-DPB10101 DPA10401-DPB10201 DPA10401-DPB10202
DKKHQKEPPFLWMGYELH

SEQ ID NO: 3101 - protein, 19 aa, Human immunodeficiency virus 1
  source 1..19: note = HLAs: DRB1_1001 DPA10103-DPB10101 DPA10103-DPB10201 DPA10103-DPB10202 DPA10103-DPB10401 DPA10103-DPB112601 DPA10103-DPB11501 DPA10103-DPB11601 DPA10103-DPB11901 DPA10103-DPB12301 DPA10103-DPB13101 DPA10103-DPB13401 DPA10103-DPB13901 DPA10103-DPB14001 DPA10103-DPB14101 DPA10103-DPB14801 DPA10103-DPB15001 DPA10103-DPB15901 DPA10104-DPB10101 DPA10104-DPB11501 DPA10105-DPB10101 DPA10105-DPB10401 DPA10105-DPB15001 DPA10106-DPB10101 DPA10201-DPB10101 DPA10201-DPB11501 DPA10201-DPB11601 DPA10202-DPB10101 DPA10202-DPB10202 DPA10202-DPB110601 DPA10202-DPB11901 DPA10202-DPB13101 DPA10202-DPB16501 DPA10301-DPB10101 DPA10301-DPB10201 DPA10301-DPB10202 DPA10301-DPB10401 DPA10301-DPB10402 DPA10301-DPB110501 DPA10301-DPB110601 DPA10301-DPB11801 DPA10301-DPB12301 DPA10301-DPB13901 DPA10301-DPB14001 DPA10301-DPB14901 DPA10301-DPB16501 DPA10301-DPB17501 DPA10301-DPB18001 DPA10401-DPB10101 DPA10401-DPB10201 DPA10401-DPB10202 DPA10401-DPB10501 DQA10102-DQB10501
DKKHQKEPPFLWMGYELHP

SEQ ID NO: 3102 - protein, 20 aa, Human immunodeficiency virus 1
  source 1..20: note = HLAs: DRB1_0101 DRB1_1001 DRB1_1501 DPA10103-DPB10101 DPA10103-DPB10201 DPA10103-DPB10202 DPA10103-DPB10401 DPA10103-DPB10501 DPA10103-DPB112601 DPA10103-DPB11501 DPA10103-DPB11601 DPA10103-DPB11801 DPA10103-DPB11901 DPA10103-DPB12301 DPA10103-DPB13101 DPA10103-DPB13401 DPA10103-DPB13901 DPA10103-DPB14001 DPA10103-DPB14101 DPA10103-DPB14801 DPA10103-DPB15001 DPA10103-DPB15901 DPA10104-DPB10101 DPA10104-DPB11501 DPA10105-DPB10101 DPA10105-DPB10401 DPA10105-DPB11801 DPA10105-DPB15001 DPA10106-DPB10101 DPA10201-DPB10101 DPA10201-DPB10201 DPA10201-DPB10202 DPA10201-DPB10501 DPA10201-DPB110601 DPA10201-DPB11501 DPA10201-DPB11601 DPA10201-DPB11901 DPA10202-DPB10101 DPA10202-DPB10201 DPA10202-DPB10202 DPA10202-DPB10401 DPA10202-DPB10501 DPA10202-DPB110601 DPA10202-DPB11901 DPA10202-DPB13101 DPA10202-DPB13801 DPA10202-DPB15501 DPA10202-DPB16501 DPA10301-DPB10101 DPA10301-DPB10201 DPA10301-DPB10202 DPA10301-DPB10401 DPA10301-DPB10402 DPA10301-DPB110501 DPA10301-DPB110601 DPA10301-DPB11101; note = HLAs: DPA10301-DPB11301 DPA10301-DPB11801 DPA10301-DPB12301 DPA10301-DPB13901 DPA10301-DPB14001 DPA10301-DPB14901 DPA10301-DPB15501 DPA10301-DPB16501 DPA10301-DPB17501 DPA10301-DPB18001 DPA10401-DPB10101 DPA10401-DPB10201 DPA10401-DPB10202 DPA10401-DPB10402 DPA10401-DPB10501 DPA10401-DPB110501 DPA10401-DPB14901 DQA10101-DQB10501 DQA10102-DQB10501 DQA10102-DQB10502 DQA10102-DQB10503 DQA10103-DQB10501 DQA10104-DQB10501 DQA10105-DQB10501
DKKHQKEPPFLWMGYELHPD

SEQ ID NO: 3103 - protein, 21 aa, Human immunodeficiency virus 1
  source 1..21: note = HLAs: DRB1_1001 DPA10103-DPB10101 DPA10103-DPB10201 DPA10103-DPB10202 DPA10103-DPB10401 DPA10103-DPB112601 DPA10103-DPB11501 DPA10103-DPB11601 DPA10103-DPB11801 DPA10103-DPB11901 DPA10103-DPB12301 DPA10103-DPB13101 DPA10103-DPB13401 DPA10103-DPB13901 DPA10103-DPB14001 DPA10103-DPB14101 DPA10103-DPB14801 DPA10103-DPB15001 DPA10103-DPB15901 DPA10104-DPB10101 DPA10104-DPB11501 DPA10105-DPB10101 DPA10105-DPB10401 DPA10105-DPB11801 DPA10105-DPB15001 DPA10106-DPB10101 DPA10201-DPB10101 DPA10201-DPB10202 DPA10201-DPB110601 DPA10201-DPB11501 DPA10201-DPB11601 DPA10201-DPB11901 DPA10202-DPB10101 DPA10202-DPB10201 DPA10202-DPB10202 DPA10202-DPB10401 DPA10202-DPB110601 DPA10202-DPB11901 DPA10202-DPB13101 DPA10202-DPB16501 DPA10301-DPB10101 DPA10301-DPB10201 DPA10301-DPB10202 DPA10301-DPB10401 DPA10301-DPB10402 DPA10301-DPB110501 DPA10301-DPB110601 DPA10301-DPB11801 DPA10301-DPB12301 DPA10301-DPB13901 DPA10301-DPB14001 DPA10301-DPB14901 DPA10301-DPB15501 DPA10301-DPB16501 DPA10301-DPB17501; note = HLAs: DPA10301-DPB18001 DPA10401-DPB10101 DPA10401-DPB10201 DPA10401-DPB10202 DPA10401-DPB10402 DPA10401-DPB10501 DPA10401-DPB110501 DPA10401-DPB14901 DQA10101-DQB10501 DQA10102-DQB10501 DQA10102-DQB10502 DQA10102-DQB10503 DQA10103-DQB10501 DQA10104-DQB10501 DQA10105-DQB10501
DKKHQKEPPFLWMGYELHPDK

SEQ ID NO: 3104 - protein, 22 aa, Human immunodeficiency virus 1
  source 1..22: note = HLAs: DRB1_0101 DRB1_1001 DPA10103-DPB10101 DPA10103-DPB10201 DPA10103-DPB10202 DPA10103-DPB10401 DPA10103-DPB10501 DPA10103-DPB112601 DPA10103-DPB11501 DPA10103-DPB11601 DPA10103-DPB11801 DPA10103-DPB11901 DPA10103-DPB12301 DPA10103-DPB13101 DPA10103-DPB13401 DPA10103-DPB13901 DPA10103-DPB14001 DPA10103-DPB14101 DPA10103-DPB14801 DPA10103-DPB15001 DPA10103-DPB15901 DPA10104-DPB10101 DPA10104-DPB11501 DPA10105-DPB10101 DPA10105-DPB10401 DPA10105-DPB11801 DPA10105-DPB15001 DPA10106-DPB10101 DPA10201-DPB10101 DPA10201-DPB10202 DPA10201-DPB110601 DPA10201-DPB11501 DPA10201-DPB11601 DPA10201-DPB11901 DPA10202-DPB10101 DPA10202-DPB10201 DPA10202-DPB10202 DPA10202-DPB10401 DPA10202-DPB110601 DPA10202-DPB11901 DPA10202-DPB13101 DPA10202-DPB16501 DPA10301-DPB10101 DPA10301-DPB10201 DPA10301-DPB10202 DPA10301-DPB10401 DPA10301-DPB10402 DPA10301-DPB110501 DPA10301-DPB110601 DPA10301-DPB11801 DPA10301-DPB12301 DPA10301-DPB13901 DPA10301-DPB14001 DPA10301-DPB14901 DPA10301-DPB15501; note = HLAs: DPA10301-DPB16501 DPA10301-DPB17501 DPA10301-DPB18001 DPA10401-DPB10101 DPA10401-DPB10201 DPA10401-DPB10202 DPA10401-DPB10402 DPA10401-DPB10501 DPA10401-DPB110501 DPA10401-DPB14901 DQA10101-DQB10501 DQA10102-DQB10501 DQA10102-DQB10502 DQA10102-DQB10503 DQA10103-DQB10501 DQA10104-DQB10501 DQA10105-DQB10501
DKKHQKEPPFLWMGYELHPDKW

SEQ ID NO: 3105 - protein, 23 aa, Human immunodeficiency virus 1
  source 1..23: note = HLAs: DRB1_0101 DRB1_1001 DPA10103-DPB10101 DPA10103-DPB10201 DPA10103-DPB10202 DPA10103-DPB10401 DPA10103-DPB10501 DPA10103-DPB112601 DPA10103-DPB11501 DPA10103-DPB11601 DPA10103-DPB11801 DPA10103-DPB11901 DPA10103-DPB12301 DPA10103-DPB13101 DPA10103-DPB13401 DPA10103-DPB13901 DPA10103-DPB14001 DPA10103-DPB14101 DPA10103-DPB14801 DPA10103-DPB15001 DPA10103-DPB15901 DPA10104-DPB10101 DPA10104-DPB11501 DPA10105-DPB10101 DPA10105-DPB10401 DPA10105-DPB11801 DPA10105-DPB15001 DPA10106-DPB10101 DPA10201-DPB10101 DPA10201-DPB10202 DPA10201-DPB110601 DPA10201-DPB11501 DPA10201-DPB11601 DPA10201-DPB11901 DPA10201-DPB13401 DPA10202-DPB10101 DPA10202-DPB10201 DPA10202-DPB10202 DPA10202-DPB10401 DPA10202-DPB110601 DPA10202-DPB11901 DPA10202-DPB13101 DPA10202-DPB16501 DPA10301-DPB10101 DPA10301-DPB10201 DPA10301-DPB10202 DPA10301-DPB10401 DPA10301-DPB10402 DPA10301-DPB110501 DPA10301-DPB110601 DPA10301-DPB11301 DPA10301-DPB11801 DPA10301-DPB12301 DPA10301-DPB13901 DPA10301-DPB14001; note = HLAs: DPA10301-DPB14901 DPA10301-DPB15501 DPA10301-DPB16501 DPA10301-DPB17501 DPA10301-DPB18001 DPA10401-DPB10101 DPA10401-DPB10201 DPA10401-DPB10202 DPA10401-DPB10402 DPA10401-DPB10501 DPA10401-DPB110501 DPA10401-DPB14901 DQA10101-DQB10501 DQA10102-DQB10501 DQA10102-DQB10502 DQA10102-DQB10503 DQA10103-DQB10501 DQA10104-DQB10501 DQA10105-DQB10501
DKKHQKEPPFLWMGYELHPDKWT

SEQ ID NO: 3106 - protein, 24 aa, Human immunodeficiency virus 1
  source 1..24: note = HLAs: DRB1_0101 DRB1_0405 DRB1_1001 DRB1_1501 DPA10103-DPB10101 DPA10103-DPB10201 DPA10103-DPB10202 DPA10103-DPB10401 DPA10103-DPB10501 DPA10103-DPB112601 DPA10103-DPB11501 DPA10103-DPB11601 DPA10103-DPB11801 DPA10103-DPB11901 DPA10103-DPB12301 DPA10103-DPB13101 DPA10103-DPB13401 DPA10103-DPB13901 DPA10103-DPB14001 DPA10103-DPB14101 DPA10103-DPB14801 DPA10103-DPB15001 DPA10103-DPB15901 DPA10104-DPB10101 DPA10104-DPB11501 DPA10105-DPB10101 DPA10105-DPB10401 DPA10105-DPB11801 DPA10105-DPB15001 DPA10106-DPB10101 DPA10201-DPB10101 DPA10201-DPB10202 DPA10201-DPB110601 DPA10201-DPB11501 DPA10201-DPB11601 DPA10201-DPB11901 DPA10201-DPB13401 DPA10202-DPB10101 DPA10202-DPB10201 DPA10202-DPB10202 DPA10202-DPB10401 DPA10202-DPB10501 DPA10202-DPB110601 DPA10202-DPB11901 DPA10202-DPB13101 DPA10202-DPB13801 DPA10202-DPB15501 DPA10202-DPB16501 DPA10301-DPB10101 DPA10301-DPB10201 DPA10301-DPB10202 DPA10301-DPB10401 DPA10301-DPB10402 DPA10301-DPB110501 DPA10301-DPB110601 DPA10301-DPB11301; note = HLAs: DPA10301-DPB11801 DPA10301-DPB12301 DPA10301-DPB13901 DPA10301-DPB14001 DPA10301-DPB14901 DPA10301-DPB15501 DPA10301-DPB16501 DPA10301-DPB17501 DPA10301-DPB18001 DPA10401-DPB10101 DPA10401-DPB10201 DPA10401-DPB10202 DPA10401-DPB10402 DPA10401-DPB10501 DPA10401-DPB110501 DPA10401-DPB14901 DQA10101-DQB10501 DQA10102-DQB10501 DQA10102-DQB10502 DQA10102-DQB10503 DQA10103-DQB10501 DQA10104-DQB10501 DQA10105-DQB10501
DKKHQKEPPFLWMGYELHPDKWTV

SEQ ID NO: 3107 - protein, 25 aa, Human immunodeficiency virus 1
  source 1..25: note = HLAs: DRB1_0101 DRB1_0405 DRB1_1001 DRB1_1501 DRB1_1602 DPA10103-DPB10101 DPA10103-DPB10201 DPA10103-DPB10202 DPA10103-DPB10401 DPA10103-DPB10501 DPA10103-DPB112601 DPA10103-DPB11501 DPA10103-DPB11601 DPA10103-DPB11801 DPA10103-DPB11901 DPA10103-DPB12301 DPA10103-DPB13101 DPA10103-DPB13401 DPA10103-DPB13901 DPA10103-DPB14001 DPA10103-DPB14101 DPA10103-DPB14801 DPA10103-DPB15001 DPA10103-DPB15901 DPA10104-DPB10101 DPA10104-DPB11501 DPA10105-DPB10101 DPA10105-DPB10401 DPA10105-DPB11801 DPA10105-DPB15001 DPA10106-DPB10101 DPA10201-DPB10101 DPA10201-DPB10202 DPA10201-DPB110601 DPA10201-DPB11501 DPA10201-DPB11601 DPA10201-DPB11901 DPA10201-DPB13401 DPA10202-DPB10101 DPA10202-DPB10201 DPA10202-DPB10202 DPA10202-DPB10401 DPA10202-DPB10501 DPA10202-DPB110601 DPA10202-DPB11901 DPA10202-DPB13101 DPA10202-DPB13801 DPA10202-DPB15501 DPA10202-DPB16501 DPA10301-DPB10101 DPA10301-DPB10201 DPA10301-DPB10202 DPA10301-DPB10401 DPA10301-DPB10402 DPA10301-DPB110501 DPA10301-DPB110601 DPA10301-DPB11301; note = HLAs: DPA10301-DPB11801 DPA10301-DPB12301 DPA10301-DPB13901 DPA10301-DPB14001 DPA10301-DPB14901 DPA10301-DPB15501 DPA10301-DPB16501 DPA10301-DPB17501 DPA10301-DPB18001 DPA10401-DPB10101 DPA10401-DPB10201 DPA10401-DPB10202 DPA10401-DPB10402 DPA10401-DPB10501 DPA10401-DPB110501 DPA10401-DPB14901 DQA10101-DQB10501 DQA10102-DQB10501 DQA10102-DQB10502 DQA10102-DQB10503 DQA10103-DQB10501 DQA10104-DQB10501 DQA10105-DQB10501
DKKHQKEPPFLWMGYELHPDKWTVQ

SEQ ID NO: 3108 - protein, 13 aa, Human immunodeficiency virus 1
  source 1..13: note = HLAs: DRB1_0701 DRB1_0901 DRB1_1102 DRB1_1114 DRB1_1301 DRB1_1302 DRB1_1304 DRB1_1406 DPA10103-DPB11501 DPA10104-DPB11501 DPA10202-DPB10101 DPA10301-DPB10101 DPA10301-DPB10201 DPA10301-DPB10202 DPA10301-DPB10401 DPA10301-DPB11801 DPA10301-DPB12301 DPA10301-DPB13901 DPA10301-DPB14001 DPA10401-DPB10201 DPA10401-DPB10202 DQA10102-DQB10501 DQA10102-DQB10601 DQA10103-DQB10601 DQA10103-DQB10609 DQA10201-DQB10301
DKLVSSGIRKVLF

SEQ ID NO: 3109 - protein, 14 aa, Human immunodeficiency virus 1
  source 1..14: note = HLAs: DRB1_0101 DRB1_0102 DRB1_0701 DRB1_0804 DRB1_0806 DRB1_0813 DRB1_0901 DRB1_1001 DRB1_1102 DRB1_1103 DRB1_1104 DRB1_1114 DRB1_1301 DRB1_1302 DRB1_1304 DRB1_1401 DRB1_1402 DRB1_1404 DRB1_1406 DRB1_1454 DRB1_1501 DPA10103-DPB10201 DPA10103-DPB10202 DPA10103-DPB11501 DPA10103-DPB11801 DPA10103-DPB11901 DPA10103-DPB13401 DPA10103-DPB14001 DPA10103-DPB14801 DPA10103-DPB15001 DPA10104-DPB11501 DPA10105-DPB11801 DPA10105-DPB15001 DPA10106-DPB10101 DPA10201-DPB10101 DPA10201-DPB110601 DPA10201-DPB11501 DPA10201-DPB11901 DPA10202-DPB10101 DPA10202-DPB10201 DPA10202-DPB10202 DPA10202-DPB110601 DPA10202-DPB11801 DPA10202-DPB11901 DPA10202-DPB13101 DPA10202-DPB16501 DPA10301-DPB10101 DPA10301-DPB10201 DPA10301-DPB10202 DPA10301-DPB10401 DPA10301-DPB10402 DPA10301-DPB110501 DPA10301-DPB110601 DPA10301-DPB11801 DPA10301-DPB12301 DPA10301-DPB13901 DPA10301-DPB14001 DPA10301-DPB14901 DPA10301-DPB15501 DPA10301-DPB16501 DPA10301-DPB17501 DPA10301-DPB18001 DPA10401-DPB10101 DPA10401-DPB10201; note = HLAs: DPA10401-DPB10202 DQA10102-DQB10501 DQA10102-DQB10601 DQA10102-DQB10602 DQA10102-DQB10609 DQA10102-DQB10611 DQA10103-DQB10501 DQA10103-DQB10601 DQA10103-DQB10602 DQA10103-DQB10609 DQA10201-DQB10301 DQA10201-DQB10303 DQA10505-DQB10402
DKLVSSGIRKVLFL

SEQ ID NO: 3110 - protein, 15 aa, Human immunodeficiency virus 1
  source 1..15: note = HLAs: DRB1_0101 DRB1_0102 DRB1_0103 DRB1_0404 DRB1_0410 DRB1_0701 DRB1_0801 DRB1_0802 DRB1_0803 DRB1_0804 DRB1_0806 DRB1_0809 DRB1_0813 DRB1_0901 DRB1_1001 DRB1_1101 DRB1_1102 DRB1_1103 DRB1_1104 DRB1_1114 DRB1_1201 DRB1_1202 DRB1_1301 DRB1_1302 DRB1_1303 DRB1_1304 DRB1_1305 DRB1_1312 DRB1_1401 DRB1_1402 DRB1_1403 DRB1_1404 DRB1_1405 DRB1_1406 DRB1_1418 DRB1_1454 DRB1_1501 DRB1_1502 DRB1_1503 DRB1_1601 DRB1_1602 DPA10103-DPB10101 DPA10103-DPB10201 DPA10103-DPB10202 DPA10103-DPB11501 DPA10103-DPB11601 DPA10103-DPB11801 DPA10103-DPB11901 DPA10103-DPB13101 DPA10103-DPB13401 DPA10103-DPB14001 DPA10103-DPB14101 DPA10103-DPB14801 DPA10103-DPB15001 DPA10104-DPB10101 DPA10104-DPB11501 DPA10105-DPB10101 DPA10105-DPB11801 DPA10105-DPB15001 DPA10106-DPB10101 DPA10201-DPB10101 DPA10201-DPB10201 DPA10201-DPB110601 DPA10201-DPB11501 DPA10201-DPB11601 DPA10201-DPB11901 DPA10201-DPB13401 DPA10202-DPB10101 DPA10202-DPB10201 DPA10202-DPB10202 DPA10202-DPB10501 DPA10202-DPB10901 DPA10202-DPB110601; note = HLAs: DPA10202-DPB11801 DPA10202-DPB11901 DPA10202-DPB13101 DPA10202-DPB13801 DPA10202-DPB16501 DPA10301-DPB10101 DPA10301-DPB10201 DPA10301-DPB10202 DPA10301-DPB10401 DPA10301-DPB10402 DPA10301-DPB110501 DPA10301-DPB110601 DPA10301-DPB11801 DPA10301-DPB12301 DPA10301-DPB13901 DPA10301-DPB14001 DPA10301-DPB14901 DPA10301-DPB15501 DPA10301-DPB16501 DPA10301-DPB17501 DPA10301-DPB18001 DPA10401-DPB10101 DPA10401-DPB10201 DPA10401-DPB10202 DPA10401-DPB10402 DPA10401-DPB10501 DPA10401-DPB110501 DPA10401-DPB14901 DQA10101-DQB10601 DQA10102-DQB10501 DQA10102-DQB10601 DQA10102-DQB10602 DQA10102-DQB10609 DQA10102-DQB10611 DQA10103-DQB10501 DQA10103-DQB10601 DQA10103-DQB10602 DQA10103-DQB10604 DQA10103-DQB10608 DQA10103-DQB10609 DQA10201-DQB10301 DQA10201-DQB10303 DQA10501-DQB10301 DQA10501-DQB10319 DQA10503-DQB10301 DQA10505-DQB10301 DQA10505-DQB10309 DQA10505-DQB10319 DQA10505-DQB10402 DQA10506-DQB10303 DQA10508-DQB10301 DQA10509-DQB10301
DKLVSSGIRKVLFLD

SEQ ID NO: 3111 - protein, 16 aa, Human immunodeficiency virus 1
  source 1..16: note = HLAs: DRB1_0101 DRB1_0102 DRB1_0701 DRB1_0801 DRB1_0804 DRB1_0806 DRB1_0813 DRB1_0901 DRB1_1001 DRB1_1102 DRB1_1103 DRB1_1104 DRB1_1114 DRB1_1301 DRB1_1302 DRB1_1304 DRB1_1401 DRB1_1402 DRB1_1404 DRB1_1406 DRB1_1454 DRB1_1501 DPA10103-DPB10101 DPA10103-DPB10201 DPA10103-DPB10202 DPA10103-DPB10401 DPA10103-DPB10501 DPA10103-DPB112601 DPA10103-DPB11501 DPA10103-DPB11601 DPA10103-DPB11801 DPA10103-DPB11901 DPA10103-DPB12301 DPA10103-DPB13101 DPA10103-DPB13401 DPA10103-DPB13901 DPA10103-DPB14001 DPA10103-DPB14101 DPA10103-DPB14801 DPA10103-DPB15001 DPA10104-DPB10101 DPA10104-DPB11501 DPA10105-DPB10101 DPA10105-DPB10401 DPA10105-DPB11801 DPA10105-DPB15001 DPA10106-DPB10101 DPA10201-DPB10101 DPA10201-DPB10201 DPA10201-DPB10202 DPA10201-DPB110601 DPA10201-DPB11501 DPA10201-DPB11601 DPA10201-DPB11901 DPA10201-DPB13401 DPA10202-DPB10101 DPA10202-DPB10201 DPA10202-DPB10202 DPA10202-DPB10401 DPA10202-DPB10501 DPA10202-DPB10901 DPA10202-DPB110601 DPA10202-DPB11301 DPA10202-DPB11801; note = HLAs: DPA10202-DPB11901 DPA10202-DPB13101 DPA10202-DPB13801 DPA10202-DPB15501 DPA10202-DPB16501 DPA10301-DPB10101 DPA10301-DPB10201 DPA10301-DPB10202 DPA10301-DPB10401 DPA10301-DPB10402 DPA10301-DPB110501 DPA10301-DPB110601 DPA10301-DPB11801 DPA10301-DPB12301 DPA10301-DPB13901 DPA10301-DPB14001 DPA10301-DPB14901 DPA10301-DPB15501 DPA10301-DPB16501 DPA10301-DPB17501 DPA10301-DPB18001 DPA10401-DPB10101 DPA10401-DPB10201 DPA10401-DPB10202 DPA10401-DPB10402 DPA10401-DPB10501 DPA10401-DPB110501 DPA10401-DPB14901 DQA10101-DQB10601 DQA10102-DQB10501 DQA10102-DQB10503 DQA10102-DQB10601 DQA10102-DQB10602 DQA10102-DQB10609 DQA10102-DQB10611 DQA10103-DQB10501 DQA10103-DQB10601 DQA10103-DQB10602 DQA10103-DQB10608 DQA10103-DQB10609 DQA10201-DQB10301 DQA10201-DQB10303 DQA10501-DQB10301 DQA10501-DQB10319 DQA10503-DQB10301 DQA10505-DQB10301 DQA10505-DQB10309 DQA10505-DQB10319 DQA10505-DQB10402 DQA10506-DQB10303 DQA10508-DQB10301 DQA10509-DQB10301
DKLVSSGIRKVLFLDG

SEQ ID NO: 3112 - protein, 17 aa, Human immunodeficiency virus 1
  source 1..17: note = HLAs: DRB1_0101 DRB1_0102 DRB1_0404 DRB1_0410 DRB1_0701 DRB1_0801 DRB1_0804 DRB1_0806 DRB1_0813 DRB1_0901 DRB1_1001 DRB1_1101 DRB1_1102 DRB1_1103 DRB1_1104 DRB1_1114 DRB1_1201 DRB1_1301 DRB1_1302 DRB1_1303 DRB1_1304 DRB1_1305 DRB1_1401 DRB1_1402 DRB1_1404 DRB1_1405 DRB1_1406 DRB1_1454 DRB1_1501 DRB1_1503 DRB1_1602 DPA10103-DPB10101 DPA10103-DPB10201 DPA10103-DPB10202 DPA10103-DPB10401 DPA10103-DPB10501 DPA10103-DPB112601 DPA10103-DPB11501 DPA10103-DPB11601 DPA10103-DPB11801 DPA10103-DPB11901 DPA10103-DPB12301 DPA10103-DPB13101 DPA10103-DPB13401 DPA10103-DPB13901 DPA10103-DPB14001 DPA10103-DPB14101 DPA10103-DPB14801 DPA10103-DPB15001 DPA10103-DPB15901 DPA10104-DPB10101 DPA10104-DPB11501 DPA10105-DPB10101 DPA10105-DPB10401 DPA10105-DPB11801 DPA10105-DPB15001 DPA10106-DPB10101 DPA10201-DPB10101 DPA10201-DPB10201 DPA10201-DPB10202 DPA10201-DPB110601 DPA10201-DPB11501 DPA10201-DPB11601 DPA10201-DPB11801 DPA10201-DPB11901 DPA10201-DPB13401 DPA10202-DPB10101 DPA10202-DPB10201; note = HLAs: DPA10202-DPB10202 DPA10202-DPB10401 DPA10202-DPB10501 DPA10202-DPB110601 DPA10202-DPB11801 DPA10202-DPB11901 DPA10202-DPB13101 DPA10202-DPB13801 DPA10202-DPB15501 DPA10202-DPB16501 DPA10301-DPB10101 DPA10301-DPB10201 DPA10301-DPB10202 DPA10301-DPB10401 DPA10301-DPB10402 DPA10301-DPB110501 DPA10301-DPB110601 DPA10301-DPB11801 DPA10301-DPB12301 DPA10301-DPB13901 DPA10301-DPB14001 DPA10301-DPB14901 DPA10301-DPB15501 DPA10301-DPB16501 DPA10301-DPB17501 DPA10301-DPB18001 DPA10401-DPB10101 DPA10401-DPB10201 DPA10401-DPB10202 DPA10401-DPB10402 DPA10401-DPB10501 DPA10401-DPB110501 DPA10401-DPB14901 DQA10102-DQB10501 DQA10102-DQB10601 DQA10102-DQB10602 DQA10102-DQB10609 DQA10102-DQB10611 DQA10103-DQB10501 DQA10103-DQB10601 DQA10103-DQB10602 DQA10103-DQB10608 DQA10103-DQB10609 DQA10201-DQB10301 DQA10201-DQB10303 DQA10505-DQB10402
DKLVSSGIRKVLFLDGI

SEQ ID NO: 3113 - protein, 15 aa, Human immunodeficiency virus 1
  source 1..15: note = HLAs: DRB1_0101 DRB1_0102 DRB1_0404 DRB1_1001 DQA10102-DQB10501 DQA10102-DQB10601 DQA10103-DQB10601 DQA10201-DQB10301
DLNTMLNTVGGHQAA

SEQ ID NO: 3114 - protein, 16 aa, Human immunodeficiency virus 1
  source 1..16: note = HLAs: DRB1_0101 DRB1_1001 DQA10102-DQB10501 DQA10102-DQB10601 DQA10103-DQB10601 DQA10201-DQB10301 DQA10201-DQB10303
DLNTMLNTVGGHQAAM

SEQ ID NO: 3115 - protein, 17 aa, Human immunodeficiency virus 1
  source 1..17: note = HLAs: DRB1_0101 DRB1_1001 DQA10102-DQB10501 DQA10102-DQB10601 DQA10103-DQB10601 DQA10201-DQB10301
DLNTMLNTVGGHQAAMQ

SEQ ID NO: 3116 - protein, 19 aa, Human immunodeficiency virus 1
  source 1..19: note = HLAs: DRB1_0101 DRB1_1001 DQA10102-DQB10501 DQA10102-DQB10601 DQA10102-DQB10609 DQA10103-DQB10601 DQA10103-DQB10609 DQA10201-DQB10301 DQA10201-DQB10303 DQA10506-DQB10303
DLNTMLNTVGGHQAAMQML

SEQ ID NO: 3117 - protein, 20 aa, Human immunodeficiency virus 1
  source 1..20: note = HLAs: DRB1_0101 DRB1_1001 DQA10102-DQB10501 DQA10102-DQB10503 DQA10102-DQB10601 DQA10102-DQB10602 DQA10102-DQB10609 DQA10102-DQB10611 DQA10103-DQB10501 DQA10103-DQB10601 DQA10103-DQB10602 DQA10103-DQB10609 DQA10201-DQB10301 DQA10201-DQB10303 DQA10501-DQB10301 DQA10501-DQB10319 DQA10503-DQB10301 DQA10505-DQB10301 DQA10505-DQB10309 DQA10505-DQB10319 DQA10505-DQB10402 DQA10506-DQB10303 DQA10508-DQB10301 DQA10509-DQB10301
DLNTMLNTVGGHQAAMQMLK

SEQ ID NO: 3118 - protein, 21 aa, Human immunodeficiency virus 1
  source 1..21: note = HLAs: DRB1_0101 DRB1_1001 DQA10102-DQB10501 DQA10102-DQB10601 DQA10103-DQB10601 DQA10103-DQB10609 DQA10201-DQB10301 DQA10201-DQB10303
DLNTMLNTVGGHQAAMQMLKD

SEQ ID NO: 3119 - protein, 22 aa, Human immunodeficiency virus 1
  source 1..22: note = HLAs: DRB1_0101 DRB1_1001 DQA10102-DQB10501 DQA10102-DQB10601 DQA10102-DQB10609 DQA10103-DQB10601 DQA10103-DQB10609 DQA10201-DQB10301 DQA10201-DQB10303
DLNTMLNTVGGHQAAMQMLKDT

SEQ ID NO: 3120 - protein, 23 aa, Human immunodeficiency virus 1
  source 1..23: note = HLAs: DRB1_0101 DRB1_1001 DPA10401-DPB10101 DQA10102-DQB10501 DQA10102-DQB10601 DQA10102-DQB10602 DQA10102-DQB10609 DQA10103-DQB10601 DQA10103-DQB10602 DQA10103-DQB10609 DQA10201-DQB10301 DQA10201-DQB10303
DLNTMLNTVGGHQAAMQMLKDTI

SEQ ID NO: 3121 - protein, 24 aa, Human immunodeficiency virus 1
  source 1..24: note = HLAs: DRB1_0101 DRB1_1001 DPA10301-DPB10101 DPA10401-DPB10101 DQA10102-DQB10501 DQA10102-DQB10601 DQA10102-DQB10602 DQA10102-DQB10609 DQA10103-DQB10501 DQA10103-DQB10601 DQA10103-DQB10602 DQA10103-DQB10609 DQA10201-DQB10301 DQA10201-DQB10303
DLNTMLNTVGGHQAAMQMLKDTIN

SEQ ID NO: 3122 - protein, 15 aa, Human immunodeficiency virus 1
  source 1..15: note = HLAs: DQA10102-DQB10501
DLYVGSDLEIGQHRA

SEQ ID NO: 3123 - protein, 15 aa, Human immunodeficiency virus 1
  source 1..15: note = HLAs: DRB1_0101 DRB1_0102 DRB1_0701 DRB1_0813 DRB1_0901 DRB1_1001 DRB1_1102 DRB1_1114 DRB1_1301 DRB1_1302 DRB1_1304 DRB1_1401 DRB1_1404 DRB1_1406 DRB1_1454 DPA10103-DPB11501 DPA10104-DPB11501 DPA10202-DPB10101 DPA10301-DPB10101 DPA10301-DPB10201 DPA10301-DPB10202 DPA10301-DPB110601 DPA10301-DPB11801 DPA10301-DPB14001 DPA10301-DPB16501 DPA10401-DPB10101 DPA10401-DPB11401 DQA10102-DQB10501 DQA10102-DQB10601 DQA10102-DQB10602 DQA10102-DQB10609 DQA10102-DQB10611 DQA10103-DQB10601 DQA10103-DQB10602 DQA10103-DQB10609 DQA10201-DQB10301 DQA10201-DQB10303 DQA10505-DQB10402
DQAEHLKTAVQMAVF

SEQ ID NO: 3124 - protein, 16 aa, Human immunodeficiency virus 1
  source 1..16: note = HLAs: DRB1_0101 DRB1_0701 DRB1_0901 DRB1_1001 DPA10103-DPB11501 DPA10104-DPB11501 DPA10202-DPB10101 DPA10301-DPB10101 DPA10301-DPB10201 DPA10301-DPB10202 DPA10301-DPB10401 DPA10301-DPB110601 DPA10301-DPB11801 DPA10301-DPB12301 DPA10301-DPB13901 DPA10301-DPB14001 DPA10301-DPB16501 DPA10401-DPB10101 DPA10401-DPB10202 DPA10401-DPB10301 DPA10401-DPB11401 DQA10102-DQB10501 DQA10102-DQB10601 DQA10102-DQB10602 DQA10102-DQB10609 DQA10102-DQB10611 DQA10103-DQB10501 DQA10103-DQB10601 DQA10103-DQB10602 DQA10103-DQB10609 DQA10201-DQB10301 DQA10201-DQB10303
DQAEHLKTAVQMAVFI

SEQ ID NO: 3125 - protein, 17 aa, Human immunodeficiency virus 1
  source 1..17: note = HLAs: DRB1_0101 DRB1_0701 DRB1_0813 DRB1_0901 DRB1_1001 DRB1_1406 DPA10103-DPB10101 DPA10103-DPB11501 DPA10103-DPB15001 DPA10104-DPB10101 DPA10104-DPB11501 DPA10105-DPB10101 DPA10105-DPB15001 DPA10202-DPB10101 DPA10301-DPB10101 DPA10301-DPB10201 DPA10301-DPB10202 DPA10301-DPB10401 DPA10301-DPB110601 DPA10301-DPB11801 DPA10301-DPB12301 DPA10301-DPB13901 DPA10301-DPB14001 DPA10301-DPB16501 DPA10301-DPB17501 DPA10401-DPB10101 DPA10401-DPB10201 DPA10401-DPB10202 DPA10401-DPB10301 DPA10401-DPB10501 DPA10401-DPB11401 DQA10102-DQB10501 DQA10102-DQB10601 DQA10102-DQB10602 DQA10102-DQB10609 DQA10102-DQB10611 DQA10103-DQB10501 DQA10103-DQB10601 DQA10103-DQB10602 DQA10103-DQB10609 DQA10201-DQB10301
DQAEHLKTAVQMAVFIH

SEQ ID NO: 3126 - protein, 18 aa, Human immunodeficiency virus 1
  source 1..18: note = HLAs: DPA10103-DPB10101 DPA10103-DPB11501 DPA10104-DPB10101 DPA10104-DPB11501 DPA10105-DPB10101 DPA10202-DPB10101 DPA10301-DPB10101 DPA10301-DPB10201 DPA10301-DPB10202 DPA10301-DPB10401 DPA10301-DPB110601 DPA10301-DPB11801 DPA10301-DPB12301 DPA10301-DPB13901 DPA10301-DPB14001 DPA10301-DPB16501 DPA10401-DPB10101 DPA10401-DPB10201 DPA10401-DPB10202 DQA10102-DQB10501 DQA10102-DQB10601 DQA10102-DQB10602 DQA10102-DQB10609 DQA10102-DQB10611
DQAEHLKTAVQMAVFIHN

SEQ ID NO: 3127 - protein, 19 aa, Human immunodeficiency virus 1
  source 1..19: note = HLAs: DRB1_0101 DRB1_1001 DPA10103-DPB10101 DPA10103-DPB10201 DPA10103-DPB10202 DPA10103-DPB11501 DPA10103-DPB11601 DPA10103-DPB11801 DPA10103-DPB11901 DPA10103-DPB13101 DPA10103-DPB13401 DPA10103-DPB14001 DPA10103-DPB14801 DPA10103-DPB15001 DPA10104-DPB10101 DPA10104-DPB11501 DPA10105-DPB10101 DPA10105-DPB11801 DPA10105-DPB15001 DPA10106-DPB10101 DPA10201-DPB10101 DPA10201-DPB11501 DPA10202-DPB10101 DPA10202-DPB10202 DPA10202-DPB110601 DPA10202-DPB11901 DPA10202-DPB16501 DPA10301-DPB10101 DPA10301-DPB10201 DPA10301-DPB10202 DPA10301-DPB10401 DPA10301-DPB10402 DPA10301-DPB110501 DPA10301-DPB110601 DPA10301-DPB11101 DPA10301-DPB11301 DPA10301-DPB11801 DPA10301-DPB12301 DPA10301-DPB13901 DPA10301-DPB14001 DPA10301-DPB14901 DPA10301-DPB15501 DPA10301-DPB16501 DPA10301-DPB17501 DPA10301-DPB18001 DPA10401-DPB10101 DPA10401-DPB10201 DPA10401-DPB10202 DPA10401-DPB10301 DPA10401-DPB10501 DPA10401-DPB11301 DPA10401-DPB113301 DPA10401-DPB11401 DQA10102-DQB10501 DQA10102-DQB10503; note = HLAs: DQA10102-DQB10601 DQA10102-DQB10602 DQA10102-DQB10609 DQA10102-DQB10611 DQA10103-DQB10501 DQA10103-DQB10601 DQA10103-DQB10602 DQA10103-DQB10609
DQAEHLKTAVQMAVFIHNF

SEQ ID NO: 3128 - protein, 20 aa, Human immunodeficiency virus 1
  source 1..20: note = HLAs: DRB1_0101 DRB1_0404 DRB1_0410 DRB1_0701 DRB1_0813 DRB1_0901 DRB1_1001 DRB1_1406 DRB1_1501 DRB1_1602 DPA10103-DPB10101 DPA10103-DPB10201 DPA10103-DPB10202 DPA10103-DPB10401 DPA10103-DPB10501 DPA10103-DPB11101 DPA10103-DPB112601 DPA10103-DPB11501 DPA10103-DPB11601 DPA10103-DPB11801 DPA10103-DPB11901 DPA10103-DPB12001 DPA10103-DPB12301 DPA10103-DPB13101 DPA10103-DPB13401 DPA10103-DPB13901 DPA10103-DPB14001 DPA10103-DPB14101 DPA10103-DPB14801 DPA10103-DPB15001 DPA10103-DPB15501 DPA10103-DPB15901 DPA10104-DPB10101 DPA10104-DPB11501 DPA10105-DPB10101 DPA10105-DPB10401 DPA10105-DPB11801 DPA10105-DPB15001 DPA10106-DPB10101 DPA10201-DPB10101 DPA10201-DPB10202 DPA10201-DPB110601 DPA10201-DPB11501 DPA10201-DPB11601 DPA10201-DPB11901 DPA10201-DPB15501 DPA10202-DPB10101 DPA10202-DPB10201 DPA10202-DPB10202 DPA10202-DPB10501 DPA10202-DPB10901 DPA10202-DPB110601 DPA10202-DPB11101 DPA10202-DPB11301 DPA10202-DPB11801 DPA10202-DPB11901 DPA10202-DPB12101 DPA10202-DPB13001 DPA10202-DPB13101; note = HLAs: DPA10202-DPB13801 DPA10202-DPB15501 DPA10202-DPB16501 DPA10301-DPB10101 DPA10301-DPB10201 DPA10301-DPB10202 DPA10301-DPB10401 DPA10301-DPB10402 DPA10301-DPB10901 DPA10301-DPB110501 DPA10301-DPB110601 DPA10301-DPB11101 DPA10301-DPB11301 DPA10301-DPB11701 DPA10301-DPB11801 DPA10301-DPB12301 DPA10301-DPB13901 DPA10301-DPB14001 DPA10301-DPB14901 DPA10301-DPB15501 DPA10301-DPB16501 DPA10301-DPB17501 DPA10301-DPB18001 DPA10401-DPB10101 DPA10401-DPB10201 DPA10401-DPB10202 DPA10401-DPB10301 DPA10401-DPB10402 DPA10401-DPB10501 DPA10401-DPB110501 DPA10401-DPB11301 DPA10401-DPB113301 DPA10401-DPB11401 DPA10401-DPB14901 DQA10102-DQB10501 DQA10102-DQB10503 DQA10102-DQB10601 DQA10102-DQB10602 DQA10102-DQB10609 DQA10102-DQB10611 DQA10103-DQB10501 DQA10103-DQB10601 DQA10103-DQB10602 DQA10103-DQB10608 DQA10103-DQB10609 DQA10201-DQB10301 DQA10201-DQB10303
DQAEHLKTAVQMAVFIHNFK

SEQ ID NO: 3129 - protein, 21 aa, Human immunodeficiency virus 1
  source 1..21: note = HLAs: DRB1_0101 DRB1_0701 DRB1_1001 DRB1_1406 DPA10103-DPB10101 DPA10103-DPB10201 DPA10103-DPB10202 DPA10103-DPB10401 DPA10103-DPB10501 DPA10103-DPB11101 DPA10103-DPB112601 DPA10103-DPB11501 DPA10103-DPB11601 DPA10103-DPB11801 DPA10103-DPB11901 DPA10103-DPB12301 DPA10103-DPB13101 DPA10103-DPB13401 DPA10103-DPB13901 DPA10103-DPB14001 DPA10103-DPB14101 DPA10103-DPB14801 DPA10103-DPB15001 DPA10104-DPB10101 DPA10104-DPB11501 DPA10105-DPB10101 DPA10105-DPB10401 DPA10105-DPB11801 DPA10105-DPB15001 DPA10106-DPB10101 DPA10201-DPB10101 DPA10201-DPB110601 DPA10201-DPB11501 DPA10201-DPB11901 DPA10202-DPB10101 DPA10202-DPB10201 DPA10202-DPB10202 DPA10202-DPB10501 DPA10202-DPB110601 DPA10202-DPB11801 DPA10202-DPB11901 DPA10202-DPB13101 DPA10202-DPB13801 DPA10202-DPB16501 DPA10301-DPB10101 DPA10301-DPB10201 DPA10301-DPB10202 DPA10301-DPB10401 DPA10301-DPB10402 DPA10301-DPB110501 DPA10301-DPB110601 DPA10301-DPB11101 DPA10301-DPB11301 DPA10301-DPB11801 DPA10301-DPB12301 DPA10301-DPB13901; note = HLAs: DPA10301-DPB14001 DPA10301-DPB14901 DPA10301-DPB15501 DPA10301-DPB16501 DPA10301-DPB17501 DPA10301-DPB18001 DPA10401-DPB10101 DPA10401-DPB10201 DPA10401-DPB10202 DPA10401-DPB10301 DPA10401-DPB10402 DPA10401-DPB10501 DPA10401-DPB110501 DPA10401-DPB11301 DPA10401-DPB113301 DPA10401-DPB11401 DPA10401-DPB14901 DQA10102-DQB10501 DQA10102-DQB10503 DQA10102-DQB10601 DQA10102-DQB10602 DQA10102-DQB10609 DQA10102-DQB10611 DQA10103-DQB10501 DQA10103-DQB10601 DQA10103-DQB10609
DQAEHLKTAVQMAVFIHNFKR

SEQ ID NO: 3130 - protein, 22 aa, Human immunodeficiency virus 1
  source 1..22: note = HLAs: DRB1_0101 DRB1_0410 DRB1_0701 DRB1_0804 DRB1_0806 DRB1_1001 DRB1_1102 DRB1_1103 DRB1_1104 DRB1_1301 DRB1_1304 DRB1_1406 DRB1_1501 DRB1_1601 DRB1_1602 DPA10103-DPB10101 DPA10103-DPB10201 DPA10103-DPB10202 DPA10103-DPB10401 DPA10103-DPB10501 DPA10103-DPB11101 DPA10103-DPB112601 DPA10103-DPB11501 DPA10103-DPB11601 DPA10103-DPB11801 DPA10103-DPB11901 DPA10103-DPB12301 DPA10103-DPB13101 DPA10103-DPB13401 DPA10103-DPB13901 DPA10103-DPB14001 DPA10103-DPB14101 DPA10103-DPB14801 DPA10103-DPB15001 DPA10103-DPB15501 DPA10103-DPB15901 DPA10104-DPB10101 DPA10104-DPB11501 DPA10105-DPB10101 DPA10105-DPB10401 DPA10105-DPB11801 DPA10105-DPB15001 DPA10106-DPB10101 DPA10201-DPB10101 DPA10201-DPB10202 DPA10201-DPB110601 DPA10201-DPB11501 DPA10201-DPB11601 DPA10201-DPB11901 DPA10202-DPB10101 DPA10202-DPB10201 DPA10202-DPB10202 DPA10202-DPB10501 DPA10202-DPB110601 DPA10202-DPB11101 DPA10202-DPB11801 DPA10202-DPB11901 DPA10202-DPB13101 DPA10202-DPB13801 DPA10202-DPB15501 DPA10202-DPB16501; note = HLAs: DPA10301-DPB10101 DPA10301-DPB10201 DPA10301-DPB10202 DPA10301-DPB10401 DPA10301-DPB10402 DPA10301-DPB110501 DPA10301-DPB110601 DPA10301-DPB11101 DPA10301-DPB11301 DPA10301-DPB11801 DPA10301-DPB12301 DPA10301-DPB13901 DPA10301-DPB14001 DPA10301-DPB14901 DPA10301-DPB15501 DPA10301-DPB16501 DPA10301-DPB17501 DPA10301-DPB18001 DPA10401-DPB10101 DPA10401-DPB10201 DPA10401-DPB10202 DPA10401-DPB10301 DPA10401-DPB10402 DPA10401-DPB10501 DPA10401-DPB110501 DPA10401-DPB11301 DPA10401-DPB113301 DPA10401-DPB11401 DPA10401-DPB14901 DQA10102-DQB10501 DQA10102-DQB10503 DQA10102-DQB10601 DQA10102-DQB10602 DQA10102-DQB10609 DQA10102-DQB10611 DQA10103-DQB10501 DQA10103-DQB10601 DQA10103-DQB10602 DQA10103-DQB10609
DQAEHLKTAVQMAVFIHNFKRK

SEQ ID NO: 3131 - protein, 23 aa, Human immunodeficiency virus 1
  source 1..23: note = HLAs: DRB1_0101 DRB1_0410 DRB1_0701 DRB1_0801 DRB1_0804 DRB1_0806 DRB1_0813 DRB1_1001 DRB1_1101 DRB1_1102 DRB1_1103 DRB1_1104 DRB1_1301 DRB1_1304 DRB1_1305 DRB1_1406 DRB1_1501 DRB1_1601 DRB1_1602 DPA10103-DPB10101 DPA10103-DPB10201 DPA10103-DPB10202 DPA10103-DPB10401 DPA10103-DPB10501 DPA10103-DPB11101 DPA10103-DPB112601 DPA10103-DPB11501 DPA10103-DPB11601 DPA10103-DPB11801 DPA10103-DPB11901 DPA10103-DPB12301 DPA10103-DPB13101 DPA10103-DPB13401 DPA10103-DPB13901 DPA10103-DPB14001 DPA10103-DPB14101 DPA10103-DPB14801 DPA10103-DPB15001 DPA10103-DPB15501 DPA10103-DPB15901 DPA10104-DPB10101 DPA10104-DPB11501 DPA10105-DPB10101 DPA10105-DPB10401 DPA10105-DPB11801 DPA10105-DPB15001 DPA10106-DPB10101 DPA10201-DPB10101 DPA10201-DPB10202 DPA10201-DPB110601 DPA10201-DPB11501 DPA10201-DPB11601 DPA10201-DPB11901 DPA10202-DPB10101 DPA10202-DPB10201 DPA10202-DPB10202 DPA10202-DPB10401 DPA10202-DPB10501 DPA10202-DPB110601 DPA10202-DPB11101 DPA10202-DPB11801 DPA10202-DPB11901 DPA10202-DPB13101; note = HLAs: DPA10202-DPB13801 DPA10202-DPB15501 DPA10202-DPB16501 DPA10301-DPB10101 DPA10301-DPB10201 DPA10301-DPB10202 DPA10301-DPB10401 DPA10301-DPB10402 DPA10301-DPB110501 DPA10301-DPB110601 DPA10301-DPB11101 DPA10301-DPB11301 DPA10301-DPB11801 DPA10301-DPB12301 DPA10301-DPB13901 DPA10301-DPB14001 DPA10301-DPB14901 DPA10301-DPB15501 DPA10301-DPB16501 DPA10301-DPB17501 DPA10301-DPB18001 DPA10401-DPB10101 DPA10401-DPB10201 DPA10401-DPB10202 DPA10401-DPB10301 DPA10401-DPB10402 DPA10401-DPB10501 DPA10401-DPB110501 DPA10401-DPB11301 DPA10401-DPB113301 DPA10401-DPB11401 DPA10401-DPB14901 DQA10102-DQB10501 DQA10102-DQB10503 DQA10102-DQB10601 DQA10102-DQB10602 DQA10102-DQB10609 DQA10102-DQB10611 DQA10103-DQB10501 DQA10103-DQB10601 DQA10103-DQB10602 DQA10103-DQB10609
DQAEHLKTAVQMAVFIHNFKRKG

SEQ ID NO: 3132 - protein, 24 aa, Human immunodeficiency virus 1
  source 1..24: note = HLAs: DRB1_0101 DRB1_0404 DRB1_0410 DRB1_0701 DRB1_0801 DRB1_0802 DRB1_0804 DRB1_0806 DRB1_0809 DRB1_0813 DRB1_1001 DRB1_1101 DRB1_1102 DRB1_1103 DRB1_1104 DRB1_1301 DRB1_1304 DRB1_1305 DRB1_1406 DRB1_1501 DRB1_1601 DRB1_1602 DPA10103-DPB10101 DPA10103-DPB10201 DPA10103-DPB10202 DPA10103-DPB10401 DPA10103-DPB10501 DPA10103-DPB11101 DPA10103-DPB112601 DPA10103-DPB11501 DPA10103-DPB11601 DPA10103-DPB11801 DPA10103-DPB11901 DPA10103-DPB12301 DPA10103-DPB13101 DPA10103-DPB13401 DPA10103-DPB13901 DPA10103-DPB14001 DPA10103-DPB14101 DPA10103-DPB14801 DPA10103-DPB15001 DPA10103-DPB15501 DPA10103-DPB15901 DPA10104-DPB10101 DPA10104-DPB11501 DPA10105-DPB10101 DPA10105-DPB10401 DPA10105-DPB11801 DPA10105-DPB15001 DPA10106-DPB10101 DPA10201-DPB10101 DPA10201-DPB10202 DPA10201-DPB110601 DPA10201-DPB11501 DPA10201-DPB11601 DPA10201-DPB11901 DPA10202-DPB10101 DPA10202-DPB10201 DPA10202-DPB10202 DPA10202-DPB10401 DPA10202-DPB10501 DPA10202-DPB110601 DPA10202-DPB11101 DPA10202-DPB11801; note = HLAs: DPA10202-DPB11901 DPA10202-DPB13101 DPA10202-DPB13801 DPA10202-DPB15501 DPA10202-DPB16501 DPA10301-DPB10101 DPA10301-DPB10201 DPA10301-DPB10202 DPA10301-DPB10401 DPA10301-DPB10402 DPA10301-DPB110501 DPA10301-DPB110601 DPA10301-DPB11101 DPA10301-DPB11301 DPA10301-DPB11801 DPA10301-DPB12301 DPA10301-DPB13901 DPA10301-DPB14001 DPA10301-DPB14901 DPA10301-DPB15501 DPA10301-DPB16501 DPA10301-DPB17501 DPA10301-DPB18001 DPA10401-DPB10101 DPA10401-DPB10201 DPA10401-DPB10202 DPA10401-DPB10301 DPA10401-DPB10402 DPA10401-DPB10501 DPA10401-DPB110501 DPA10401-DPB11301 DPA10401-DPB113301 DPA10401-DPB11401 DPA10401-DPB14901 DQA10102-DQB10501 DQA10102-DQB10503 DQA10102-DQB10601 DQA10102-DQB10602 DQA10102-DQB10609 DQA10102-DQB10611 DQA10103-DQB10501 DQA10103-DQB10601 DQA10103-DQB10602 DQA10103-DQB10609
DQAEHLKTAVQMAVFIHNFKRKGG

SEQ ID NO: 3133 - protein, 25 aa, Human immunodeficiency virus 1
  source 1..25: note = HLAs: DRB1_0101 DRB1_0404 DRB1_0410 DRB1_0701 DRB1_0801 DRB1_0802 DRB1_0804 DRB1_0806 DRB1_0809 DRB1_0813 DRB1_1001 DRB1_1101 DRB1_1102 DRB1_1103 DRB1_1104 DRB1_1114 DRB1_1301 DRB1_1302 DRB1_1303 DRB1_1304 DRB1_1305 DRB1_1402 DRB1_1406 DRB1_1501 DRB1_1503 DRB1_1601 DRB1_1602 DPA10103-DPB10101 DPA10103-DPB10201 DPA10103-DPB10202 DPA10103-DPB10401 DPA10103-DPB10501 DPA10103-DPB11101 DPA10103-DPB112601 DPA10103-DPB11501 DPA10103-DPB11601 DPA10103-DPB11801 DPA10103-DPB11901 DPA10103-DPB12301 DPA10103-DPB13101 DPA10103-DPB13401 DPA10103-DPB13901 DPA10103-DPB14001 DPA10103-DPB14101 DPA10103-DPB14801 DPA10103-DPB15001 DPA10103-DPB15501 DPA10103-DPB15901 DPA10104-DPB10101 DPA10104-DPB11501 DPA10105-DPB10101 DPA10105-DPB10401 DPA10105-DPB11801 DPA10105-DPB15001 DPA10106-DPB10101 DPA10201-DPB10101 DPA10201-DPB10202 DPA10201-DPB110601 DPA10201-DPB11501 DPA10201-DPB11601 DPA10201-DPB11901 DPA10201-DPB13401 DPA10202-DPB10101 DPA10202-DPB10201 DPA10202-DPB10202 DPA10202-DPB10401 DPA10202-DPB10501; note = HLAs: DPA10202-DPB110601 DPA10202-DPB11101 DPA10202-DPB11801 DPA10202-DPB11901 DPA10202-DPB13101 DPA10202-DPB13801 DPA10202-DPB15501 DPA10202-DPB16501 DPA10301-DPB10101 DPA10301-DPB10201 DPA10301-DPB10202 DPA10301-DPB10401 DPA10301-DPB10402 DPA10301-DPB110501 DPA10301-DPB110601 DPA10301-DPB11101 DPA10301-DPB11301 DPA10301-DPB11801 DPA10301-DPB12301 DPA10301-DPB13901 DPA10301-DPB14001 DPA10301-DPB14901 DPA10301-DPB15501 DPA10301-DPB16501 DPA10301-DPB17501 DPA10301-DPB18001 DPA10401-DPB10101 DPA10401-DPB10201 DPA10401-DPB10202 DPA10401-DPB10301 DPA10401-DPB10402 DPA10401-DPB10501 DPA10401-DPB110501 DPA10401-DPB11301 DPA10401-DPB113301 DPA10401-DPB11401 DPA10401-DPB14901 DQA10102-DQB10501 DQA10102-DQB10503 DQA10102-DQB10601 DQA10102-DQB10602 DQA10102-DQB10609 DQA10102-DQB10611 DQA10103-DQB10501 DQA10103-DQB10601 DQA10103-DQB10602 DQA10103-DQB10609
DQAEHLKTAVQMAVFIHNFKRKGGI

SEQ ID NO: 3134 - protein, 13 aa, Human immunodeficiency virus 1
  source 1..13: note = HLAs: DRB1_1001 DQA10102-DQB10601 DQA10102-DQB10602 DQA10102-DQB10611 DQA10201-DQB10301 DQA10301-DQB10301 DQA10302-DQB10301 DQA10303-DQB10301 DQA10401-DQB10301 DQA10401-DQB10319 DQA10501-DQB10301 DQA10501-DQB10319 DQA10503-DQB10301 DQA10505-DQB10301 DQA10505-DQB10309 DQA10505-DQB10319 DQA10508-DQB10301 DQA10509-DQB10301 DQA10601-DQB10301
DSQYALGIIQAQP

SEQ ID NO: 3135 - protein, 14 aa, Human immunodeficiency virus 1
  source 1..14: note = HLAs: DRB1_1001 DPA10301-DPB10101 DQA10102-DQB10501 DQA10102-DQB10503 DQA10102-DQB10601 DQA10102-DQB10602 DQA10102-DQB10609 DQA10102-DQB10611 DQA10103-DQB10601 DQA10103-DQB10602 DQA10103-DQB10609 DQA10201-DQB10301 DQA10201-DQB10302 DQA10201-DQB10303 DQA10301-DQB10301 DQA10301-DQB10302 DQA10301-DQB10304 DQA10301-DQB10305 DQA10302-DQB10301 DQA10302-DQB10302 DQA10302-DQB10304 DQA10303-DQB10301 DQA10303-DQB10302 DQA10303-DQB10304 DQA10401-DQB10301 DQA10401-DQB10319 DQA10401-DQB10402 DQA10402-DQB10402 DQA10501-DQB10201 DQA10501-DQB10203 DQA10501-DQB10301 DQA10501-DQB10319 DQA10503-DQB10301 DQA10505-DQB10201 DQA10505-DQB10202 DQA10505-DQB10301 DQA10505-DQB10302 DQA10505-DQB10309 DQA10505-DQB10319 DQA10506-DQB10303 DQA10508-DQB10301 DQA10509-DQB10301 DQA10601-DQB10301
DSQYALGIIQAQPD

SEQ ID NO: 3136 - protein, 15 aa, Human immunodeficiency virus 1
  source 1..15: note = HLAs: DRB1_0101 DRB1_0102 DRB1_0401 DRB1_0404 DRB1_0405 DRB1_0408 DRB1_0410 DRB1_0901 DRB1_1001 DPA10301-DPB10101 DPA10401-DPB10101 DQA10101-DQB10601 DQA10102-DQB10501 DQA10102-DQB10503 DQA10102-DQB10601 DQA10102-DQB10602 DQA10102-DQB10609 DQA10102-DQB10610 DQA10102-DQB10611 DQA10103-DQB10501 DQA10103-DQB10601 DQA10103-DQB10602 DQA10103-DQB10609 DQA10201-DQB10301 DQA10201-DQB10302 DQA10201-DQB10303 DQA10301-DQB10301 DQA10301-DQB10304 DQA10302-DQB10301 DQA10302-DQB10304 DQA10303-DQB10301 DQA10303-DQB10304 DQA10401-DQB10301 DQA10401-DQB10319 DQA10501-DQB10201 DQA10501-DQB10203 DQA10501-DQB10301 DQA10501-DQB10319 DQA10503-DQB10301 DQA10505-DQB10201 DQA10505-DQB10202 DQA10505-DQB10301 DQA10505-DQB10302 DQA10505-DQB10309 DQA10505-DQB10319 DQA10505-DQB10402 DQA10506-DQB10303 DQA10508-DQB10301 DQA10509-DQB10301 DQA10601-DQB10301
DSQYALGIIQAQPDK

SEQ ID NO: 3137 - protein, 16 aa, Human immunodeficiency virus 1
  source 1..16: note = HLAs: DRB1_0101 DRB1_0401 DRB1_0405 DRB1_0408 DRB1_0410 DRB1_1001 DPA10301-DPB10101 DPA10401-DPB10101 DQA10101-DQB10601 DQA10102-DQB10501 DQA10102-DQB10503 DQA10102-DQB10601 DQA10102-DQB10602 DQA10102-DQB10604 DQA10102-DQB10609 DQA10102-DQB10610 DQA10102-DQB10611 DQA10103-DQB10501 DQA10103-DQB10601 DQA10103-DQB10602 DQA10103-DQB10609 DQA10201-DQB10301 DQA10201-DQB10302 DQA10201-DQB10303 DQA10301-DQB10301 DQA10301-DQB10302 DQA10301-DQB10303 DQA10301-DQB10304 DQA10301-DQB10305 DQA10302-DQB10301 DQA10302-DQB10302 DQA10302-DQB10303 DQA10302-DQB10304 DQA10303-DQB10301 DQA10303-DQB10302 DQA10303-DQB10303 DQA10303-DQB10304 DQA10401-DQB10301 DQA10401-DQB10319 DQA10401-DQB10402 DQA10402-DQB10402 DQA10501-DQB10201 DQA10501-DQB10203 DQA10501-DQB10301 DQA10501-DQB10319 DQA10503-DQB10301 DQA10505-DQB10201 DQA10505-DQB10202 DQA10505-DQB10301 DQA10505-DQB10302 DQA10505-DQB10309 DQA10505-DQB10319 DQA10505-DQB10402 DQA10506-DQB10303 DQA10508-DQB10301 DQA10509-DQB10301 DQA10601-DQB10301
DSQYALGIIQAQPDKS

SEQ ID NO: 3138 - protein, 17 aa, Human immunodeficiency virus 1
  source 1..17: note = HLAs: DRB1_0101 DRB1_0401 DRB1_0404 DRB1_0405 DRB1_0408 DRB1_0410 DRB1_1001 DPA10301-DPB10101 DPA10401-DPB10101 DQA10101-DQB10601 DQA10102-DQB10501 DQA10102-DQB10503 DQA10102-DQB10601 DQA10102-DQB10602 DQA10102-DQB10609 DQA10102-DQB10611 DQA10103-DQB10501 DQA10103-DQB10601 DQA10103-DQB10602 DQA10103-DQB10609 DQA10201-DQB10301 DQA10201-DQB10303 DQA10301-DQB10301 DQA10301-DQB10304 DQA10302-DQB10301 DQA10302-DQB10304 DQA10303-DQB10301 DQA10303-DQB10304 DQA10401-DQB10301 DQA10401-DQB10319 DQA10501-DQB10301 DQA10501-DQB10319 DQA10503-DQB10301 DQA10505-DQB10301 DQA10505-DQB10302 DQA10505-DQB10309 DQA10505-DQB10319 DQA10506-DQB10303 DQA10508-DQB10301 DQA10509-DQB10301 DQA10601-DQB10301
DSQYALGIIQAQPDKSE

SEQ ID NO: 3139 - protein, 18 aa, Human immunodeficiency virus 1
  source 1..18: note = HLAs: DRB1_1001 DQA10102-DQB10501 DQA10102-DQB10503 DQA10102-DQB10601 DQA10102-DQB10602 DQA10102-DQB10609 DQA10102-DQB10611 DQA10103-DQB10601 DQA10201-DQB10301 DQA10301-DQB10301 DQA10302-DQB10301 DQA10303-DQB10301 DQA10401-DQB10301 DQA10401-DQB10319 DQA10501-DQB10301 DQA10501-DQB10319 DQA10503-DQB10301 DQA10505-DQB10301 DQA10505-DQB10309 DQA10505-DQB10319 DQA10508-DQB10301 DQA10509-DQB10301 DQA10601-DQB10301
DSQYALGIIQAQPDKSES

SEQ ID NO: 3140 - protein, 19 aa, Human immunodeficiency virus 1
  source 1..19: note = HLAs: DRB1_0101 DRB1_0405 DRB1_0408 DRB1_0410 DRB1_1001 DPA10301-DPB10101 DPA10401-DPB10101 DQA10102-DQB10501 DQA10102-DQB10503 DQA10102-DQB10601 DQA10102-DQB10602 DQA10102-DQB10609 DQA10102-DQB10611 DQA10103-DQB10501 DQA10103-DQB10601 DQA10103-DQB10602 DQA10103-DQB10609 DQA10201-DQB10301 DQA10201-DQB10303 DQA10301-DQB10301 DQA10301-DQB10304 DQA10302-DQB10301 DQA10302-DQB10304 DQA10303-DQB10301 DQA10303-DQB10304 DQA10401-DQB10301 DQA10401-DQB10319 DQA10501-DQB10301 DQA10501-DQB10319 DQA10503-DQB10301 DQA10505-DQB10301 DQA10505-DQB10302 DQA10505-DQB10309 DQA10505-DQB10319 DQA10506-DQB10303 DQA10508-DQB10301 DQA10509-DQB10301 DQA10601-DQB10301
DSQYALGIIQAQPDKSESE

SEQ ID NO: 3141 - protein, 20 aa, Human immunodeficiency virus 1
  source 1..20: note = HLAs: DRB1_0101 DRB1_0401 DRB1_0404 DRB1_0405 DRB1_0408 DRB1_0410 DRB1_0813 DRB1_1001 DPA10103-DPB15001 DPA10105-DPB15001 DPA10301-DPB10101 DPA10301-DPB110601 DPA10301-DPB11801 DPA10301-DPB16501 DPA10401-DPB10101 DQA10101-DQB10601 DQA10102-DQB10501 DQA10102-DQB10503 DQA10102-DQB10601 DQA10102-DQB10602 DQA10102-DQB10609 DQA10102-DQB10611 DQA10103-DQB10501 DQA10103-DQB10601 DQA10103-DQB10602 DQA10103-DQB10609 DQA10201-DQB10301 DQA10201-DQB10303 DQA10301-DQB10301 DQA10302-DQB10301 DQA10303-DQB10301 DQA10401-DQB10301 DQA10401-DQB10319 DQA10501-DQB10301 DQA10501-DQB10319 DQA10503-DQB10301 DQA10505-DQB10301 DQA10505-DQB10302 DQA10505-DQB10309 DQA10505-DQB10319 DQA10505-DQB10402 DQA10506-DQB10303 DQA10508-DQB10301 DQA10509-DQB10301 DQA10601-DQB10301
DSQYALGIIQAQPDKSESEL

SEQ ID NO: 3142 - protein, 21 aa, Human immunodeficiency virus 1
  source 1..21: note = HLAs: DRB1_0101 DRB1_0401 DRB1_0404 DRB1_0405 DRB1_0408 DRB1_0410 DRB1_1001 DPA10301-DPB10101 DPA10401-DPB10101 DQA10102-DQB10501 DQA10102-DQB10503 DQA10102-DQB10601 DQA10102-DQB10602 DQA10102-DQB10609 DQA10102-DQB10611 DQA10103-DQB10501 DQA10103-DQB10601 DQA10103-DQB10609 DQA10201-DQB10301 DQA10201-DQB10303 DQA10301-DQB10301 DQA10302-DQB10301 DQA10303-DQB10301 DQA10401-DQB10301 DQA10401-DQB10319 DQA10501-DQB10301 DQA10501-DQB10319 DQA10503-DQB10301 DQA10505-DQB10301 DQA10505-DQB10309 DQA10505-DQB10319 DQA10508-DQB10301 DQA10509-DQB10301
DSQYALGIIQAQPDKSESELV

SEQ ID NO: 3143 - protein, 14 aa, Human immunodeficiency virus 1
  source 1..14: note = HLAs: DRB1_0405 DPA10103-DPB10101 DPA10103-DPB11501 DPA10103-DPB11601 DPA10103-DPB11901 DPA10103-DPB13101 DPA10104-DPB10101 DPA10104-DPB11501 DPA10105-DPB10101 DPA10202-DPB10101 DPA10202-DPB110601 DPA10202-DPB11901 DPA10202-DPB13101 DPA10301-DPB10101 DPA10301-DPB10201 DPA10301-DPB10202 DPA10301-DPB10401 DPA10301-DPB110601 DPA10301-DPB11801 DPA10301-DPB12301 DPA10301-DPB13901 DPA10301-DPB14001 DPA10301-DPB16501 DPA10401-DPB10101 DPA10401-DPB10201 DPA10401-DPB10202
DSTKWRKLVDFREL

SEQ ID NO: 3144 - protein, 15 aa, Human immunodeficiency virus 1
  source 1..15: note = HLAs: DRB1_0405 DRB1_0408 DRB1_0410 DRB1_1001 DRB1_1304 DPA10103-DPB10101 DPA10103-DPB10201 DPA10103-DPB10202 DPA10103-DPB10501 DPA10103-DPB11501 DPA10103-DPB11601 DPA10103-DPB11901 DPA10103-DPB13101 DPA10103-DPB13401 DPA10103-DPB14001 DPA10103-DPB14101 DPA10103-DPB14801 DPA10103-DPB15001 DPA10104-DPB10101 DPA10104-DPB11501 DPA10105-DPB10101 DPA10105-DPB15001 DPA10106-DPB10101 DPA10201-DPB10101 DPA10201-DPB110601 DPA10201-DPB11501 DPA10201-DPB11601 DPA10201-DPB11901 DPA10202-DPB10101 DPA10202-DPB110601 DPA10202-DPB11901 DPA10202-DPB13101 DPA10202-DPB16501 DPA10301-DPB10101 DPA10301-DPB10201 DPA10301-DPB10202 DPA10301-DPB10401 DPA10301-DPB110601 DPA10301-DPB11801 DPA10301-DPB12301 DPA10301-DPB13901 DPA10301-DPB14001 DPA10301-DPB16501 DPA10401-DPB10101 DPA10401-DPB10201 DPA10401-DPB10202 DPA10401-DPB10501
DSTKWRKLVDFRELN

SEQ ID NO: 3145 - protein, 16 aa, Human immunodeficiency virus 1
  source 1..16: note = HLAs: DRB1_0405 DRB1_0410 DRB1_1001 DPA10103-DPB10101 DPA10103-DPB10201 DPA10103-DPB10202 DPA10103-DPB10501 DPA10103-DPB11501 DPA10103-DPB11601 DPA10103-DPB11901 DPA10103-DPB13101 DPA10103-DPB13401 DPA10103-DPB14101 DPA10103-DPB14801 DPA10103-DPB15001 DPA10104-DPB10101 DPA10104-DPB11501 DPA10105-DPB10101 DPA10105-DPB15001 DPA10106-DPB10101 DPA10201-DPB10101 DPA10201-DPB110601 DPA10201-DPB11501 DPA10201-DPB11601 DPA10201-DPB11901 DPA10202-DPB10101 DPA10202-DPB10501 DPA10202-DPB110601 DPA10202-DPB11901 DPA10202-DPB13101 DPA10202-DPB13801 DPA10202-DPB15501 DPA10202-DPB16501 DPA10301-DPB10101 DPA10301-DPB10201 DPA10301-DPB10202 DPA10301-DPB10401 DPA10301-DPB110601 DPA10301-DPB11801 DPA10301-DPB12301 DPA10301-DPB13901 DPA10301-DPB14001 DPA10301-DPB15501 DPA10301-DPB16501 DPA10401-DPB10101 DPA10401-DPB10201 DPA10401-DPB10202 DPA10401-DPB10501
DSTKWRKLVDFRELNK

SEQ ID NO: 3146 - protein, 17 aa, Human immunodeficiency virus 1
  source 1..17: note = HLAs: DRB1_0405 DRB1_0410 DRB1_1001 DRB1_1304 DPA10103-DPB10101 DPA10103-DPB10201 DPA10103-DPB10202 DPA10103-DPB10501 DPA10103-DPB11501 DPA10103-DPB11601 DPA10103-DPB11901 DPA10103-DPB13101 DPA10103-DPB13401 DPA10103-DPB14001 DPA10103-DPB14101 DPA10103-DPB14801 DPA10103-DPB15001 DPA10104-DPB10101 DPA10104-DPB11501 DPA10105-DPB10101 DPA10105-DPB15001 DPA10106-DPB10101 DPA10201-DPB10101 DPA10201-DPB110601 DPA10201-DPB11501 DPA10201-DPB11601 DPA10201-DPB11901 DPA10201-DPB13401 DPA10202-DPB10101 DPA10202-DPB10201 DPA10202-DPB10202 DPA10202-DPB10501 DPA10202-DPB110601 DPA10202-DPB11901 DPA10202-DPB13101 DPA10202-DPB13801 DPA10202-DPB15501 DPA10202-DPB16501 DPA10301-DPB10101 DPA10301-DPB10201 DPA10301-DPB10202 DPA10301-DPB10401 DPA10301-DPB10402 DPA10301-DPB110501 DPA10301-DPB110601 DPA10301-DPB11801 DPA10301-DPB12301 DPA10301-DPB13901 DPA10301-DPB14001 DPA10301-DPB14901 DPA10301-DPB15501 DPA10301-DPB16501 DPA10301-DPB18001 DPA10401-DPB10101 DPA10401-DPB10201 DPA10401-DPB10202; note = HLAs: DPA10401-DPB10501
DSTKWRKLVDFRELNKR

SEQ ID NO: 3147 - protein, 18 aa, Human immunodeficiency virus 1
  source 1..18: note = HLAs: DPA10103-DPB10101 DPA10103-DPB11501 DPA10103-DPB11601 DPA10103-DPB11901 DPA10103-DPB13101 DPA10104-DPB10101 DPA10104-DPB11501 DPA10105-DPB10101 DPA10201-DPB110601 DPA10201-DPB11501 DPA10201-DPB11601 DPA10201-DPB11901 DPA10202-DPB10101 DPA10202-DPB110601 DPA10202-DPB11901 DPA10202-DPB13101 DPA10301-DPB10101 DPA10301-DPB10201 DPA10301-DPB10202 DPA10301-DPB10401 DPA10301-DPB110601 DPA10301-DPB11801 DPA10301-DPB12301 DPA10301-DPB13901 DPA10301-DPB14001 DPA10301-DPB16501 DPA10401-DPB10101 DPA10401-DPB10201 DPA10401-DPB10202 DPA10401-DPB10501
DSTKWRKLVDFRELNKRT

SEQ ID NO: 3148 - protein, 19 aa, Human immunodeficiency virus 1
  source 1..19: note = HLAs: DRB1_0405 DRB1_0410 DRB1_0806 DRB1_1001 DRB1_1101 DRB1_1103 DRB1_1104 DRB1_1304 DRB1_1305 DPA10103-DPB10101 DPA10103-DPB10201 DPA10103-DPB10202 DPA10103-DPB10501 DPA10103-DPB11501 DPA10103-DPB11601 DPA10103-DPB11901 DPA10103-DPB13101 DPA10103-DPB13401 DPA10103-DPB14001 DPA10103-DPB14101 DPA10103-DPB14801 DPA10103-DPB15001 DPA10104-DPB10101 DPA10104-DPB11501 DPA10105-DPB10101 DPA10105-DPB15001 DPA10106-DPB10101 DPA10201-DPB10101 DPA10201-DPB110601 DPA10201-DPB11501 DPA10201-DPB11601 DPA10201-DPB11901 DPA10202-DPB10101 DPA10202-DPB10202 DPA10202-DPB10501 DPA10202-DPB110601 DPA10202-DPB11901 DPA10202-DPB13101 DPA10202-DPB13801 DPA10202-DPB16501 DPA10301-DPB10101 DPA10301-DPB10201 DPA10301-DPB10202 DPA10301-DPB10401 DPA10301-DPB110601 DPA10301-DPB11801 DPA10301-DPB12301 DPA10301-DPB13901 DPA10301-DPB14001 DPA10301-DPB15501 DPA10301-DPB16501 DPA10401-DPB10101 DPA10401-DPB10201 DPA10401-DPB10202 DPA10401-DPB10501
DSTKWRKLVDFRELNKRTQ

SEQ ID NO: 3149 - protein, 20 aa, Human immunodeficiency virus 1
  source 1..20: note = HLAs: DRB1_0405 DRB1_0410 DRB1_0801 DRB1_0806 DRB1_1001 DRB1_1101 DRB1_1103 DRB1_1104 DRB1_1304 DRB1_1305 DPA10103-DPB10101 DPA10103-DPB10201 DPA10103-DPB10202 DPA10103-DPB10501 DPA10103-DPB10601 DPA10103-DPB11101 DPA10103-DPB11501 DPA10103-DPB11601 DPA10103-DPB11801 DPA10103-DPB11901 DPA10103-DPB13101 DPA10103-DPB13401 DPA10103-DPB14001 DPA10103-DPB14101 DPA10103-DPB14801 DPA10103-DPB15001 DPA10103-DPB15501 DPA10104-DPB10101 DPA10104-DPB11501 DPA10105-DPB10101 DPA10105-DPB11801 DPA10105-DPB15001 DPA10106-DPB10101 DPA10201-DPB10101 DPA10201-DPB10501 DPA10201-DPB110601 DPA10201-DPB11501 DPA10201-DPB11601 DPA10201-DPB11901 DPA10201-DPB13401 DPA10202-DPB10101 DPA10202-DPB10201 DPA10202-DPB10202 DPA10202-DPB10501 DPA10202-DPB110601 DPA10202-DPB11101 DPA10202-DPB11801 DPA10202-DPB11901 DPA10202-DPB13101 DPA10202-DPB13801 DPA10202-DPB15501 DPA10202-DPB16501 DPA10301-DPB10101 DPA10301-DPB10201 DPA10301-DPB10202 DPA10301-DPB10401 DPA10301-DPB10402 DPA10301-DPB110501 DPA10301-DPB110601; note = HLAs: DPA10301-DPB11101 DPA10301-DPB11801 DPA10301-DPB12301 DPA10301-DPB13901 DPA10301-DPB14001 DPA10301-DPB14901 DPA10301-DPB15501 DPA10301-DPB16501 DPA10301-DPB18001 DPA10401-DPB10101 DPA10401-DPB10201 DPA10401-DPB10202 DPA10401-DPB10501 DQA10102-DQB10501
DSTKWRKLVDFRELNKRTQD

SEQ ID NO: 3150 - protein, 21 aa, Human immunodeficiency virus 1
  source 1..21: note = HLAs: DRB1_0405 DRB1_0410 DRB1_0801 DRB1_0806 DRB1_1001 DRB1_1101 DRB1_1103 DRB1_1104 DRB1_1304 DRB1_1305 DPA10103-DPB10101 DPA10103-DPB10201 DPA10103-DPB10202 DPA10103-DPB10501 DPA10103-DPB11501 DPA10103-DPB11601 DPA10103-DPB11901 DPA10103-DPB13101 DPA10103-DPB13401 DPA10103-DPB14001 DPA10103-DPB14101 DPA10103-DPB14801 DPA10103-DPB15001 DPA10104-DPB10101 DPA10104-DPB11501 DPA10105-DPB10101 DPA10105-DPB15001 DPA10106-DPB10101 DPA10201-DPB10101 DPA10201-DPB10501 DPA10201-DPB110601 DPA10201-DPB11501 DPA10201-DPB11601 DPA10201-DPB11901 DPA10202-DPB10101 DPA10202-DPB10501 DPA10202-DPB110601 DPA10202-DPB11901 DPA10202-DPB13101 DPA10202-DPB13801 DPA10202-DPB16501 DPA10301-DPB10101 DPA10301-DPB10201 DPA10301-DPB10202 DPA10301-DPB10401 DPA10301-DPB110601 DPA10301-DPB11801 DPA10301-DPB12301 DPA10301-DPB13901 DPA10301-DPB14001 DPA10301-DPB16501 DPA10401-DPB10101 DPA10401-DPB10201 DPA10401-DPB10202 DPA10401-DPB10501
DSTKWRKLVDFRELNKRTQDF

SEQ ID NO: 3151 - protein, 22 aa, Human immunodeficiency virus 1
  source 1..22: note = HLAs: DRB1_0405 DRB1_0410 DRB1_0801 DRB1_0806 DRB1_1001 DRB1_1101 DRB1_1103 DRB1_1104 DRB1_1304 DRB1_1305 DPA10103-DPB10101 DPA10103-DPB10201 DPA10103-DPB10202 DPA10103-DPB10501 DPA10103-DPB11501 DPA10103-DPB11601 DPA10103-DPB11901 DPA10103-DPB13101 DPA10103-DPB13401 DPA10103-DPB14001 DPA10103-DPB14101 DPA10103-DPB14801 DPA10103-DPB15001 DPA10104-DPB10101 DPA10104-DPB11501 DPA10105-DPB10101 DPA10105-DPB15001 DPA10106-DPB10101 DPA10201-DPB10101 DPA10201-DPB10501 DPA10201-DPB110601 DPA10201-DPB11501 DPA10201-DPB11601 DPA10201-DPB11901 DPA10202-DPB10101 DPA10202-DPB10501 DPA10202-DPB110601 DPA10202-DPB11901 DPA10202-DPB13101 DPA10202-DPB13801 DPA10202-DPB16501 DPA10301-DPB10101 DPA10301-DPB10201 DPA10301-DPB10202 DPA10301-DPB10401 DPA10301-DPB110601 DPA10301-DPB11801 DPA10301-DPB12301 DPA10301-DPB13901 DPA10301-DPB14001 DPA10301-DPB16501 DPA10401-DPB10101 DPA10401-DPB10201 DPA10401-DPB10202 DPA10401-DPB10501
DSTKWRKLVDFRELNKRTQDFW

SEQ ID NO: 3152 - protein, 23 aa, Human immunodeficiency virus 1
  source 1..23: note = HLAs: DRB1_0405 DRB1_0410 DRB1_0801 DRB1_0806 DRB1_1001 DRB1_1101 DRB1_1103 DRB1_1104 DRB1_1304 DRB1_1305 DPA10103-DPB10101 DPA10103-DPB10201 DPA10103-DPB10202 DPA10103-DPB10501 DPA10103-DPB11501 DPA10103-DPB11601 DPA10103-DPB11901 DPA10103-DPB13101 DPA10103-DPB13401 DPA10103-DPB14001 DPA10103-DPB14101 DPA10103-DPB14801 DPA10103-DPB15001 DPA10104-DPB10101 DPA10104-DPB11501 DPA10105-DPB10101 DPA10105-DPB15001 DPA10106-DPB10101 DPA10201-DPB10101 DPA10201-DPB10501 DPA10201-DPB110601 DPA10201-DPB11501 DPA10201-DPB11601 DPA10201-DPB11901 DPA10202-DPB10101 DPA10202-DPB10501 DPA10202-DPB110601 DPA10202-DPB11901 DPA10202-DPB13101 DPA10202-DPB13801 DPA10202-DPB16501 DPA10301-DPB10101 DPA10301-DPB10201 DPA10301-DPB10202 DPA10301-DPB10401 DPA10301-DPB110601 DPA10301-DPB11801 DPA10301-DPB12301 DPA10301-DPB13901 DPA10301-DPB14001 DPA10301-DPB16501 DPA10401-DPB10101 DPA10401-DPB10201 DPA10401-DPB10202 DPA10401-DPB10501
DSTKWRKLVDFRELNKRTQDFWE

SEQ ID NO: 3153 - protein, 24 aa, Human immunodeficiency virus 1
  source 1..24: note = HLAs: DRB1_0405 DRB1_0410 DRB1_0801 DRB1_0806 DRB1_1001 DRB1_1101 DRB1_1103 DRB1_1104 DRB1_1304 DRB1_1305 DPA10103-DPB10101 DPA10103-DPB10201 DPA10103-DPB10202 DPA10103-DPB10501 DPA10103-DPB11501 DPA10103-DPB11601 DPA10103-DPB11901 DPA10103-DPB13101 DPA10103-DPB13401 DPA10103-DPB14001 DPA10103-DPB14101 DPA10103-DPB14801 DPA10103-DPB15001 DPA10104-DPB10101 DPA10104-DPB11501 DPA10105-DPB10101 DPA10105-DPB15001 DPA10106-DPB10101 DPA10201-DPB10101 DPA10201-DPB10501 DPA10201-DPB110601 DPA10201-DPB11501 DPA10201-DPB11601 DPA10201-DPB11901 DPA10202-DPB10101 DPA10202-DPB10501 DPA10202-DPB110601 DPA10202-DPB11901 DPA10202-DPB13101 DPA10202-DPB13801 DPA10202-DPB16501 DPA10301-DPB10101 DPA10301-DPB10201 DPA10301-DPB10202 DPA10301-DPB10401 DPA10301-DPB10402 DPA10301-DPB110501 DPA10301-DPB110601 DPA10301-DPB11801 DPA10301-DPB12301 DPA10301-DPB13901 DPA10301-DPB14001 DPA10301-DPB14901 DPA10301-DPB15501 DPA10301-DPB16501 DPA10301-DPB18001 DPA10401-DPB10101 DPA10401-DPB10201 DPA10401-DPB10202; note = HLAs: DPA10401-DPB10501
DSTKWRKLVDFRELNKRTQDFWEV

SEQ ID NO: 3154 - protein, 25 aa, Human immunodeficiency virus 1
  source 1..25: note = HLAs: DRB1_0405 DRB1_0410 DRB1_0801 DRB1_0806 DRB1_1001 DRB1_1101 DRB1_1103 DRB1_1104 DRB1_1304 DRB1_1305 DPA10103-DPB10101 DPA10103-DPB10201 DPA10103-DPB10202 DPA10103-DPB10501 DPA10103-DPB11501 DPA10103-DPB11601 DPA10103-DPB11901 DPA10103-DPB13101 DPA10103-DPB13401 DPA10103-DPB14001 DPA10103-DPB14101 DPA10103-DPB14801 DPA10103-DPB15001 DPA10104-DPB10101 DPA10104-DPB11501 DPA10105-DPB10101 DPA10105-DPB15001 DPA10106-DPB10101 DPA10201-DPB10101 DPA10201-DPB10501 DPA10201-DPB110601 DPA10201-DPB11501 DPA10201-DPB11601 DPA10201-DPB11901 DPA10202-DPB10101 DPA10202-DPB10202 DPA10202-DPB10501 DPA10202-DPB110601 DPA10202-DPB11901 DPA10202-DPB13101 DPA10202-DPB13801 DPA10202-DPB16501 DPA10301-DPB10101 DPA10301-DPB10201 DPA10301-DPB10202 DPA10301-DPB10401 DPA10301-DPB10402 DPA10301-DPB110501 DPA10301-DPB110601 DPA10301-DPB11801 DPA10301-DPB12301 DPA10301-DPB13901 DPA10301-DPB14001 DPA10301-DPB14901 DPA10301-DPB15501 DPA10301-DPB16501 DPA10301-DPB18001 DPA10401-DPB10101 DPA10401-DPB10201; note = HLAs: DPA10401-DPB10202 DPA10401-DPB10501 DQA10102-DQB10501
DSTKWRKLVDFRELNKRTQDFWEVQ

SEQ ID NO: 3155 - protein, 13 aa, Human immunodeficiency virus 1
  source 1..13: note = HLAs: DRB1_1114 DRB1_1302
DSWTVNDIQKLVG

SEQ ID NO: 3156 - protein, 14 aa, Human immunodeficiency virus 1
  source 1..14: note = HLAs: DRB1_1114 DRB1_1302 DPA10301-DPB10201
DSWTVNDIQKLVGK

SEQ ID NO: 3157 - protein, 15 aa, Human immunodeficiency virus 1
  source 1..15: note = HLAs: DRB1_0101 DRB1_0804 DRB1_0806 DRB1_1101 DRB1_1102 DRB1_1103 DRB1_1104 DRB1_1114 DRB1_1301 DRB1_1302 DRB1_1304 DRB1_1305 DRB1_1402 DRB1_1406 DPA10301-DPB10201 DQA10102-DQB10501
DSWTVNDIQKLVGKL

SEQ ID NO: 3158 - protein, 16 aa, Human immunodeficiency virus 1
  source 1..16: note = HLAs: DRB1_0101 DRB1_1001 DRB1_1104 DRB1_1114 DRB1_1302 DPA10301-DPB10201 DPA10301-DPB10202 DQA10102-DQB10501
DSWTVNDIQKLVGKLN

SEQ ID NO: 3159 - protein, 17 aa, Human immunodeficiency virus 1
  source 1..17: note = HLAs: DRB1_0101 DRB1_0102 DRB1_0806 DRB1_1001 DRB1_1101 DRB1_1104 DRB1_1114 DRB1_1302 DRB1_1304 DRB1_1305 DRB1_1406 DPA10301-DPB10201 DQA10102-DQB10501
DSWTVNDIQKLVGKLNW

SEQ ID NO: 3160 - protein, 19 aa, Human immunodeficiency virus 1
  source 1..19: note = HLAs: DRB1_0101 DRB1_0102 DRB1_0804 DRB1_0806 DRB1_1001 DRB1_1104 DRB1_1114 DRB1_1302 DRB1_1304 DRB1_1406 DPA10301-DPB10201 DPA10301-DPB10202 DQA10102-DQB10501
DSWTVNDIQKLVGKLNWAS

SEQ ID NO: 3161 - protein, 20 aa, Human immunodeficiency virus 1
  source 1..20: note = HLAs: DRB1_0101 DRB1_0102 DRB1_0801 DRB1_0802 DRB1_0804 DRB1_0806 DRB1_0809 DRB1_0813 DRB1_1001 DRB1_1101 DRB1_1102 DRB1_1103 DRB1_1104 DRB1_1114 DRB1_1301 DRB1_1302 DRB1_1304 DRB1_1305 DRB1_1402 DRB1_1406 DRB1_1501 DRB1_1601 DRB1_1602 DPA10202-DPB10101 DPA10202-DPB110601 DPA10202-DPB11901 DPA10301-DPB10101 DPA10301-DPB10201 DPA10301-DPB10202 DPA10301-DPB110601 DPA10301-DPB11801 DPA10301-DPB14001 DPA10401-DPB10101 DPA10401-DPB10201 DPA10401-DPB10202 DQA10102-DQB10501 DQA10103-DQB10501
DSWTVNDIQKLVGKLNWASQ

SEQ ID NO: 3162 - protein, 21 aa, Human immunodeficiency virus 1
  source 1..21: note = HLAs: DRB1_0101 DRB1_0102 DRB1_0801 DRB1_0804 DRB1_0806 DRB1_0813 DRB1_1001 DRB1_1101 DRB1_1102 DRB1_1103 DRB1_1104 DRB1_1114 DRB1_1301 DRB1_1302 DRB1_1304 DRB1_1305 DRB1_1406 DRB1_1501 DPA10301-DPB10101 DPA10301-DPB10201 DPA10301-DPB10202 DPA10401-DPB10101 DQA10102-DQB10501 DQA10103-DQB10501
DSWTVNDIQKLVGKLNWASQI

SEQ ID NO: 3163 - protein, 22 aa, Human immunodeficiency virus 1
  source 1..22: note = HLAs: DRB1_0101 DRB1_0102 DRB1_0801 DRB1_0802 DRB1_0804 DRB1_0806 DRB1_0809 DRB1_0813 DRB1_1001 DRB1_1101 DRB1_1102 DRB1_1103 DRB1_1104 DRB1_1114 DRB1_1301 DRB1_1302 DRB1_1304 DRB1_1305 DRB1_1402 DRB1_1406 DRB1_1501 DPA10301-DPB10101 DPA10301-DPB10201 DPA10301-DPB10202 DPA10301-DPB11801 DPA10401-DPB10101 DQA10102-DQB10501 DQA10103-DQB10501
DSWTVNDIQKLVGKLNWASQIY

SEQ ID NO: 3164 - protein, 15 aa, Human immunodeficiency virus 1
  source 1..15: note = HLAs: DRB1_0405 DRB1_0410 DRB1_1114 DRB1_1302
DTLLVQNANPDCKTI

SEQ ID NO: 3165 - protein, 14 aa, Human immunodeficiency virus 1
  source 1..14: note = HLAs: DRB1_0101 DQA10102-DQB10501
EAELELAENREILK

SEQ ID NO: 3166 - protein, 15 aa, Human immunodeficiency virus 1
  source 1..15: note = HLAs: DRB1_0101 DRB1_0102 DRB1_0701 DRB1_0901 DRB1_1001 DRB1_1114 DRB1_1302 DRB1_1501 DQA10102-DQB10501 DQA10102-DQB10609
EAELELAENREILKE

SEQ ID NO: 3167 - protein, 16 aa, Human immunodeficiency virus 1
  source 1..16: note = HLAs: DRB1_0101 DQA10102-DQB10501 DQA10102-DQB10609 DQA10103-DQB10501
EAELELAENREILKEP

SEQ ID NO: 3168 - protein, 17 aa, Human immunodeficiency virus 1
  source 1..17: note = HLAs: DRB1_0101 DQA10102-DQB10501
EAELELAENREILKEPV

SEQ ID NO: 3169 - protein, 18 aa, Human immunodeficiency virus 1
  source 1..18: note = HLAs: DQA10102-DQB10501
EAELELAENREILKEPVH

SEQ ID NO: 3170 - protein, 19 aa, Human immunodeficiency virus 1
  source 1..19: note = HLAs: DQA10102-DQB10501
EAELELAENREILKEPVHG

SEQ ID NO: 3171 - protein, 14 aa, Human immunodeficiency virus 1
  source 1..14: note = HLAs: DPA10202-DPB10101 DPA10301-DPB10101 DPA10301-DPB10201 DPA10301-DPB10202 DPA10301-DPB10401 DPA10301-DPB12301 DPA10301-DPB13901 DPA10401-DPB10101 DQA10102-DQB10501
EEKAFSPEVIPMFS

SEQ ID NO: 3172 - protein, 15 aa, Human immunodeficiency virus 1
  source 1..15: note = HLAs: DRB1_0101 DRB1_1001 DPA10103-DPB10101 DPA10103-DPB11501 DPA10104-DPB10101 DPA10104-DPB11501 DPA10105-DPB10101 DPA10202-DPB10101 DPA10301-DPB10101 DPA10301-DPB10201 DPA10301-DPB10202 DPA10301-DPB10401 DPA10301-DPB110601 DPA10301-DPB11801 DPA10301-DPB12301 DPA10301-DPB13901 DPA10301-DPB14001 DPA10301-DPB16501 DPA10401-DPB10101 DPA10401-DPB10201 DQA10102-DQB10501 DQA10102-DQB10609 DQA10201-DQB10301 DQA10201-DQB10303 DQA10505-DQB10402
EEKAFSPEVIPMFSA

SEQ ID NO: 3173 - protein, 16 aa, Human immunodeficiency virus 1
  source 1..16: note = HLAs: DRB1_1001 DPA10103-DPB10101 DPA10103-DPB11501 DPA10103-DPB13101 DPA10103-DPB15001 DPA10104-DPB10101 DPA10104-DPB11501 DPA10105-DPB10101 DPA10105-DPB15001 DPA10106-DPB10101 DPA10201-DPB10101 DPA10201-DPB11501 DPA10202-DPB10101 DPA10202-DPB13101 DPA10301-DPB10101 DPA10301-DPB10201 DPA10301-DPB10202 DPA10301-DPB10401 DPA10301-DPB10402 DPA10301-DPB110501 DPA10301-DPB110601 DPA10301-DPB11801 DPA10301-DPB12301 DPA10301-DPB13901 DPA10301-DPB14001 DPA10301-DPB14901 DPA10301-DPB16501 DPA10301-DPB18001 DPA10401-DPB10101 DPA10401-DPB10201 DPA10401-DPB10202 DPA10401-DPB10501 DQA10102-DQB10501 DQA10102-DQB10503 DQA10102-DQB10609 DQA10103-DQB10501
EEKAFSPEVIPMFSAL

SEQ ID NO: 3174 - protein, 17 aa, Human immunodeficiency virus 1
  source 1..17: note = HLAs: DRB1_0101 DRB1_0102 DRB1_0401 DRB1_0404 DRB1_0405 DRB1_0408 DRB1_0410 DRB1_0901 DRB1_1001 DRB1_1602 DPA10103-DPB10101 DPA10103-DPB11501 DPA10103-DPB13101 DPA10103-DPB13401 DPA10103-DPB15001 DPA10104-DPB10101 DPA10104-DPB11501 DPA10105-DPB10101 DPA10105-DPB15001 DPA10106-DPB10101 DPA10201-DPB10101 DPA10201-DPB11501 DPA10202-DPB10101 DPA10202-DPB10202 DPA10202-DPB13101 DPA10301-DPB10101 DPA10301-DPB10201 DPA10301-DPB10202 DPA10301-DPB10401 DPA10301-DPB10402 DPA10301-DPB110501 DPA10301-DPB110601 DPA10301-DPB11801 DPA10301-DPB12301 DPA10301-DPB13901 DPA10301-DPB14001 DPA10301-DPB14901 DPA10301-DPB16501 DPA10301-DPB17501 DPA10301-DPB18001 DPA10401-DPB10101 DPA10401-DPB10201 DPA10401-DPB10202 DPA10401-DPB10501 DQA10102-DQB10501 DQA10102-DQB10503 DQA10102-DQB10609 DQA10103-DQB10501 DQA10103-DQB10609 DQA10201-DQB10303 DQA10505-DQB10402
EEKAFSPEVIPMFSALS

SEQ ID NO: 3175 - protein, 18 aa, Human immunodeficiency virus 1
  source 1..18: note = HLAs: DRB1_0404 DRB1_0408 DRB1_1001 DPA10103-DPB10101 DPA10103-DPB11501 DPA10104-DPB10101 DPA10104-DPB11501 DPA10105-DPB10101 DPA10202-DPB10101 DPA10301-DPB10101 DPA10301-DPB10201 DPA10301-DPB10202 DPA10301-DPB10401 DPA10301-DPB11801 DPA10301-DPB12301 DPA10301-DPB13901 DPA10301-DPB14001 DPA10301-DPB16501 DPA10401-DPB10101 DQA10102-DQB10501 DQA10102-DQB10503 DQA10103-DQB10501
EEKAFSPEVIPMFSALSE

SEQ ID NO: 3176 - protein, 19 aa, Human immunodeficiency virus 1
  source 1..19: note = HLAs: DRB1_0101 DRB1_0102 DRB1_0401 DRB1_0404 DRB1_0405 DRB1_0408 DRB1_0410 DRB1_1001 DRB1_1602 DPA10103-DPB10101 DPA10103-DPB11501 DPA10103-DPB13101 DPA10103-DPB15001 DPA10104-DPB10101 DPA10104-DPB11501 DPA10105-DPB10101 DPA10105-DPB15001 DPA10106-DPB10101 DPA10201-DPB10101 DPA10201-DPB11501 DPA10202-DPB10101 DPA10202-DPB10202 DPA10202-DPB13101 DPA10301-DPB10101 DPA10301-DPB10201 DPA10301-DPB10202 DPA10301-DPB10401 DPA10301-DPB10402 DPA10301-DPB110501 DPA10301-DPB110601 DPA10301-DPB11801 DPA10301-DPB12301 DPA10301-DPB13901 DPA10301-DPB14001 DPA10301-DPB14901 DPA10301-DPB16501 DPA10301-DPB18001 DPA10401-DPB10101 DPA10401-DPB10201 DPA10401-DPB10202 DPA10401-DPB10501 DQA10102-DQB10501 DQA10102-DQB10503 DQA10102-DQB10609 DQA10103-DQB10501 DQA10103-DQB10609 DQA10201-DQB10303 DQA10505-DQB10402
EEKAFSPEVIPMFSALSEG

SEQ ID NO: 3177 - protein, 20 aa, Human immunodeficiency virus 1
  source 1..20: note = HLAs: DRB1_0101 DRB1_0102 DRB1_0401 DRB1_0404 DRB1_0405 DRB1_0408 DRB1_0410 DRB1_0801 DRB1_0802 DRB1_0804 DRB1_0806 DRB1_0809 DRB1_0813 DRB1_0901 DRB1_1001 DRB1_1104 DRB1_1406 DRB1_1501 DRB1_1502 DRB1_1503 DRB1_1601 DRB1_1602 DPA10103-DPB10101 DPA10103-DPB10201 DPA10103-DPB11501 DPA10103-DPB11601 DPA10103-DPB13101 DPA10103-DPB13401 DPA10103-DPB14801 DPA10103-DPB15001 DPA10104-DPB10101 DPA10104-DPB11501 DPA10105-DPB10101 DPA10105-DPB15001 DPA10106-DPB10101 DPA10201-DPB10101 DPA10201-DPB11501 DPA10202-DPB10101 DPA10202-DPB10201 DPA10202-DPB10202 DPA10202-DPB10401 DPA10202-DPB10501 DPA10202-DPB110601 DPA10202-DPB11901 DPA10202-DPB13101 DPA10202-DPB13801 DPA10202-DPB15501 DPA10202-DPB16501 DPA10301-DPB10101 DPA10301-DPB10201 DPA10301-DPB10202 DPA10301-DPB10401 DPA10301-DPB10402 DPA10301-DPB110501 DPA10301-DPB110601 DPA10301-DPB11101 DPA10301-DPB11801 DPA10301-DPB12301 DPA10301-DPB13901 DPA10301-DPB14001 DPA10301-DPB14901 DPA10301-DPB15501 DPA10301-DPB16501 DPA10301-DPB17501; note = HLAs: DPA10301-DPB18001 DPA10401-DPB10101 DPA10401-DPB10201 DPA10401-DPB10202 DPA10401-DPB10301 DPA10401-DPB10501 DPA10401-DPB11401 DQA10102-DQB10501 DQA10102-DQB10503 DQA10102-DQB10601 DQA10102-DQB10609 DQA10103-DQB10501 DQA10103-DQB10503 DQA10103-DQB10601 DQA10103-DQB10609 DQA10201-DQB10301 DQA10201-DQB10303 DQA10501-DQB10301 DQA10501-DQB10319 DQA10503-DQB10301 DQA10505-DQB10301 DQA10505-DQB10309 DQA10505-DQB10319 DQA10505-DQB10402 DQA10506-DQB10303 DQA10508-DQB10301 DQA10509-DQB10301 DQA10601-DQB10301
EEKAFSPEVIPMFSALSEGA

SEQ ID NO: 3178 - protein, 21 aa, Human immunodeficiency virus 1
  source 1..21: note = HLAs: DRB1_0101 DRB1_0102 DRB1_0401 DRB1_0404 DRB1_0405 DRB1_0408 DRB1_0410 DRB1_0802 DRB1_0804 DRB1_0809 DRB1_0813 DRB1_0901 DRB1_1001 DRB1_1104 DRB1_1406 DRB1_1501 DRB1_1601 DRB1_1602 DPA10103-DPB10101 DPA10103-DPB11501 DPA10103-DPB15001 DPA10104-DPB10101 DPA10104-DPB11501 DPA10105-DPB10101 DPA10105-DPB15001 DPA10202-DPB10101 DPA10301-DPB10101 DPA10301-DPB10201 DPA10301-DPB10202 DPA10301-DPB10401 DPA10301-DPB10402 DPA10301-DPB110501 DPA10301-DPB110601 DPA10301-DPB11801 DPA10301-DPB12301 DPA10301-DPB13901 DPA10301-DPB14001 DPA10301-DPB14901 DPA10301-DPB16501 DPA10301-DPB18001 DPA10401-DPB10101 DPA10401-DPB10201 DPA10401-DPB10202 DPA10401-DPB10501 DQA10102-DQB10501 DQA10102-DQB10503 DQA10102-DQB10601 DQA10102-DQB10609 DQA10103-DQB10501 DQA10103-DQB10601 DQA10103-DQB10609 DQA10201-DQB10301 DQA10201-DQB10303 DQA10505-DQB10402
EEKAFSPEVIPMFSALSEGAT

SEQ ID NO: 3179 - protein, 22 aa, Human immunodeficiency virus 1
  source 1..22: note = HLAs: DRB1_0101 DRB1_0102 DRB1_0401 DRB1_0404 DRB1_0405 DRB1_0408 DRB1_0410 DRB1_0802 DRB1_0804 DRB1_0809 DRB1_0813 DRB1_0901 DRB1_1001 DRB1_1104 DRB1_1406 DRB1_1501 DRB1_1601 DRB1_1602 DPA10103-DPB10101 DPA10103-DPB11501 DPA10103-DPB15001 DPA10104-DPB10101 DPA10104-DPB11501 DPA10105-DPB10101 DPA10105-DPB15001 DPA10202-DPB10101 DPA10301-DPB10101 DPA10301-DPB10201 DPA10301-DPB10202 DPA10301-DPB10401 DPA10301-DPB10402 DPA10301-DPB110501 DPA10301-DPB110601 DPA10301-DPB11801 DPA10301-DPB12301 DPA10301-DPB13901 DPA10301-DPB14001 DPA10301-DPB14901 DPA10301-DPB16501 DPA10301-DPB18001 DPA10401-DPB10101 DPA10401-DPB10201 DPA10401-DPB10202 DPA10401-DPB10501 DQA10102-DQB10501 DQA10102-DQB10503 DQA10102-DQB10601 DQA10102-DQB10609 DQA10103-DQB10501 DQA10103-DQB10601 DQA10103-DQB10609 DQA10201-DQB10301 DQA10201-DQB10303 DQA10505-DQB10402 DQA10506-DQB10303
EEKAFSPEVIPMFSALSEGATP

SEQ ID NO: 3180 - protein, 23 aa, Human immunodeficiency virus 1
  source 1..23: note = HLAs: DRB1_0101 DRB1_0102 DRB1_0401 DRB1_0404 DRB1_0405 DRB1_0408 DRB1_0410 DRB1_0802 DRB1_0804 DRB1_0806 DRB1_0809 DRB1_0813 DRB1_0901 DRB1_1001 DRB1_1104 DRB1_1406 DRB1_1501 DRB1_1601 DRB1_1602 DPA10103-DPB10101 DPA10103-DPB11501 DPA10103-DPB13101 DPA10103-DPB15001 DPA10104-DPB10101 DPA10104-DPB11501 DPA10105-DPB10101 DPA10105-DPB15001 DPA10202-DPB10101 DPA10301-DPB10101 DPA10301-DPB10201 DPA10301-DPB10202 DPA10301-DPB10401 DPA10301-DPB10402 DPA10301-DPB110501 DPA10301-DPB110601 DPA10301-DPB11801 DPA10301-DPB12301 DPA10301-DPB13901 DPA10301-DPB14001 DPA10301-DPB14901 DPA10301-DPB16501 DPA10301-DPB18001 DPA10401-DPB10101 DPA10401-DPB10201 DPA10401-DPB10202 DPA10401-DPB10501 DQA10102-DQB10501 DQA10102-DQB10503 DQA10102-DQB10601 DQA10102-DQB10609 DQA10103-DQB10501 DQA10103-DQB10601 DQA10103-DQB10609 DQA10201-DQB10301 DQA10201-DQB10303 DQA10501-DQB10301 DQA10501-DQB10319 DQA10503-DQB10301 DQA10505-DQB10301 DQA10505-DQB10309 DQA10505-DQB10319 DQA10505-DQB10402 DQA10506-DQB10303; note = HLAs: DQA10508-DQB10301 DQA10509-DQB10301
EEKAFSPEVIPMFSALSEGATPQ

SEQ ID NO: 3181 - protein, 24 aa, Human immunodeficiency virus 1
  source 1..24: note = HLAs: DRB1_0101 DRB1_0102 DRB1_0401 DRB1_0404 DRB1_0405 DRB1_0408 DRB1_0410 DRB1_0802 DRB1_0804 DRB1_0806 DRB1_0809 DRB1_0813 DRB1_0901 DRB1_1001 DRB1_1104 DRB1_1406 DRB1_1501 DRB1_1601 DRB1_1602 DPA10103-DPB10101 DPA10103-DPB11501 DPA10103-DPB13101 DPA10103-DPB15001 DPA10104-DPB10101 DPA10104-DPB11501 DPA10105-DPB10101 DPA10105-DPB15001 DPA10202-DPB10101 DPA10301-DPB10101 DPA10301-DPB10201 DPA10301-DPB10202 DPA10301-DPB10401 DPA10301-DPB10402 DPA10301-DPB110501 DPA10301-DPB110601 DPA10301-DPB11801 DPA10301-DPB12301 DPA10301-DPB13901 DPA10301-DPB14001 DPA10301-DPB14901 DPA10301-DPB16501 DPA10301-DPB18001 DPA10401-DPB10101 DPA10401-DPB10201 DPA10401-DPB10202 DPA10401-DPB10501 DQA10102-DQB10501 DQA10102-DQB10503 DQA10102-DQB10601 DQA10102-DQB10609 DQA10102-DQB10611 DQA10103-DQB10501 DQA10103-DQB10601 DQA10103-DQB10609 DQA10201-DQB10301 DQA10201-DQB10303 DQA10501-DQB10301 DQA10501-DQB10319 DQA10503-DQB10301 DQA10505-DQB10301 DQA10505-DQB10309 DQA10505-DQB10319 DQA10505-DQB10402; note = HLAs: DQA10506-DQB10303 DQA10508-DQB10301 DQA10509-DQB10301 DQA10601-DQB10301
EEKAFSPEVIPMFSALSEGATPQD

SEQ ID NO: 3182 - protein, 25 aa, Human immunodeficiency virus 1
  source 1..25: note = HLAs: DRB1_0101 DRB1_0102 DRB1_0401 DRB1_0404 DRB1_0405 DRB1_0408 DRB1_0410 DRB1_0802 DRB1_0804 DRB1_0806 DRB1_0809 DRB1_0813 DRB1_0901 DRB1_1001 DRB1_1104 DRB1_1406 DRB1_1501 DRB1_1601 DRB1_1602 DPA10103-DPB10101 DPA10103-DPB11501 DPA10103-DPB13101 DPA10103-DPB15001 DPA10104-DPB10101 DPA10104-DPB11501 DPA10105-DPB10101 DPA10105-DPB15001 DPA10202-DPB10101 DPA10301-DPB10101 DPA10301-DPB10201 DPA10301-DPB10202 DPA10301-DPB10401 DPA10301-DPB10402 DPA10301-DPB110501 DPA10301-DPB110601 DPA10301-DPB11801 DPA10301-DPB12301 DPA10301-DPB13901 DPA10301-DPB14001 DPA10301-DPB14901 DPA10301-DPB16501 DPA10301-DPB18001 DPA10401-DPB10101 DPA10401-DPB10201 DPA10401-DPB10202 DPA10401-DPB10501 DQA10102-DQB10501 DQA10102-DQB10503 DQA10102-DQB10601 DQA10102-DQB10609 DQA10102-DQB10611 DQA10103-DQB10501 DQA10103-DQB10601 DQA10103-DQB10609 DQA10201-DQB10301 DQA10201-DQB10303 DQA10401-DQB10301 DQA10401-DQB10319 DQA10501-DQB10301 DQA10501-DQB10319 DQA10503-DQB10301 DQA10505-DQB10301 DQA10505-DQB10302; note = HLAs: DQA10505-DQB10309 DQA10505-DQB10319 DQA10505-DQB10402 DQA10506-DQB10303 DQA10508-DQB10301 DQA10509-DQB10301 DQA10601-DQB10301
EEKAFSPEVIPMFSALSEGATPQDL

SEQ ID NO: 3183 - protein, 20 aa, Human immunodeficiency virus 1
  source 1..20: note = HLAs: DQA10201-DQB10301
EFGIPYNPQSQGVVESMNKE

SEQ ID NO: 3184 - protein, 25 aa, Human immunodeficiency virus 1
  source 1..25: note = HLAs: DRB1_1102 DRB1_1103 DRB1_1104 DRB1_1301 DRB1_1304 DRB1_1406
EFGIPYNPQSQGVVESMNKELKKII

SEQ ID NO: 3185 - protein, 14 aa, Human immunodeficiency virus 1
  source 1..14: note = HLAs: DRB1_0101 DRB1_1001 DPA10202-DPB10101 DPA10301-DPB10101 DPA10301-DPB10201 DPA10301-DPB11801 DPA10401-DPB10101
EFVNTPPLVKLWYQ

SEQ ID NO: 3186 - protein, 15 aa, Human immunodeficiency virus 1
  source 1..15: note = HLAs: DRB1_0101 DRB1_0401 DRB1_0701 DRB1_0801 DRB1_0901 DRB1_1001 DRB1_1101 DRB1_1102 DRB1_1103 DRB1_1104 DRB1_1114 DRB1_1301 DRB1_1302 DRB1_1304 DRB1_1305 DRB1_1406 DRB1_1601 DRB1_1602 DPA10103-DPB10101 DPA10103-DPB11501 DPA10103-DPB13401 DPA10103-DPB15001 DPA10104-DPB10101 DPA10104-DPB11501 DPA10105-DPB10101 DPA10105-DPB15001 DPA10202-DPB10101 DPA10202-DPB10501 DPA10202-DPB110601 DPA10202-DPB11901 DPA10202-DPB13101 DPA10202-DPB13801 DPA10301-DPB10101 DPA10301-DPB10201 DPA10301-DPB10202 DPA10301-DPB10401 DPA10301-DPB10402 DPA10301-DPB110501 DPA10301-DPB110601 DPA10301-DPB11801 DPA10301-DPB12301 DPA10301-DPB13901 DPA10301-DPB14001 DPA10301-DPB14901 DPA10301-DPB16501 DPA10301-DPB18001 DPA10401-DPB10101 DPA10401-DPB10201 DPA10401-DPB10501
EFVNTPPLVKLWYQL

SEQ ID NO: 3187 - protein, 16 aa, Human immunodeficiency virus 1
  source 1..16: note = HLAs: DRB1_0101 DRB1_1001 DPA10103-DPB10101 DPA10103-DPB10202 DPA10103-DPB11501 DPA10103-DPB13101 DPA10103-DPB13401 DPA10103-DPB14001 DPA10103-DPB15001 DPA10104-DPB10101 DPA10104-DPB11501 DPA10105-DPB10101 DPA10105-DPB15001 DPA10106-DPB10101 DPA10201-DPB10101 DPA10201-DPB11501 DPA10202-DPB10101 DPA10202-DPB10202 DPA10202-DPB10501 DPA10202-DPB110601 DPA10202-DPB11901 DPA10202-DPB13101 DPA10202-DPB13801 DPA10301-DPB10101 DPA10301-DPB10201 DPA10301-DPB10202 DPA10301-DPB10401 DPA10301-DPB10402 DPA10301-DPB110501 DPA10301-DPB110601 DPA10301-DPB11801 DPA10301-DPB12301 DPA10301-DPB13901 DPA10301-DPB14001 DPA10301-DPB14901 DPA10301-DPB16501 DPA10301-DPB18001 DPA10401-DPB10101 DPA10401-DPB10201 DPA10401-DPB10202 DPA10401-DPB10501 DQA10102-DQB10501
EFVNTPPLVKLWYQLE

SEQ ID NO: 3188 - protein, 17 aa, Human immunodeficiency virus 1
  source 1..17: note = HLAs: DRB1_0404
EGATPQDLNTMLNTVGG

SEQ ID NO: 3189 - protein, 19 aa, Human immunodeficiency virus 1
  source 1..19: note = HLAs: DRB1_0404
EGATPQDLNTMLNTVGGHQ

SEQ ID NO: 3190 - protein, 20 aa, Human immunodeficiency virus 1
  source 1..20: note = HLAs: DRB1_0101 DRB1_0404 DRB1_0408 DRB1_1001 DQA10102-DQB10501
EGATPQDLNTMLNTVGGHQA

SEQ ID NO: 3191 - protein, 21 aa, Human immunodeficiency virus 1
  source 1..21: note = HLAs: DRB1_0404 DRB1_0408 DRB1_1001 DQA10102-DQB10501
EGATPQDLNTMLNTVGGHQAA

SEQ ID NO: 3192 - protein, 22 aa, Human immunodeficiency virus 1
  source 1..22: note = HLAs: DRB1_0101 DRB1_0404 DRB1_0408 DRB1_1001 DQA10102-DQB10501
EGATPQDLNTMLNTVGGHQAAM

SEQ ID NO: 3193 - protein, 23 aa, Human immunodeficiency virus 1
  source 1..23: note = HLAs: DRB1_0101 DRB1_0404 DRB1_0408 DRB1_1001 DQA10102-DQB10501 DQA10103-DQB10601
EGATPQDLNTMLNTVGGHQAAMQ

SEQ ID NO: 3194 - protein, 24 aa, Human immunodeficiency virus 1
  source 1..24: note = HLAs: DRB1_0101 DRB1_0404 DRB1_0408 DRB1_1001 DQA10102-DQB10501 DQA10102-DQB10601 DQA10103-DQB10601 DQA10201-DQB10301
EGATPQDLNTMLNTVGGHQAAMQM

SEQ ID NO: 3195 - protein, 25 aa, Human immunodeficiency virus 1
  source 1..25: note = HLAs: DRB1_0101 DRB1_0404 DRB1_0408 DRB1_1001 DQA10102-DQB10501 DQA10102-DQB10601 DQA10103-DQB10601 DQA10103-DQB10609 DQA10201-DQB10301 DQA10201-DQB10303
EGATPQDLNTMLNTVGGHQAAMQML

SEQ ID NO: 3196 - protein, 13 aa, Human immunodeficiency virus 1
  source 1..13: note = HLAs: DRB1_0101 DRB1_0404 DRB1_0408 DRB1_1001 DQA10102-DQB10501
EGKIILVAVHVAS

SEQ ID NO: 3197 - protein, 14 aa, Human immunodeficiency virus 1
  source 1..14: note = HLAs: DRB1_0101 DRB1_0404 DRB1_0408 DRB1_0410 DRB1_0802 DRB1_0804 DRB1_0809 DRB1_0813 DRB1_1001 DRB1_1406 DQA10102-DQB10501 DQA10102-DQB10503 DQA10102-DQB10602 DQA10102-DQB10609 DQA10102-DQB10611 DQA10103-DQB10501 DQA10103-DQB10602
EGKIILVAVHVASG

SEQ ID NO: 3198 - protein, 15 aa, Human immunodeficiency virus 1
  source 1..15: note = HLAs: DRB1_0101 DRB1_0102 DRB1_0401 DRB1_0402 DRB1_0404 DRB1_0405 DRB1_0408 DRB1_0410 DRB1_0701 DRB1_0801 DRB1_0802 DRB1_0804 DRB1_0806 DRB1_0809 DRB1_0813 DRB1_0901 DRB1_1001 DRB1_1101 DRB1_1102 DRB1_1103 DRB1_1104 DRB1_1114 DRB1_1201 DRB1_1301 DRB1_1302 DRB1_1304 DRB1_1305 DRB1_1401 DRB1_1402 DRB1_1403 DRB1_1404 DRB1_1405 DRB1_1406 DRB1_1454 DRB1_1501 DRB1_1502 DRB1_1601 DRB1_1602 DPA10103-DPB11501 DPA10104-DPB11501 DPA10301-DPB10101 DPA10301-DPB10201 DPA10301-DPB10202 DPA10301-DPB11801 DPA10301-DPB14001 DPA10401-DPB10101 DPA10401-DPB10301 DPA10401-DPB11401 DQA10102-DQB10501 DQA10102-DQB10503 DQA10102-DQB10601 DQA10102-DQB10602 DQA10102-DQB10609 DQA10102-DQB10611 DQA10103-DQB10501 DQA10103-DQB10601 DQA10103-DQB10602 DQA10103-DQB10609 DQA10201-DQB10301 DQA10201-DQB10303 DQA10505-DQB10402 DQA10506-DQB10303
EGKIILVAVHVASGY

SEQ ID NO: 3199 - protein, 25 aa, Human immunodeficiency virus 1
  source 1..25: note = HLAs: DRB1_1104
EGKISKIGPENPYNTPVFAIKKKDS

SEQ ID NO: 3200 - protein, 13 aa, Human immunodeficiency virus 1
  source 1..13: note = HLAs: DPA10301-DPB10101 DQA10102-DQB10501
EHLKTAVQMAVFI

SEQ ID NO: 3201 - protein, 14 aa, Human immunodeficiency virus 1
  source 1..14: note = HLAs: DRB1_0101 DRB1_1001 DPA10103-DPB11501 DPA10104-DPB11501 DPA10301-DPB10101 DPA10301-DPB10201 DPA10301-DPB10202 DPA10301-DPB110601 DPA10301-DPB11801 DPA10301-DPB14001 DPA10301-DPB16501 DPA10401-DPB10101 DQA10102-DQB10501 DQA10102-DQB10602 DQA10102-DQB10609 DQA10102-DQB10611 DQA10103-DQB10601 DQA10103-DQB10609 DQA10201-DQB10301
EHLKTAVQMAVFIH

SEQ ID NO: 3202 - protein, 15 aa, Human immunodeficiency virus 1
  source 1..15: note = HLAs: DRB1_0101 DRB1_0102 DRB1_0404 DRB1_0410 DRB1_0701 DRB1_0813 DRB1_0901 DRB1_1001 DRB1_1102 DRB1_1114 DRB1_1301 DRB1_1302 DRB1_1304 DRB1_1401 DRB1_1404 DRB1_1406 DRB1_1454 DPA10103-DPB10101 DPA10103-DPB10201 DPA10103-DPB10202 DPA10103-DPB10401 DPA10103-DPB10501 DPA10103-DPB112601 DPA10103-DPB11501 DPA10103-DPB11601 DPA10103-DPB11801 DPA10103-DPB11901 DPA10103-DPB12301 DPA10103-DPB13101 DPA10103-DPB13401 DPA10103-DPB13901 DPA10103-DPB14001 DPA10103-DPB14101 DPA10103-DPB14801 DPA10103-DPB15001 DPA10104-DPB10101 DPA10104-DPB11501 DPA10105-DPB10101 DPA10105-DPB10401 DPA10105-DPB11801 DPA10105-DPB15001 DPA10106-DPB10101 DPA10201-DPB10101 DPA10201-DPB110601 DPA10201-DPB11501 DPA10201-DPB11901 DPA10202-DPB10101 DPA10202-DPB10201 DPA10202-DPB10202 DPA10202-DPB10901 DPA10202-DPB110601 DPA10202-DPB11101 DPA10202-DPB11301 DPA10202-DPB11801 DPA10202-DPB11901 DPA10202-DPB13101 DPA10202-DPB15501 DPA10202-DPB16501 DPA10301-DPB10101 DPA10301-DPB10201 DPA10301-DPB10202 DPA10301-DPB10401; note = HLAs: DPA10301-DPB10402 DPA10301-DPB110501 DPA10301-DPB110601 DPA10301-DPB11101 DPA10301-DPB11301 DPA10301-DPB11801 DPA10301-DPB12301 DPA10301-DPB13901 DPA10301-DPB14001 DPA10301-DPB14901 DPA10301-DPB15501 DPA10301-DPB16501 DPA10301-DPB17501 DPA10301-DPB18001 DPA10401-DPB10101 DPA10401-DPB10201 DPA10401-DPB10202 DPA10401-DPB10301 DPA10401-DPB10402 DPA10401-DPB10501 DPA10401-DPB110501 DPA10401-DPB11301 DPA10401-DPB113301 DPA10401-DPB11401 DPA10401-DPB14901 DQA10102-DQB10501 DQA10102-DQB10601 DQA10102-DQB10602 DQA10102-DQB10609 DQA10102-DQB10611 DQA10103-DQB10501 DQA10103-DQB10601 DQA10103-DQB10602 DQA10103-DQB10609 DQA10201-DQB10301 DQA10201-DQB10303 DQA10506-DQB10303
EHLKTAVQMAVFIHN

SEQ ID NO: 3203 - protein, 16 aa, Human immunodeficiency virus 1
  source 1..16: note = HLAs: DRB1_0101 DRB1_0901 DRB1_1001 DRB1_1406 DPA10103-DPB10101 DPA10103-DPB10201 DPA10103-DPB10202 DPA10103-DPB10401 DPA10103-DPB10501 DPA10103-DPB11101 DPA10103-DPB112601 DPA10103-DPB11501 DPA10103-DPB11601 DPA10103-DPB11801 DPA10103-DPB11901 DPA10103-DPB12301 DPA10103-DPB13101 DPA10103-DPB13401 DPA10103-DPB13901 DPA10103-DPB14001 DPA10103-DPB14801 DPA10103-DPB15001 DPA10103-DPB15501 DPA10104-DPB10101 DPA10104-DPB11501 DPA10105-DPB10101 DPA10105-DPB10401 DPA10105-DPB11801 DPA10105-DPB15001 DPA10106-DPB10101 DPA10201-DPB10101 DPA10201-DPB110601 DPA10201-DPB11501 DPA10201-DPB11901 DPA10202-DPB10101 DPA10202-DPB10201 DPA10202-DPB10202 DPA10202-DPB10901 DPA10202-DPB110601 DPA10202-DPB11101 DPA10202-DPB11301 DPA10202-DPB11901 DPA10202-DPB15501 DPA10202-DPB16501 DPA10301-DPB10101 DPA10301-DPB10201 DPA10301-DPB10202 DPA10301-DPB10401 DPA10301-DPB10402 DPA10301-DPB10901 DPA10301-DPB110501 DPA10301-DPB110601 DPA10301-DPB11101 DPA10301-DPB11301 DPA10301-DPB11801 DPA10301-DPB12301; note = HLAs: DPA10301-DPB13901 DPA10301-DPB14001 DPA10301-DPB14901 DPA10301-DPB15501 DPA10301-DPB16501 DPA10301-DPB17501 DPA10301-DPB18001 DPA10401-DPB10101 DPA10401-DPB10201 DPA10401-DPB10202 DPA10401-DPB10301 DPA10401-DPB10402 DPA10401-DPB10501 DPA10401-DPB110501 DPA10401-DPB11301 DPA10401-DPB113301 DPA10401-DPB11401 DPA10401-DPB14901 DQA10102-DQB10501 DQA10102-DQB10503 DQA10102-DQB10601 DQA10102-DQB10602 DQA10102-DQB10609 DQA10102-DQB10611 DQA10103-DQB10501 DQA10103-DQB10601 DQA10103-DQB10602 DQA10103-DQB10609 DQA10201-DQB10301 DQA10201-DQB10303
EHLKTAVQMAVFIHNF

SEQ ID NO: 3204 - protein, 17 aa, Human immunodeficiency virus 1
  source 1..17: note = HLAs: DRB1_0101 DRB1_0404 DRB1_0410 DRB1_0701 DRB1_0806 DRB1_0813 DRB1_0901 DRB1_1001 DRB1_1104 DRB1_1304 DRB1_1406 DRB1_1501 DPA10103-DPB10101 DPA10103-DPB10201 DPA10103-DPB10202 DPA10103-DPB10401 DPA10103-DPB10402 DPA10103-DPB10501 DPA10103-DPB10601 DPA10103-DPB110501 DPA10103-DPB11101 DPA10103-DPB112601 DPA10103-DPB11501 DPA10103-DPB11601 DPA10103-DPB11801 DPA10103-DPB11901 DPA10103-DPB12001 DPA10103-DPB12301 DPA10103-DPB13101 DPA10103-DPB13401 DPA10103-DPB13901 DPA10103-DPB14001 DPA10103-DPB14101 DPA10103-DPB14801 DPA10103-DPB14901 DPA10103-DPB15001 DPA10103-DPB15101 DPA10103-DPB15501 DPA10103-DPB15901 DPA10103-DPB18001 DPA10104-DPB10101 DPA10104-DPB11501 DPA10105-DPB10101 DPA10105-DPB10401 DPA10105-DPB11801 DPA10105-DPB15001 DPA10106-DPB10101 DPA10106-DPB11101 DPA10201-DPB10101 DPA10201-DPB10201 DPA10201-DPB10202 DPA10201-DPB10501 DPA10201-DPB110601 DPA10201-DPB11101 DPA10201-DPB11501 DPA10201-DPB11601 DPA10201-DPB11801 DPA10201-DPB11901 DPA10201-DPB15501 DPA10202-DPB10101; note = HLAs: DPA10202-DPB10201 DPA10202-DPB10202 DPA10202-DPB10401 DPA10202-DPB10501 DPA10202-DPB10901 DPA10202-DPB110001 DPA10202-DPB110601 DPA10202-DPB11101 DPA10202-DPB11301 DPA10202-DPB113101 DPA10202-DPB11701 DPA10202-DPB11801 DPA10202-DPB11901 DPA10202-DPB12101 DPA10202-DPB13001 DPA10202-DPB13101 DPA10202-DPB13801 DPA10202-DPB15501 DPA10202-DPB16501 DPA10301-DPB10101 DPA10301-DPB10201 DPA10301-DPB10202 DPA10301-DPB10401 DPA10301-DPB10402 DPA10301-DPB10901 DPA10301-DPB110501 DPA10301-DPB110601 DPA10301-DPB11101 DPA10301-DPB11301 DPA10301-DPB11701 DPA10301-DPB11801 DPA10301-DPB12301 DPA10301-DPB13901 DPA10301-DPB14001 DPA10301-DPB14901 DPA10301-DPB15501 DPA10301-DPB16501 DPA10301-DPB17501 DPA10301-DPB18001 DPA10401-DPB10101 DPA10401-DPB10201 DPA10401-DPB10202 DPA10401-DPB10301 DPA10401-DPB10402 DPA10401-DPB10501 DPA10401-DPB110501 DPA10401-DPB11301 DPA10401-DPB113301 DPA10401-DPB11401 DPA10401-DPB14901 DQA10102-DQB10501 DQA10102-DQB10503 DQA10102-DQB10601 DQA10102-DQB10602; note = HLAs: DQA10102-DQB10609 DQA10102-DQB10611 DQA10103-DQB10501 DQA10103-DQB10601 DQA10103-DQB10602 DQA10103-DQB10609 DQA10201-DQB10301 DQA10201-DQB10303
EHLKTAVQMAVFIHNFK

SEQ ID NO: 3205 - protein, 18 aa, Human immunodeficiency virus 1
  source 1..18: note = HLAs: DRB1_1001 DPA10103-DPB10101 DPA10103-DPB10201 DPA10103-DPB10202 DPA10103-DPB10401 DPA10103-DPB10501 DPA10103-DPB112601 DPA10103-DPB11501 DPA10103-DPB11601 DPA10103-DPB11801 DPA10103-DPB11901 DPA10103-DPB12301 DPA10103-DPB13101 DPA10103-DPB13401 DPA10103-DPB13901 DPA10103-DPB14001 DPA10103-DPB14101 DPA10103-DPB14801 DPA10103-DPB15001 DPA10104-DPB10101 DPA10104-DPB11501 DPA10105-DPB10101 DPA10105-DPB10401 DPA10105-DPB11801 DPA10105-DPB15001 DPA10106-DPB10101 DPA10201-DPB10101 DPA10201-DPB10202 DPA10201-DPB110601 DPA10201-DPB11501 DPA10201-DPB11601 DPA10201-DPB11901 DPA10202-DPB10101 DPA10202-DPB10201 DPA10202-DPB10202 DPA10202-DPB10501 DPA10202-DPB110601 DPA10202-DPB11801 DPA10202-DPB11901 DPA10202-DPB13101 DPA10202-DPB13801 DPA10202-DPB16501 DPA10301-DPB10101 DPA10301-DPB10201 DPA10301-DPB10202 DPA10301-DPB10401 DPA10301-DPB10402 DPA10301-DPB110501 DPA10301-DPB110601 DPA10301-DPB11101 DPA10301-DPB11801 DPA10301-DPB12301 DPA10301-DPB13901 DPA10301-DPB14001 DPA10301-DPB14901; note = HLAs: DPA10301-DPB15501 DPA10301-DPB16501 DPA10301-DPB17501 DPA10301-DPB18001 DPA10401-DPB10101 DPA10401-DPB10201 DPA10401-DPB10202 DPA10401-DPB10402 DPA10401-DPB10501 DPA10401-DPB110501 DPA10401-DPB11301 DPA10401-DPB113301 DPA10401-DPB11401 DPA10401-DPB14901 DQA10102-DQB10501 DQA10102-DQB10503 DQA10102-DQB10601 DQA10102-DQB10602 DQA10102-DQB10609 DQA10102-DQB10611 DQA10103-DQB10501 DQA10103-DQB10601 DQA10103-DQB10609
EHLKTAVQMAVFIHNFKR

SEQ ID NO: 3206 - protein, 19 aa, Human immunodeficiency virus 1
  source 1..19: note = HLAs: DRB1_0101 DRB1_0804 DRB1_0806 DRB1_1001 DRB1_1102 DRB1_1103 DRB1_1104 DRB1_1301 DRB1_1304 DRB1_1406 DRB1_1501 DRB1_1601 DRB1_1602 DPA10103-DPB10101 DPA10103-DPB10201 DPA10103-DPB10202 DPA10103-DPB10401 DPA10103-DPB10402 DPA10103-DPB10501 DPA10103-DPB10601 DPA10103-DPB110501 DPA10103-DPB11101 DPA10103-DPB112601 DPA10103-DPB11501 DPA10103-DPB11601 DPA10103-DPB11801 DPA10103-DPB11901 DPA10103-DPB12301 DPA10103-DPB13101 DPA10103-DPB13401 DPA10103-DPB13901 DPA10103-DPB14001 DPA10103-DPB14101 DPA10103-DPB14801 DPA10103-DPB14901 DPA10103-DPB15001 DPA10103-DPB15101 DPA10103-DPB15501 DPA10103-DPB15901 DPA10103-DPB18001 DPA10104-DPB10101 DPA10104-DPB11501 DPA10105-DPB10101 DPA10105-DPB10401 DPA10105-DPB11801 DPA10105-DPB15001 DPA10106-DPB10101 DPA10106-DPB11101 DPA10201-DPB10101 DPA10201-DPB10201 DPA10201-DPB10202 DPA10201-DPB10501 DPA10201-DPB110601 DPA10201-DPB11101 DPA10201-DPB11501 DPA10201-DPB11601 DPA10201-DPB11801 DPA10201-DPB11901 DPA10201-DPB13401 DPA10201-DPB15501; note = HLAs: DPA10202-DPB10101 DPA10202-DPB10201 DPA10202-DPB10202 DPA10202-DPB10401 DPA10202-DPB10501 DPA10202-DPB10901 DPA10202-DPB110001 DPA10202-DPB110601 DPA10202-DPB11101 DPA10202-DPB11301 DPA10202-DPB11801 DPA10202-DPB11901 DPA10202-DPB12101 DPA10202-DPB13001 DPA10202-DPB13101 DPA10202-DPB13801 DPA10202-DPB15501 DPA10202-DPB16501 DPA10301-DPB10101 DPA10301-DPB10201 DPA10301-DPB10202 DPA10301-DPB10401 DPA10301-DPB10402 DPA10301-DPB10901 DPA10301-DPB110501 DPA10301-DPB110601 DPA10301-DPB11101 DPA10301-DPB11301 DPA10301-DPB11701 DPA10301-DPB11801 DPA10301-DPB12301 DPA10301-DPB13901 DPA10301-DPB14001 DPA10301-DPB14901 DPA10301-DPB15501 DPA10301-DPB16501 DPA10301-DPB17501 DPA10301-DPB18001 DPA10401-DPB10101 DPA10401-DPB10201 DPA10401-DPB10202 DPA10401-DPB10301 DPA10401-DPB10402 DPA10401-DPB10501 DPA10401-DPB110501 DPA10401-DPB11301 DPA10401-DPB113301 DPA10401-DPB11401 DPA10401-DPB14901 DQA10102-DQB10501 DQA10102-DQB10503 DQA10102-DQB10601 DQA10102-DQB10602 DQA10102-DQB10609; note = HLAs: DQA10102-DQB10611 DQA10103-DQB10501 DQA10103-DQB10601 DQA10103-DQB10602 DQA10103-DQB10609 DQA10201-DQB10301
EHLKTAVQMAVFIHNFKRK

SEQ ID NO: 3207 - protein, 20 aa, Human immunodeficiency virus 1
  source 1..20: note = HLAs: DRB1_0101 DRB1_0404 DRB1_0410 DRB1_0701 DRB1_0801 DRB1_0802 DRB1_0804 DRB1_0806 DRB1_0809 DRB1_0813 DRB1_0901 DRB1_1001 DRB1_1101 DRB1_1102 DRB1_1103 DRB1_1104 DRB1_1114 DRB1_1301 DRB1_1302 DRB1_1304 DRB1_1305 DRB1_1402 DRB1_1406 DRB1_1501 DRB1_1503 DRB1_1601 DRB1_1602 DPA10103-DPB10101 DPA10103-DPB10201 DPA10103-DPB10202 DPA10103-DPB10301 DPA10103-DPB10401 DPA10103-DPB10402 DPA10103-DPB10501 DPA10103-DPB10601 DPA10103-DPB10901 DPA10103-DPB110501 DPA10103-DPB11101 DPA10103-DPB112401 DPA10103-DPB112601 DPA10103-DPB11301 DPA10103-DPB113101 DPA10103-DPB113301 DPA10103-DPB11401 DPA10103-DPB11501 DPA10103-DPB11601 DPA10103-DPB11701 DPA10103-DPB11801 DPA10103-DPB11901 DPA10103-DPB12001 DPA10103-DPB12101 DPA10103-DPB12301 DPA10103-DPB12901 DPA10103-DPB13001 DPA10103-DPB13101 DPA10103-DPB13401 DPA10103-DPB13901 DPA10103-DPB14001 DPA10103-DPB14101 DPA10103-DPB14801 DPA10103-DPB14901 DPA10103-DPB15001 DPA10103-DPB15101 DPA10103-DPB15501 DPA10103-DPB15901 DPA10103-DPB18001; note = HLAs: DPA10104-DPB10101 DPA10104-DPB10301 DPA10104-DPB11301 DPA10104-DPB11501 DPA10105-DPB10101 DPA10105-DPB10301 DPA10105-DPB10401 DPA10105-DPB11801 DPA10105-DPB15001 DPA10106-DPB10101 DPA10106-DPB11101 DPA10201-DPB10101 DPA10201-DPB10201 DPA10201-DPB10202 DPA10201-DPB10501 DPA10201-DPB110601 DPA10201-DPB11101 DPA10201-DPB11501 DPA10201-DPB11601 DPA10201-DPB11801 DPA10201-DPB11901 DPA10201-DPB13401 DPA10201-DPB15501 DPA10202-DPB10101 DPA10202-DPB10201 DPA10202-DPB10202 DPA10202-DPB10401 DPA10202-DPB10402 DPA10202-DPB10501 DPA10202-DPB10901 DPA10202-DPB110001 DPA10202-DPB110501 DPA10202-DPB110601 DPA10202-DPB11101 DPA10202-DPB11301 DPA10202-DPB113101 DPA10202-DPB11401 DPA10202-DPB11701 DPA10202-DPB11801 DPA10202-DPB11901 DPA10202-DPB12101 DPA10202-DPB12901 DPA10202-DPB13001 DPA10202-DPB13101 DPA10202-DPB13801 DPA10202-DPB15501 DPA10202-DPB16501 DPA10202-DPB18501 DPA10301-DPB10101 DPA10301-DPB10201 DPA10301-DPB10202 DPA10301-DPB10301 DPA10301-DPB10401 DPA10301-DPB10402; note = HLAs: DPA10301-DPB10901 DPA10301-DPB110501 DPA10301-DPB110601 DPA10301-DPB11101 DPA10301-DPB11301 DPA10301-DPB11701 DPA10301-DPB11801 DPA10301-DPB12301 DPA10301-DPB13901 DPA10301-DPB14001 DPA10301-DPB14901 DPA10301-DPB15501 DPA10301-DPB16501 DPA10301-DPB17501 DPA10301-DPB18001 DPA10401-DPB10101 DPA10401-DPB10201 DPA10401-DPB10202 DPA10401-DPB10301 DPA10401-DPB10402 DPA10401-DPB10501 DPA10401-DPB110501 DPA10401-DPB11301 DPA10401-DPB113301 DPA10401-DPB11401 DPA10401-DPB14901 DQA10102-DQB10501 DQA10102-DQB10503 DQA10102-DQB10601 DQA10102-DQB10602 DQA10102-DQB10609 DQA10102-DQB10611 DQA10103-DQB10501 DQA10103-DQB10601 DQA10103-DQB10602 DQA10103-DQB10608 DQA10103-DQB10609 DQA10201-DQB10301 DQA10201-DQB10303
EHLKTAVQMAVFIHNFKRKG

SEQ ID NO: 3208 - protein, 21 aa, Human immunodeficiency virus 1
  source 1..21: note = HLAs: DRB1_0101 DRB1_0410 DRB1_0801 DRB1_0804 DRB1_0806 DRB1_1001 DRB1_1101 DRB1_1102 DRB1_1103 DRB1_1104 DRB1_1301 DRB1_1304 DRB1_1305 DRB1_1406 DRB1_1501 DRB1_1601 DRB1_1602 DPA10103-DPB10101 DPA10103-DPB10201 DPA10103-DPB10202 DPA10103-DPB10401 DPA10103-DPB10501 DPA10103-DPB11101 DPA10103-DPB112601 DPA10103-DPB11501 DPA10103-DPB11601 DPA10103-DPB11801 DPA10103-DPB11901 DPA10103-DPB12301 DPA10103-DPB13101 DPA10103-DPB13401 DPA10103-DPB13901 DPA10103-DPB14001 DPA10103-DPB14101 DPA10103-DPB14801 DPA10103-DPB15001 DPA10104-DPB10101 DPA10104-DPB11501 DPA10105-DPB10101 DPA10105-DPB10401 DPA10105-DPB11801 DPA10105-DPB15001 DPA10106-DPB10101 DPA10201-DPB10101 DPA10201-DPB110601 DPA10201-DPB11501 DPA10201-DPB11601 DPA10201-DPB11901 DPA10202-DPB10101 DPA10202-DPB10201 DPA10202-DPB10202 DPA10202-DPB10501 DPA10202-DPB110601 DPA10202-DPB11801 DPA10202-DPB11901 DPA10202-DPB13101 DPA10202-DPB13801 DPA10202-DPB15501 DPA10202-DPB16501 DPA10301-DPB10101 DPA10301-DPB10201 DPA10301-DPB10202; note = HLAs: DPA10301-DPB10401 DPA10301-DPB10402 DPA10301-DPB110501 DPA10301-DPB110601 DPA10301-DPB11101 DPA10301-DPB11301 DPA10301-DPB11801 DPA10301-DPB12301 DPA10301-DPB13901 DPA10301-DPB14001 DPA10301-DPB14901 DPA10301-DPB15501 DPA10301-DPB16501 DPA10301-DPB17501 DPA10301-DPB18001 DPA10401-DPB10101 DPA10401-DPB10201 DPA10401-DPB10202 DPA10401-DPB10301 DPA10401-DPB10402 DPA10401-DPB10501 DPA10401-DPB110501 DPA10401-DPB11301 DPA10401-DPB113301 DPA10401-DPB11401 DPA10401-DPB14901 DQA10102-DQB10501 DQA10102-DQB10503 DQA10102-DQB10609 DQA10103-DQB10501 DQA10103-DQB10609
EHLKTAVQMAVFIHNFKRKGG

SEQ ID NO: 3209 - protein, 22 aa, Human immunodeficiency virus 1
  source 1..22: note = HLAs: DRB1_0101 DRB1_0410 DRB1_0801 DRB1_0802 DRB1_0804 DRB1_0806 DRB1_0809 DRB1_0813 DRB1_1001 DRB1_1101 DRB1_1102 DRB1_1103 DRB1_1104 DRB1_1301 DRB1_1303 DRB1_1304 DRB1_1305 DRB1_1406 DRB1_1501 DRB1_1503 DRB1_1601 DRB1_1602 DPA10103-DPB10101 DPA10103-DPB10201 DPA10103-DPB10202 DPA10103-DPB10401 DPA10103-DPB10501 DPA10103-DPB11101 DPA10103-DPB112601 DPA10103-DPB11501 DPA10103-DPB11601 DPA10103-DPB11801 DPA10103-DPB11901 DPA10103-DPB12301 DPA10103-DPB13101 DPA10103-DPB13401 DPA10103-DPB13901 DPA10103-DPB14001 DPA10103-DPB14101 DPA10103-DPB14801 DPA10103-DPB15001 DPA10103-DPB15901 DPA10104-DPB10101 DPA10104-DPB11501 DPA10105-DPB10101 DPA10105-DPB10401 DPA10105-DPB11801 DPA10105-DPB15001 DPA10106-DPB10101 DPA10201-DPB10101 DPA10201-DPB10202 DPA10201-DPB110601 DPA10201-DPB11501 DPA10201-DPB11601 DPA10201-DPB11901 DPA10202-DPB10101 DPA10202-DPB10201 DPA10202-DPB10202 DPA10202-DPB10501 DPA10202-DPB110601 DPA10202-DPB11801 DPA10202-DPB11901 DPA10202-DPB13101 DPA10202-DPB13801; note = HLAs: DPA10202-DPB15501 DPA10202-DPB16501 DPA10301-DPB10101 DPA10301-DPB10201 DPA10301-DPB10202 DPA10301-DPB10401 DPA10301-DPB10402 DPA10301-DPB110501 DPA10301-DPB110601 DPA10301-DPB11101 DPA10301-DPB11301 DPA10301-DPB11801 DPA10301-DPB12301 DPA10301-DPB13901 DPA10301-DPB14001 DPA10301-DPB14901 DPA10301-DPB15501 DPA10301-DPB16501 DPA10301-DPB17501 DPA10301-DPB18001 DPA10401-DPB10101 DPA10401-DPB10201 DPA10401-DPB10202 DPA10401-DPB10301 DPA10401-DPB10402 DPA10401-DPB10501 DPA10401-DPB110501 DPA10401-DPB11301 DPA10401-DPB113301 DPA10401-DPB11401 DPA10401-DPB14901 DQA10102-DQB10501 DQA10102-DQB10503 DQA10102-DQB10609 DQA10103-DQB10501 DQA10103-DQB10601 DQA10103-DQB10609
EHLKTAVQMAVFIHNFKRKGGI

SEQ ID NO: 3210 - protein, 23 aa, Human immunodeficiency virus 1
  source 1..23: note = HLAs: DRB1_0101 DRB1_0410 DRB1_0801 DRB1_0802 DRB1_0804 DRB1_0806 DRB1_0809 DRB1_0813 DRB1_1001 DRB1_1101 DRB1_1102 DRB1_1103 DRB1_1104 DRB1_1301 DRB1_1303 DRB1_1304 DRB1_1305 DRB1_1406 DRB1_1501 DRB1_1503 DRB1_1601 DRB1_1602 DPA10103-DPB10101 DPA10103-DPB10201 DPA10103-DPB10202 DPA10103-DPB10401 DPA10103-DPB10501 DPA10103-DPB11101 DPA10103-DPB112601 DPA10103-DPB11501 DPA10103-DPB11601 DPA10103-DPB11801 DPA10103-DPB11901 DPA10103-DPB12301 DPA10103-DPB13101 DPA10103-DPB13401 DPA10103-DPB13901 DPA10103-DPB14001 DPA10103-DPB14101 DPA10103-DPB14801 DPA10103-DPB15001 DPA10103-DPB15901 DPA10104-DPB10101 DPA10104-DPB11501 DPA10105-DPB10101 DPA10105-DPB10401 DPA10105-DPB11801 DPA10105-DPB15001 DPA10106-DPB10101 DPA10201-DPB10101 DPA10201-DPB10202 DPA10201-DPB110601 DPA10201-DPB11501 DPA10201-DPB11601 DPA10201-DPB11901 DPA10202-DPB10101 DPA10202-DPB10201 DPA10202-DPB10202 DPA10202-DPB10501 DPA10202-DPB110601 DPA10202-DPB11801 DPA10202-DPB11901 DPA10202-DPB13101 DPA10202-DPB13801; note = HLAs: DPA10202-DPB15501 DPA10202-DPB16501 DPA10301-DPB10101 DPA10301-DPB10201 DPA10301-DPB10202 DPA10301-DPB10401 DPA10301-DPB10402 DPA10301-DPB110501 DPA10301-DPB110601 DPA10301-DPB11101 DPA10301-DPB11301 DPA10301-DPB11801 DPA10301-DPB12301 DPA10301-DPB13901 DPA10301-DPB14001 DPA10301-DPB14901 DPA10301-DPB15501 DPA10301-DPB16501 DPA10301-DPB17501 DPA10301-DPB18001 DPA10401-DPB10101 DPA10401-DPB10201 DPA10401-DPB10202 DPA10401-DPB10301 DPA10401-DPB10402 DPA10401-DPB10501 DPA10401-DPB110501 DPA10401-DPB11301 DPA10401-DPB113301 DPA10401-DPB11401 DPA10401-DPB14901 DQA10102-DQB10501 DQA10102-DQB10503 DQA10102-DQB10609 DQA10103-DQB10501 DQA10103-DQB10601 DQA10103-DQB10609
EHLKTAVQMAVFIHNFKRKGGIG

SEQ ID NO: 3211 - protein, 24 aa, Human immunodeficiency virus 1
  source 1..24: note = HLAs: DRB1_0101 DRB1_0410 DRB1_0801 DRB1_0802 DRB1_0804 DRB1_0806 DRB1_0809 DRB1_0813 DRB1_1001 DRB1_1101 DRB1_1102 DRB1_1103 DRB1_1104 DRB1_1301 DRB1_1303 DRB1_1304 DRB1_1305 DRB1_1402 DRB1_1406 DRB1_1501 DRB1_1503 DRB1_1601 DRB1_1602 DPA10103-DPB10101 DPA10103-DPB10201 DPA10103-DPB10202 DPA10103-DPB10401 DPA10103-DPB10501 DPA10103-DPB11101 DPA10103-DPB112601 DPA10103-DPB11501 DPA10103-DPB11601 DPA10103-DPB11801 DPA10103-DPB11901 DPA10103-DPB12301 DPA10103-DPB13101 DPA10103-DPB13401 DPA10103-DPB13901 DPA10103-DPB14001 DPA10103-DPB14101 DPA10103-DPB14801 DPA10103-DPB15001 DPA10103-DPB15901 DPA10104-DPB10101 DPA10104-DPB11501 DPA10105-DPB10101 DPA10105-DPB10401 DPA10105-DPB11801 DPA10105-DPB15001 DPA10106-DPB10101 DPA10201-DPB10101 DPA10201-DPB10202 DPA10201-DPB110601 DPA10201-DPB11501 DPA10201-DPB11601 DPA10201-DPB11901 DPA10202-DPB10101 DPA10202-DPB10201 DPA10202-DPB10202 DPA10202-DPB10501 DPA10202-DPB110601 DPA10202-DPB11801 DPA10202-DPB11901 DPA10202-DPB13101 DPA10202-DPB13801; note = HLAs: DPA10202-DPB15501 DPA10202-DPB16501 DPA10301-DPB10101 DPA10301-DPB10201 DPA10301-DPB10202 DPA10301-DPB10401 DPA10301-DPB10402 DPA10301-DPB110501 DPA10301-DPB110601 DPA10301-DPB11101 DPA10301-DPB11301 DPA10301-DPB11801 DPA10301-DPB12301 DPA10301-DPB13901 DPA10301-DPB14001 DPA10301-DPB14901 DPA10301-DPB15501 DPA10301-DPB16501 DPA10301-DPB17501 DPA10301-DPB18001 DPA10401-DPB10101 DPA10401-DPB10201 DPA10401-DPB10202 DPA10401-DPB10301 DPA10401-DPB10402 DPA10401-DPB10501 DPA10401-DPB110501 DPA10401-DPB11301 DPA10401-DPB113301 DPA10401-DPB11401 DPA10401-DPB14901 DQA10102-DQB10501 DQA10102-DQB10503 DQA10102-DQB10609 DQA10103-DQB10501 DQA10103-DQB10601 DQA10103-DQB10609
EHLKTAVQMAVFIHNFKRKGGIGG

SEQ ID NO: 3212 - protein, 25 aa, Human immunodeficiency virus 1
  source 1..25: note = HLAs: DRB1_0101 DRB1_0410 DRB1_0801 DRB1_0802 DRB1_0804 DRB1_0806 DRB1_0809 DRB1_0813 DRB1_1001 DRB1_1101 DRB1_1102 DRB1_1103 DRB1_1104 DRB1_1301 DRB1_1303 DRB1_1304 DRB1_1305 DRB1_1402 DRB1_1406 DRB1_1501 DRB1_1503 DRB1_1601 DRB1_1602 DPA10103-DPB10101 DPA10103-DPB10201 DPA10103-DPB10202 DPA10103-DPB10401 DPA10103-DPB10501 DPA10103-DPB11101 DPA10103-DPB112601 DPA10103-DPB11501 DPA10103-DPB11601 DPA10103-DPB11801 DPA10103-DPB11901 DPA10103-DPB12301 DPA10103-DPB13101 DPA10103-DPB13401 DPA10103-DPB13901 DPA10103-DPB14001 DPA10103-DPB14101 DPA10103-DPB14801 DPA10103-DPB15001 DPA10103-DPB15901 DPA10104-DPB10101 DPA10104-DPB11501 DPA10105-DPB10101 DPA10105-DPB10401 DPA10105-DPB11801 DPA10105-DPB15001 DPA10106-DPB10101 DPA10201-DPB10101 DPA10201-DPB10202 DPA10201-DPB110601 DPA10201-DPB11501 DPA10201-DPB11601 DPA10201-DPB11901 DPA10202-DPB10101 DPA10202-DPB10201 DPA10202-DPB10202 DPA10202-DPB10501 DPA10202-DPB110601 DPA10202-DPB11801 DPA10202-DPB11901 DPA10202-DPB13101 DPA10202-DPB13801; note = HLAs: DPA10202-DPB15501 DPA10202-DPB16501 DPA10301-DPB10101 DPA10301-DPB10201 DPA10301-DPB10202 DPA10301-DPB10401 DPA10301-DPB10402 DPA10301-DPB110501 DPA10301-DPB110601 DPA10301-DPB11101 DPA10301-DPB11301 DPA10301-DPB11801 DPA10301-DPB12301 DPA10301-DPB13901 DPA10301-DPB14001 DPA10301-DPB14901 DPA10301-DPB15501 DPA10301-DPB16501 DPA10301-DPB17501 DPA10301-DPB18001 DPA10401-DPB10101 DPA10401-DPB10201 DPA10401-DPB10202 DPA10401-DPB10301 DPA10401-DPB10402 DPA10401-DPB10501 DPA10401-DPB110501 DPA10401-DPB11301 DPA10401-DPB113301 DPA10401-DPB11401 DPA10401-DPB14901 DQA10102-DQB10501 DQA10102-DQB10503 DQA10102-DQB10609 DQA10103-DQB10501 DQA10103-DQB10601 DQA10103-DQB10609
EHLKTAVQMAVFIHNFKRKGGIGGY

SEQ ID NO: 3213 - protein, 13 aa, Human immunodeficiency virus 1
  source 1..13: note = HLAs: DRB1_1001 DPA10103-DPB10101 DPA10103-DPB11101 DPA10103-DPB11501 DPA10103-DPB11601 DPA10103-DPB11901 DPA10103-DPB12001 DPA10103-DPB15001 DPA10104-DPB10101 DPA10104-DPB11501 DPA10105-DPB10101 DPA10105-DPB15001 DPA10301-DPB10101 DPA10301-DPB10201 DPA10301-DPB10202 DPA10301-DPB110601 DPA10301-DPB11801 DPA10301-DPB14001 DPA10301-DPB16501 DPA10401-DPB10101 DPA10401-DPB10202 DPA10401-DPB10301 DPA10401-DPB10501 DPA10401-DPB11401 DQA10102-DQB10501
EIYKRWIILGLNK

SEQ ID NO: 3214 - protein, 14 aa, Human immunodeficiency virus 1
  source 1..14: note = HLAs: DRB1_0101 DRB1_0405 DRB1_0408 DRB1_0410 DRB1_0701 DRB1_0801 DRB1_0813 DRB1_1001 DRB1_1104 DRB1_1114 DRB1_1302 DRB1_1406 DRB1_1501 DRB1_1502 DRB1_1601 DRB1_1602 DPA10103-DPB10101 DPA10103-DPB10201 DPA10103-DPB10202 DPA10103-DPB10301 DPA10103-DPB10401 DPA10103-DPB10501 DPA10103-DPB10601 DPA10103-DPB11101 DPA10103-DPB112401 DPA10103-DPB112601 DPA10103-DPB11301 DPA10103-DPB113101 DPA10103-DPB113301 DPA10103-DPB11401 DPA10103-DPB11501 DPA10103-DPB11601 DPA10103-DPB11701 DPA10103-DPB11801 DPA10103-DPB11901 DPA10103-DPB12001 DPA10103-DPB12101 DPA10103-DPB12301 DPA10103-DPB12901 DPA10103-DPB13001 DPA10103-DPB13101 DPA10103-DPB13401 DPA10103-DPB13901 DPA10103-DPB14001 DPA10103-DPB14101 DPA10103-DPB14801 DPA10103-DPB15001 DPA10103-DPB15501 DPA10103-DPB15901 DPA10104-DPB10101 DPA10104-DPB10301 DPA10104-DPB11301 DPA10104-DPB11501 DPA10105-DPB10101 DPA10105-DPB10301 DPA10105-DPB10401 DPA10105-DPB11801 DPA10105-DPB15001 DPA10106-DPB10101 DPA10106-DPB11101 DPA10201-DPB10101 DPA10201-DPB10202; note = HLAs: DPA10201-DPB110601 DPA10201-DPB11101 DPA10201-DPB11501 DPA10201-DPB11601 DPA10201-DPB11901 DPA10201-DPB15501 DPA10202-DPB10101 DPA10202-DPB10201 DPA10202-DPB10202 DPA10202-DPB10401 DPA10202-DPB10501 DPA10202-DPB110601 DPA10202-DPB11101 DPA10202-DPB11301 DPA10202-DPB113101 DPA10202-DPB11701 DPA10202-DPB11801 DPA10202-DPB11901 DPA10202-DPB12101 DPA10202-DPB12901 DPA10202-DPB13001 DPA10202-DPB13101 DPA10202-DPB13801 DPA10202-DPB15501 DPA10202-DPB16501 DPA10202-DPB18501 DPA10301-DPB10101 DPA10301-DPB10201 DPA10301-DPB10202 DPA10301-DPB10301 DPA10301-DPB10401 DPA10301-DPB10402 DPA10301-DPB10901 DPA10301-DPB110501 DPA10301-DPB110601 DPA10301-DPB11101 DPA10301-DPB11301 DPA10301-DPB11701 DPA10301-DPB11801 DPA10301-DPB12301 DPA10301-DPB13901 DPA10301-DPB14001 DPA10301-DPB14901 DPA10301-DPB15501 DPA10301-DPB16501 DPA10301-DPB17501 DPA10301-DPB18001 DPA10401-DPB10101 DPA10401-DPB10201 DPA10401-DPB10202 DPA10401-DPB10301 DPA10401-DPB10402 DPA10401-DPB10501 DPA10401-DPB110501; note = HLAs: DPA10401-DPB11301 DPA10401-DPB113301 DPA10401-DPB11401 DPA10401-DPB14901 DQA10102-DQB10501 DQA10103-DQB10501
EIYKRWIILGLNKI

SEQ ID NO: 3215 - protein, 15 aa, Human immunodeficiency virus 1
  source 1..15: note = HLAs: DRB1_0101 DRB1_0102 DRB1_0103 DRB1_0401 DRB1_0402 DRB1_0404 DRB1_0405 DRB1_0408 DRB1_0410 DRB1_0701 DRB1_0801 DRB1_0802 DRB1_0803 DRB1_0804 DRB1_0806 DRB1_0809 DRB1_0813 DRB1_0901 DRB1_1001 DRB1_1101 DRB1_1102 DRB1_1103 DRB1_1104 DRB1_1114 DRB1_1201 DRB1_1202 DRB1_1301 DRB1_1302 DRB1_1303 DRB1_1304 DRB1_1305 DRB1_1312 DRB1_1401 DRB1_1402 DRB1_1403 DRB1_1404 DRB1_1405 DRB1_1406 DRB1_1407 DRB1_1454 DRB1_1501 DRB1_1502 DRB1_1503 DRB1_1601 DRB1_1602 DPA10103-DPB10101 DPA10103-DPB10201 DPA10103-DPB10202 DPA10103-DPB10301 DPA10103-DPB10401 DPA10103-DPB10402 DPA10103-DPB10501 DPA10103-DPB10601 DPA10103-DPB10901 DPA10103-DPB11001 DPA10103-DPB110501 DPA10103-DPB11101 DPA10103-DPB112401 DPA10103-DPB112601 DPA10103-DPB11301 DPA10103-DPB113101 DPA10103-DPB113301 DPA10103-DPB11401 DPA10103-DPB11501 DPA10103-DPB11601 DPA10103-DPB11701 DPA10103-DPB11801 DPA10103-DPB11901 DPA10103-DPB12001 DPA10103-DPB12101 DPA10103-DPB12301 DPA10103-DPB12901 DPA10103-DPB13001 DPA10103-DPB13101; note = HLAs: DPA10103-DPB13401 DPA10103-DPB13901 DPA10103-DPB14001 DPA10103-DPB14101 DPA10103-DPB14801 DPA10103-DPB14901 DPA10103-DPB15001 DPA10103-DPB15101 DPA10103-DPB15501 DPA10103-DPB15901 DPA10103-DPB18001 DPA10104-DPB10101 DPA10104-DPB10301 DPA10104-DPB11001 DPA10104-DPB11301 DPA10104-DPB11501 DPA10105-DPB10101 DPA10105-DPB10301 DPA10105-DPB10401 DPA10105-DPB11801 DPA10105-DPB15001 DPA10106-DPB10101 DPA10106-DPB11101 DPA10201-DPB10101 DPA10201-DPB10201 DPA10201-DPB10202 DPA10201-DPB10301 DPA10201-DPB10501 DPA10201-DPB10601 DPA10201-DPB110601 DPA10201-DPB11101 DPA10201-DPB11301 DPA10201-DPB113101 DPA10201-DPB113301 DPA10201-DPB11501 DPA10201-DPB11601 DPA10201-DPB11701 DPA10201-DPB11801 DPA10201-DPB11901 DPA10201-DPB13001 DPA10201-DPB13401 DPA10201-DPB14501 DPA10201-DPB15501 DPA10201-DPB19101 DPA10202-DPB10101 DPA10202-DPB10201 DPA10202-DPB10202 DPA10202-DPB10301 DPA10202-DPB10401 DPA10202-DPB10402 DPA10202-DPB10501 DPA10202-DPB10901 DPA10202-DPB110001 DPA10202-DPB110501; note = HLAs: DPA10202-DPB110601 DPA10202-DPB11101 DPA10202-DPB11301 DPA10202-DPB113101 DPA10202-DPB11401 DPA10202-DPB11701 DPA10202-DPB11801 DPA10202-DPB11901 DPA10202-DPB12101 DPA10202-DPB12901 DPA10202-DPB13001 DPA10202-DPB13101 DPA10202-DPB13801 DPA10202-DPB14501 DPA10202-DPB15501 DPA10202-DPB16501 DPA10202-DPB18501 DPA10301-DPB10101 DPA10301-DPB10201 DPA10301-DPB10202 DPA10301-DPB10301 DPA10301-DPB10401 DPA10301-DPB10402 DPA10301-DPB10901 DPA10301-DPB110501 DPA10301-DPB110601 DPA10301-DPB11101 DPA10301-DPB11301 DPA10301-DPB11701 DPA10301-DPB11801 DPA10301-DPB12301 DPA10301-DPB13901 DPA10301-DPB14001 DPA10301-DPB14901 DPA10301-DPB15501 DPA10301-DPB16501 DPA10301-DPB17501 DPA10301-DPB18001 DPA10401-DPB10101 DPA10401-DPB10201 DPA10401-DPB10202 DPA10401-DPB10301 DPA10401-DPB10402 DPA10401-DPB10501 DPA10401-DPB110501 DPA10401-DPB11301 DPA10401-DPB113301 DPA10401-DPB11401 DPA10401-DPB14901 DQA10102-DQB10501 DQA10102-DQB10503 DQA10102-DQB10609 DQA10103-DQB10501 DQA10103-DQB10503; note = HLAs: DQA10103-DQB10609 DQA10505-DQB10402
EIYKRWIILGLNKIV

SEQ ID NO: 3216 - protein, 16 aa, Human immunodeficiency virus 1
  source 1..16: note = HLAs: DRB1_0101 DRB1_0102 DRB1_0103 DRB1_0401 DRB1_0402 DRB1_0404 DRB1_0405 DRB1_0408 DRB1_0410 DRB1_0701 DRB1_0801 DRB1_0802 DRB1_0803 DRB1_0804 DRB1_0806 DRB1_0809 DRB1_0813 DRB1_0901 DRB1_1001 DRB1_1101 DRB1_1102 DRB1_1103 DRB1_1104 DRB1_1114 DRB1_1201 DRB1_1202 DRB1_1301 DRB1_1302 DRB1_1303 DRB1_1304 DRB1_1305 DRB1_1312 DRB1_1401 DRB1_1402 DRB1_1403 DRB1_1404 DRB1_1405 DRB1_1406 DRB1_1407 DRB1_1418 DRB1_1454 DRB1_1501 DRB1_1502 DRB1_1503 DRB1_1601 DRB1_1602 DPA10103-DPB10101 DPA10103-DPB10201 DPA10103-DPB10202 DPA10103-DPB10301 DPA10103-DPB10401 DPA10103-DPB10402 DPA10103-DPB10501 DPA10103-DPB10601 DPA10103-DPB10901 DPA10103-DPB11001 DPA10103-DPB110501 DPA10103-DPB11101 DPA10103-DPB112401 DPA10103-DPB112601 DPA10103-DPB11301 DPA10103-DPB113101 DPA10103-DPB113301 DPA10103-DPB11401 DPA10103-DPB11501 DPA10103-DPB11601 DPA10103-DPB11701 DPA10103-DPB11801 DPA10103-DPB11901 DPA10103-DPB12001 DPA10103-DPB12101 DPA10103-DPB12301 DPA10103-DPB12901 DPA10103-DPB13001 DPA10103-DPB13101; note = HLAs: DPA10103-DPB13401 DPA10103-DPB13901 DPA10103-DPB14001 DPA10103-DPB14101 DPA10103-DPB14801 DPA10103-DPB14901 DPA10103-DPB15001 DPA10103-DPB15101 DPA10103-DPB15501 DPA10103-DPB15901 DPA10103-DPB18001 DPA10104-DPB10101 DPA10104-DPB10301 DPA10104-DPB11001 DPA10104-DPB11301 DPA10104-DPB11501 DPA10105-DPB10101 DPA10105-DPB10301 DPA10105-DPB10401 DPA10105-DPB11801 DPA10105-DPB15001 DPA10106-DPB10101 DPA10106-DPB11101 DPA10201-DPB10101 DPA10201-DPB10201 DPA10201-DPB10202 DPA10201-DPB10301 DPA10201-DPB10401 DPA10201-DPB10501 DPA10201-DPB10601 DPA10201-DPB10901 DPA10201-DPB11001 DPA10201-DPB110601 DPA10201-DPB11101 DPA10201-DPB11301 DPA10201-DPB113101 DPA10201-DPB113301 DPA10201-DPB11401 DPA10201-DPB11501 DPA10201-DPB11601 DPA10201-DPB11701 DPA10201-DPB11801 DPA10201-DPB11901 DPA10201-DPB12601 DPA10201-DPB13001 DPA10201-DPB13401 DPA10201-DPB14501 DPA10201-DPB15501 DPA10201-DPB19101 DPA10202-DPB10101 DPA10202-DPB10201 DPA10202-DPB10202 DPA10202-DPB10301 DPA10202-DPB10401 DPA10202-DPB10402; note = HLAs: DPA10202-DPB10501 DPA10202-DPB10901 DPA10202-DPB110001 DPA10202-DPB110501 DPA10202-DPB110601 DPA10202-DPB11101 DPA10202-DPB11301 DPA10202-DPB113101 DPA10202-DPB11401 DPA10202-DPB11701 DPA10202-DPB11801 DPA10202-DPB11901 DPA10202-DPB12101 DPA10202-DPB12901 DPA10202-DPB13001 DPA10202-DPB13101 DPA10202-DPB13801 DPA10202-DPB14501 DPA10202-DPB15501 DPA10202-DPB16501 DPA10202-DPB18501 DPA10301-DPB10101 DPA10301-DPB10201 DPA10301-DPB10202 DPA10301-DPB10301 DPA10301-DPB10401 DPA10301-DPB10402 DPA10301-DPB10901 DPA10301-DPB110501 DPA10301-DPB110601 DPA10301-DPB11101 DPA10301-DPB11301 DPA10301-DPB11701 DPA10301-DPB11801 DPA10301-DPB12301 DPA10301-DPB13901 DPA10301-DPB14001 DPA10301-DPB14901 DPA10301-DPB15501 DPA10301-DPB16501 DPA10301-DPB17501 DPA10301-DPB18001 DPA10401-DPB10101 DPA10401-DPB10201 DPA10401-DPB10202 DPA10401-DPB10301 DPA10401-DPB10402 DPA10401-DPB10501 DPA10401-DPB110501 DPA10401-DPB11301 DPA10401-DPB113301 DPA10401-DPB11401 DPA10401-DPB14901 DQA10102-DQB10501; note = HLAs: DQA10102-DQB10503 DQA10102-DQB10609 DQA10103-DQB10501 DQA10103-DQB10503 DQA10103-DQB10609
EIYKRWIILGLNKIVR

SEQ ID NO: 3217 - protein, 17 aa, Human immunodeficiency virus 1
  source 1..17: note = HLAs: DRB1_0101 DRB1_0102 DRB1_0103 DRB1_0301 DRB1_0401 DRB1_0402 DRB1_0404 DRB1_0405 DRB1_0408 DRB1_0410 DRB1_0701 DRB1_0801 DRB1_0802 DRB1_0803 DRB1_0804 DRB1_0806 DRB1_0809 DRB1_0813 DRB1_0901 DRB1_1001 DRB1_1101 DRB1_1102 DRB1_1103 DRB1_1104 DRB1_1114 DRB1_1201 DRB1_1202 DRB1_1301 DRB1_1302 DRB1_1303 DRB1_1304 DRB1_1305 DRB1_1312 DRB1_1401 DRB1_1402 DRB1_1403 DRB1_1404 DRB1_1405 DRB1_1406 DRB1_1407 DRB1_1418 DRB1_1454 DRB1_1501 DRB1_1502 DRB1_1503 DRB1_1601 DRB1_1602 DPA10103-DPB10101 DPA10103-DPB10201 DPA10103-DPB10202 DPA10103-DPB10301 DPA10103-DPB10401 DPA10103-DPB10402 DPA10103-DPB10501 DPA10103-DPB10601 DPA10103-DPB10901 DPA10103-DPB11001 DPA10103-DPB110501 DPA10103-DPB11101 DPA10103-DPB112401 DPA10103-DPB112601 DPA10103-DPB11301 DPA10103-DPB113101 DPA10103-DPB113301 DPA10103-DPB11401 DPA10103-DPB11501 DPA10103-DPB11601 DPA10103-DPB11701 DPA10103-DPB11801 DPA10103-DPB11901 DPA10103-DPB12001 DPA10103-DPB12101 DPA10103-DPB12301 DPA10103-DPB12901 DPA10103-DPB13001; note = HLAs: DPA10103-DPB13101 DPA10103-DPB13401 DPA10103-DPB13901 DPA10103-DPB14001 DPA10103-DPB14101 DPA10103-DPB14801 DPA10103-DPB14901 DPA10103-DPB15001 DPA10103-DPB15101 DPA10103-DPB15501 DPA10103-DPB15901 DPA10103-DPB18001 DPA10104-DPB10101 DPA10104-DPB10301 DPA10104-DPB11001 DPA10104-DPB11301 DPA10104-DPB11501 DPA10105-DPB10101 DPA10105-DPB10301 DPA10105-DPB10401 DPA10105-DPB11801 DPA10105-DPB15001 DPA10106-DPB10101 DPA10106-DPB11101 DPA10201-DPB10101 DPA10201-DPB10201 DPA10201-DPB10202 DPA10201-DPB10301 DPA10201-DPB10401 DPA10201-DPB10501 DPA10201-DPB10601 DPA10201-DPB11001 DPA10201-DPB110601 DPA10201-DPB11101 DPA10201-DPB11301 DPA10201-DPB113101 DPA10201-DPB113301 DPA10201-DPB11401 DPA10201-DPB11501 DPA10201-DPB11601 DPA10201-DPB11701 DPA10201-DPB11801 DPA10201-DPB11901 DPA10201-DPB13001 DPA10201-DPB13401 DPA10201-DPB14501 DPA10201-DPB15501 DPA10201-DPB19101 DPA10202-DPB10101 DPA10202-DPB10201 DPA10202-DPB10202 DPA10202-DPB10301 DPA10202-DPB10401 DPA10202-DPB10402 DPA10202-DPB10501; note = HLAs: DPA10202-DPB10901 DPA10202-DPB110001 DPA10202-DPB110501 DPA10202-DPB110601 DPA10202-DPB11101 DPA10202-DPB11301 DPA10202-DPB113101 DPA10202-DPB11401 DPA10202-DPB11701 DPA10202-DPB11801 DPA10202-DPB11901 DPA10202-DPB12101 DPA10202-DPB12901 DPA10202-DPB13001 DPA10202-DPB13101 DPA10202-DPB13801 DPA10202-DPB14501 DPA10202-DPB15501 DPA10202-DPB16501 DPA10202-DPB18501 DPA10301-DPB10101 DPA10301-DPB10201 DPA10301-DPB10202 DPA10301-DPB10301 DPA10301-DPB10401 DPA10301-DPB10402 DPA10301-DPB10901 DPA10301-DPB110501 DPA10301-DPB110601 DPA10301-DPB11101 DPA10301-DPB11301 DPA10301-DPB11701 DPA10301-DPB11801 DPA10301-DPB12301 DPA10301-DPB13901 DPA10301-DPB14001 DPA10301-DPB14901 DPA10301-DPB15501 DPA10301-DPB16501 DPA10301-DPB17501 DPA10301-DPB18001 DPA10401-DPB10101 DPA10401-DPB10201 DPA10401-DPB10202 DPA10401-DPB10301 DPA10401-DPB10402 DPA10401-DPB10501 DPA10401-DPB110501 DPA10401-DPB11301 DPA10401-DPB113301 DPA10401-DPB11401 DPA10401-DPB14901 DQA10102-DQB10501 DQA10102-DQB10503; note = HLAs: DQA10102-DQB10601 DQA10102-DQB10609 DQA10103-DQB10501 DQA10103-DQB10503 DQA10103-DQB10601 DQA10103-DQB10602 DQA10103-DQB10608 DQA10103-DQB10609
EIYKRWIILGLNKIVRM

SEQ ID NO: 3218 - protein, 18 aa, Human immunodeficiency virus 1
  source 1..18: note = HLAs: DRB1_0101 DRB1_0102 DRB1_0401 DRB1_0404 DRB1_0405 DRB1_0408 DRB1_0410 DRB1_0701 DRB1_0801 DRB1_0802 DRB1_0803 DRB1_0804 DRB1_0806 DRB1_0809 DRB1_0813 DRB1_0901 DRB1_1001 DRB1_1101 DRB1_1102 DRB1_1103 DRB1_1104 DRB1_1114 DRB1_1201 DRB1_1202 DRB1_1301 DRB1_1302 DRB1_1304 DRB1_1305 DRB1_1312 DRB1_1401 DRB1_1402 DRB1_1403 DRB1_1404 DRB1_1405 DRB1_1406 DRB1_1407 DRB1_1454 DRB1_1501 DRB1_1502 DRB1_1503 DRB1_1601 DRB1_1602 DPA10103-DPB10101 DPA10103-DPB10201 DPA10103-DPB10202 DPA10103-DPB10301 DPA10103-DPB10401 DPA10103-DPB10501 DPA10103-DPB10601 DPA10103-DPB11101 DPA10103-DPB112401 DPA10103-DPB112601 DPA10103-DPB11301 DPA10103-DPB113301 DPA10103-DPB11501 DPA10103-DPB11601 DPA10103-DPB11801 DPA10103-DPB11901 DPA10103-DPB12001 DPA10103-DPB12101 DPA10103-DPB12301 DPA10103-DPB12901 DPA10103-DPB13001 DPA10103-DPB13101 DPA10103-DPB13401 DPA10103-DPB13901 DPA10103-DPB14001 DPA10103-DPB14101 DPA10103-DPB14801 DPA10103-DPB15001 DPA10103-DPB15501 DPA10104-DPB10101 DPA10104-DPB10301; note = HLAs: DPA10104-DPB11301 DPA10104-DPB11501 DPA10105-DPB10101 DPA10105-DPB10301 DPA10105-DPB10401 DPA10105-DPB11801 DPA10105-DPB15001 DPA10106-DPB10101 DPA10106-DPB11101 DPA10201-DPB10101 DPA10201-DPB10201 DPA10201-DPB10202 DPA10201-DPB10501 DPA10201-DPB110601 DPA10201-DPB11101 DPA10201-DPB11501 DPA10201-DPB11601 DPA10201-DPB11801 DPA10201-DPB11901 DPA10201-DPB15501 DPA10202-DPB10101 DPA10202-DPB10201 DPA10202-DPB10202 DPA10202-DPB10401 DPA10202-DPB10501 DPA10202-DPB110001 DPA10202-DPB110601 DPA10202-DPB11101 DPA10202-DPB11301 DPA10202-DPB113101 DPA10202-DPB11701 DPA10202-DPB11801 DPA10202-DPB11901 DPA10202-DPB12101 DPA10202-DPB13001 DPA10202-DPB13101 DPA10202-DPB13801 DPA10202-DPB15501 DPA10202-DPB16501 DPA10301-DPB10101 DPA10301-DPB10201 DPA10301-DPB10202 DPA10301-DPB10301 DPA10301-DPB10401 DPA10301-DPB10402 DPA10301-DPB10901 DPA10301-DPB110501 DPA10301-DPB110601 DPA10301-DPB11101 DPA10301-DPB11301 DPA10301-DPB11701 DPA10301-DPB11801 DPA10301-DPB12301 DPA10301-DPB13901; note = HLAs: DPA10301-DPB14001 DPA10301-DPB14901 DPA10301-DPB15501 DPA10301-DPB16501 DPA10301-DPB17501 DPA10301-DPB18001 DPA10401-DPB10101 DPA10401-DPB10201 DPA10401-DPB10202 DPA10401-DPB10301 DPA10401-DPB10402 DPA10401-DPB10501 DPA10401-DPB110501 DPA10401-DPB11301 DPA10401-DPB113301 DPA10401-DPB11401 DPA10401-DPB14901 DQA10102-DQB10501 DQA10102-DQB10503 DQA10102-DQB10609 DQA10103-DQB10501 DQA10103-DQB10609
EIYKRWIILGLNKIVRMY

SEQ ID NO: 3219 - protein, 19 aa, Human immunodeficiency virus 1
  source 1..19: note = HLAs: DRB1_0101 DRB1_0102 DRB1_0103 DRB1_0301 DRB1_0401 DRB1_0402 DRB1_0404 DRB1_0405 DRB1_0408 DRB1_0410 DRB1_0701 DRB1_0801 DRB1_0802 DRB1_0803 DRB1_0804 DRB1_0806 DRB1_0809 DRB1_0813 DRB1_0901 DRB1_1001 DRB1_1101 DRB1_1102 DRB1_1103 DRB1_1104 DRB1_1114 DRB1_1201 DRB1_1202 DRB1_1301 DRB1_1302 DRB1_1303 DRB1_1304 DRB1_1305 DRB1_1312 DRB1_1401 DRB1_1402 DRB1_1403 DRB1_1404 DRB1_1405 DRB1_1406 DRB1_1407 DRB1_1418 DRB1_1454 DRB1_1501 DRB1_1502 DRB1_1503 DRB1_1601 DRB1_1602 DPA10103-DPB10101 DPA10103-DPB10201 DPA10103-DPB10202 DPA10103-DPB10301 DPA10103-DPB10401 DPA10103-DPB10402 DPA10103-DPB10501 DPA10103-DPB10601 DPA10103-DPB10901 DPA10103-DPB11001 DPA10103-DPB110501 DPA10103-DPB11101 DPA10103-DPB112401 DPA10103-DPB112601 DPA10103-DPB11301 DPA10103-DPB113101 DPA10103-DPB113301 DPA10103-DPB11401 DPA10103-DPB11501 DPA10103-DPB11601 DPA10103-DPB11701 DPA10103-DPB11801 DPA10103-DPB11901 DPA10103-DPB12001 DPA10103-DPB12101 DPA10103-DPB12301 DPA10103-DPB12901 DPA10103-DPB13001; note = HLAs: DPA10103-DPB13101 DPA10103-DPB13401 DPA10103-DPB13901 DPA10103-DPB14001 DPA10103-DPB14101 DPA10103-DPB14801 DPA10103-DPB14901 DPA10103-DPB15001 DPA10103-DPB15101 DPA10103-DPB15501 DPA10103-DPB15901 DPA10103-DPB18001 DPA10104-DPB10101 DPA10104-DPB10301 DPA10104-DPB11001 DPA10104-DPB11301 DPA10104-DPB11501 DPA10105-DPB10101 DPA10105-DPB10301 DPA10105-DPB10401 DPA10105-DPB11801 DPA10105-DPB15001 DPA10106-DPB10101 DPA10106-DPB11101 DPA10201-DPB10101 DPA10201-DPB10201 DPA10201-DPB10202 DPA10201-DPB10501 DPA10201-DPB110601 DPA10201-DPB11101 DPA10201-DPB11301 DPA10201-DPB113101 DPA10201-DPB113301 DPA10201-DPB11501 DPA10201-DPB11601 DPA10201-DPB11701 DPA10201-DPB11801 DPA10201-DPB11901 DPA10201-DPB13001 DPA10201-DPB15501 DPA10201-DPB19101 DPA10202-DPB10101 DPA10202-DPB10201 DPA10202-DPB10202 DPA10202-DPB10401 DPA10202-DPB10402 DPA10202-DPB10501 DPA10202-DPB10901 DPA10202-DPB110001 DPA10202-DPB110501 DPA10202-DPB110601 DPA10202-DPB11101 DPA10202-DPB11301 DPA10202-DPB113101; note = HLAs: DPA10202-DPB11701 DPA10202-DPB11801 DPA10202-DPB11901 DPA10202-DPB12101 DPA10202-DPB12901 DPA10202-DPB13001 DPA10202-DPB13101 DPA10202-DPB13801 DPA10202-DPB15501 DPA10202-DPB16501 DPA10202-DPB18501 DPA10301-DPB10101 DPA10301-DPB10201 DPA10301-DPB10202 DPA10301-DPB10301 DPA10301-DPB10401 DPA10301-DPB10402 DPA10301-DPB10901 DPA10301-DPB110501 DPA10301-DPB110601 DPA10301-DPB11101 DPA10301-DPB11301 DPA10301-DPB11701 DPA10301-DPB11801 DPA10301-DPB12301 DPA10301-DPB13901 DPA10301-DPB14001 DPA10301-DPB14901 DPA10301-DPB15501 DPA10301-DPB16501 DPA10301-DPB17501 DPA10301-DPB18001 DPA10401-DPB10101 DPA10401-DPB10201 DPA10401-DPB10202 DPA10401-DPB10301 DPA10401-DPB10402 DPA10401-DPB10501 DPA10401-DPB110501 DPA10401-DPB11301 DPA10401-DPB113301 DPA10401-DPB11401 DPA10401-DPB14901 DQA10102-DQB10501 DQA10102-DQB10503 DQA10102-DQB10609 DQA10103-DQB10501 DQA10103-DQB10503 DQA10103-DQB10601 DQA10103-DQB10602 DQA10103-DQB10603 DQA10103-DQB10608 DQA10103-DQB10609
EIYKRWIILGLNKIVRMYS

SEQ ID NO: 3220 - protein, 20 aa, Human immunodeficiency virus 1
  source 1..20: note = HLAs: DRB1_0101 DRB1_0102 DRB1_0103 DRB1_0301 DRB1_0401 DRB1_0402 DRB1_0404 DRB1_0405 DRB1_0408 DRB1_0410 DRB1_0701 DRB1_0801 DRB1_0802 DRB1_0803 DRB1_0804 DRB1_0806 DRB1_0809 DRB1_0813 DRB1_0901 DRB1_1001 DRB1_1101 DRB1_1102 DRB1_1103 DRB1_1104 DRB1_1114 DRB1_1201 DRB1_1202 DRB1_1301 DRB1_1302 DRB1_1303 DRB1_1304 DRB1_1305 DRB1_1312 DRB1_1401 DRB1_1402 DRB1_1403 DRB1_1404 DRB1_1405 DRB1_1406 DRB1_1407 DRB1_1418 DRB1_1454 DRB1_1501 DRB1_1502 DRB1_1503 DRB1_1601 DRB1_1602 DPA10103-DPB10101 DPA10103-DPB10201 DPA10103-DPB10202 DPA10103-DPB10301 DPA10103-DPB10401 DPA10103-DPB10402 DPA10103-DPB10501 DPA10103-DPB10601 DPA10103-DPB10901 DPA10103-DPB11001 DPA10103-DPB110501 DPA10103-DPB11101 DPA10103-DPB112401 DPA10103-DPB112601 DPA10103-DPB11301 DPA10103-DPB113101 DPA10103-DPB113301 DPA10103-DPB11401 DPA10103-DPB11501 DPA10103-DPB11601 DPA10103-DPB11701 DPA10103-DPB11801 DPA10103-DPB11901 DPA10103-DPB12001 DPA10103-DPB12101 DPA10103-DPB12301 DPA10103-DPB12901 DPA10103-DPB13001; note = HLAs: DPA10103-DPB13101 DPA10103-DPB13401 DPA10103-DPB13901 DPA10103-DPB14001 DPA10103-DPB14101 DPA10103-DPB14801 DPA10103-DPB14901 DPA10103-DPB15001 DPA10103-DPB15101 DPA10103-DPB15501 DPA10103-DPB15901 DPA10103-DPB18001 DPA10104-DPB10101 DPA10104-DPB10301 DPA10104-DPB11001 DPA10104-DPB11301 DPA10104-DPB11501 DPA10105-DPB10101 DPA10105-DPB10301 DPA10105-DPB10401 DPA10105-DPB11801 DPA10105-DPB15001 DPA10106-DPB10101 DPA10106-DPB11101 DPA10201-DPB10101 DPA10201-DPB10201 DPA10201-DPB10202 DPA10201-DPB10501 DPA10201-DPB10601 DPA10201-DPB10901 DPA10201-DPB110601 DPA10201-DPB11101 DPA10201-DPB11301 DPA10201-DPB113101 DPA10201-DPB113301 DPA10201-DPB11501 DPA10201-DPB11601 DPA10201-DPB11701 DPA10201-DPB11801 DPA10201-DPB11901 DPA10201-DPB13001 DPA10201-DPB13401 DPA10201-DPB15501 DPA10201-DPB19101 DPA10202-DPB10101 DPA10202-DPB10201 DPA10202-DPB10202 DPA10202-DPB10301 DPA10202-DPB10401 DPA10202-DPB10402 DPA10202-DPB10501 DPA10202-DPB10901 DPA10202-DPB110001 DPA10202-DPB110501; note = HLAs: DPA10202-DPB110601 DPA10202-DPB11101 DPA10202-DPB11301 DPA10202-DPB113101 DPA10202-DPB11401 DPA10202-DPB11701 DPA10202-DPB11801 DPA10202-DPB11901 DPA10202-DPB12101 DPA10202-DPB12901 DPA10202-DPB13001 DPA10202-DPB13101 DPA10202-DPB13801 DPA10202-DPB14501 DPA10202-DPB15501 DPA10202-DPB16501 DPA10202-DPB18501 DPA10301-DPB10101 DPA10301-DPB10201 DPA10301-DPB10202 DPA10301-DPB10301 DPA10301-DPB10401 DPA10301-DPB10402 DPA10301-DPB10901 DPA10301-DPB110501 DPA10301-DPB110601 DPA10301-DPB11101 DPA10301-DPB11301 DPA10301-DPB11701 DPA10301-DPB11801 DPA10301-DPB12301 DPA10301-DPB13901 DPA10301-DPB14001 DPA10301-DPB14901 DPA10301-DPB15501 DPA10301-DPB16501 DPA10301-DPB17501 DPA10301-DPB18001 DPA10401-DPB10101 DPA10401-DPB10201 DPA10401-DPB10202 DPA10401-DPB10301 DPA10401-DPB10402 DPA10401-DPB10501 DPA10401-DPB110501 DPA10401-DPB11301 DPA10401-DPB113301 DPA10401-DPB11401 DPA10401-DPB14901 DQA10102-DQB10501 DQA10102-DQB10503 DQA10102-DQB10601 DQA10102-DQB10602 DQA10102-DQB10609; note = HLAs: DQA10102-DQB10611 DQA10103-DQB10501 DQA10103-DQB10503 DQA10103-DQB10601 DQA10103-DQB10602 DQA10103-DQB10603 DQA10103-DQB10608 DQA10103-DQB10609
EIYKRWIILGLNKIVRMYSP

SEQ ID NO: 3221 - protein, 14 aa, Human immunodeficiency virus 1
  source 1..14: note = HLAs: DPA10103-DPB11501 DPA10104-DPB11501 DPA10202-DPB10101 DPA10301-DPB10101 DPA10301-DPB10201 DPA10301-DPB10202 DPA10301-DPB10401 DPA10301-DPB11801 DPA10301-DPB12301 DPA10301-DPB13901 DPA10301-DPB14001 DPA10301-DPB16501 DPA10401-DPB10101 DQA10102-DQB10501
EKAFSPEVIPMFSA

SEQ ID NO: 3222 - protein, 15 aa, Human immunodeficiency virus 1
  source 1..15: note = HLAs: DRB1_0101 DRB1_0401 DRB1_0405 DRB1_0408 DRB1_1001 DPA10103-DPB10101 DPA10103-DPB10201 DPA10103-DPB10202 DPA10103-DPB11501 DPA10103-DPB13101 DPA10103-DPB13401 DPA10103-DPB14801 DPA10103-DPB15001 DPA10104-DPB10101 DPA10104-DPB11501 DPA10105-DPB10101 DPA10105-DPB15001 DPA10106-DPB10101 DPA10201-DPB10101 DPA10201-DPB11501 DPA10202-DPB10101 DPA10202-DPB10202 DPA10202-DPB13101 DPA10301-DPB10101 DPA10301-DPB10201 DPA10301-DPB10202 DPA10301-DPB10401 DPA10301-DPB10402 DPA10301-DPB110501 DPA10301-DPB110601 DPA10301-DPB11801 DPA10301-DPB12301 DPA10301-DPB13901 DPA10301-DPB14001 DPA10301-DPB14901 DPA10301-DPB16501 DPA10301-DPB17501 DPA10301-DPB18001 DPA10401-DPB10101 DPA10401-DPB10201 DPA10401-DPB10202 DPA10401-DPB10501 DQA10102-DQB10501 DQA10103-DQB10609 DQA10201-DQB10303 DQA10505-DQB10402
EKAFSPEVIPMFSAL

SEQ ID NO: 3223 - protein, 16 aa, Human immunodeficiency virus 1
  source 1..16: note = HLAs: DRB1_0101 DRB1_0401 DRB1_0404 DRB1_0405 DRB1_0408 DRB1_0410 DRB1_1001 DRB1_1602 DPA10103-DPB10101 DPA10103-DPB11501 DPA10103-DPB13101 DPA10103-DPB15001 DPA10104-DPB10101 DPA10104-DPB11501 DPA10105-DPB10101 DPA10105-DPB15001 DPA10106-DPB10101 DPA10201-DPB10101 DPA10201-DPB11501 DPA10202-DPB10101 DPA10202-DPB10202 DPA10202-DPB13101 DPA10301-DPB10101 DPA10301-DPB10201 DPA10301-DPB10202 DPA10301-DPB10401 DPA10301-DPB10402 DPA10301-DPB110501 DPA10301-DPB110601 DPA10301-DPB11801 DPA10301-DPB12301 DPA10301-DPB13901 DPA10301-DPB14001 DPA10301-DPB14901 DPA10301-DPB16501 DPA10301-DPB17501 DPA10301-DPB18001 DPA10401-DPB10101 DPA10401-DPB10201 DPA10401-DPB10202 DPA10401-DPB10501 DQA10102-DQB10501 DQA10102-DQB10503 DQA10102-DQB10609 DQA10103-DQB10501 DQA10103-DQB10609 DQA10201-DQB10303 DQA10505-DQB10402 DQA10506-DQB10303
EKAFSPEVIPMFSALS

SEQ ID NO: 3224 - protein, 17 aa, Human immunodeficiency virus 1
  source 1..17: note = HLAs: DRB1_0101 DRB1_0102 DRB1_0401 DRB1_0404 DRB1_0405 DRB1_0408 DRB1_0410 DRB1_0802 DRB1_0804 DRB1_0809 DRB1_0813 DRB1_0901 DRB1_1001 DRB1_1104 DRB1_1406 DRB1_1501 DRB1_1602 DPA10103-DPB10101 DPA10103-DPB11501 DPA10103-DPB13101 DPA10103-DPB13401 DPA10103-DPB15001 DPA10104-DPB10101 DPA10104-DPB11501 DPA10105-DPB10101 DPA10105-DPB15001 DPA10106-DPB10101 DPA10201-DPB10101 DPA10201-DPB11501 DPA10202-DPB10101 DPA10202-DPB10202 DPA10202-DPB13101 DPA10202-DPB16501 DPA10301-DPB10101 DPA10301-DPB10201 DPA10301-DPB10202 DPA10301-DPB10401 DPA10301-DPB10402 DPA10301-DPB110501 DPA10301-DPB110601 DPA10301-DPB11801 DPA10301-DPB12301 DPA10301-DPB13901 DPA10301-DPB14001 DPA10301-DPB14901 DPA10301-DPB16501 DPA10301-DPB17501 DPA10301-DPB18001 DPA10401-DPB10101 DPA10401-DPB10201 DPA10401-DPB10202 DPA10401-DPB10501 DQA10102-DQB10501 DQA10102-DQB10503 DQA10102-DQB10609 DQA10103-DQB10501 DQA10103-DQB10609 DQA10201-DQB10303 DQA10505-DQB10402
EKAFSPEVIPMFSALSE

SEQ ID NO: 3225 - protein, 18 aa, Human immunodeficiency virus 1
  source 1..18: note = HLAs: DRB1_0101 DRB1_0404 DRB1_0408 DRB1_1001 DPA10103-DPB11501 DPA10104-DPB11501 DPA10202-DPB10101 DPA10301-DPB10101 DPA10301-DPB10201 DPA10301-DPB10202 DPA10301-DPB10401 DPA10301-DPB11801 DPA10301-DPB12301 DPA10301-DPB13901 DPA10301-DPB14001 DPA10301-DPB16501 DPA10401-DPB10101 DQA10102-DQB10501 DQA10103-DQB10501
EKAFSPEVIPMFSALSEG

SEQ ID NO: 3226 - protein, 19 aa, Human immunodeficiency virus 1
  source 1..19: note = HLAs: DRB1_0101 DRB1_0102 DRB1_0401 DRB1_0404 DRB1_0405 DRB1_0408 DRB1_0410 DRB1_0802 DRB1_0804 DRB1_0809 DRB1_0813 DRB1_0901 DRB1_1001 DRB1_1104 DRB1_1406 DRB1_1501 DRB1_1601 DRB1_1602 DPA10103-DPB10101 DPA10103-DPB11501 DPA10103-DPB13101 DPA10103-DPB15001 DPA10104-DPB10101 DPA10104-DPB11501 DPA10105-DPB10101 DPA10105-DPB15001 DPA10106-DPB10101 DPA10201-DPB10101 DPA10201-DPB11501 DPA10202-DPB10101 DPA10202-DPB10202 DPA10202-DPB13101 DPA10301-DPB10101 DPA10301-DPB10201 DPA10301-DPB10202 DPA10301-DPB10401 DPA10301-DPB10402 DPA10301-DPB110501 DPA10301-DPB110601 DPA10301-DPB11801 DPA10301-DPB12301 DPA10301-DPB13901 DPA10301-DPB14001 DPA10301-DPB14901 DPA10301-DPB16501 DPA10301-DPB18001 DPA10401-DPB10101 DPA10401-DPB10201 DPA10401-DPB10202 DPA10401-DPB10501 DQA10102-DQB10501 DQA10102-DQB10503 DQA10102-DQB10601 DQA10102-DQB10609 DQA10103-DQB10501 DQA10103-DQB10601 DQA10103-DQB10609 DQA10201-DQB10301 DQA10201-DQB10303 DQA10505-DQB10402 DQA10506-DQB10303
EKAFSPEVIPMFSALSEGA

SEQ ID NO: 3227 - protein, 20 aa, Human immunodeficiency virus 1
  source 1..20: note = HLAs: DRB1_0101 DRB1_0102 DRB1_0401 DRB1_0404 DRB1_0405 DRB1_0408 DRB1_0410 DRB1_0801 DRB1_0802 DRB1_0804 DRB1_0806 DRB1_0809 DRB1_0813 DRB1_0901 DRB1_1001 DRB1_1101 DRB1_1104 DRB1_1305 DRB1_1406 DRB1_1501 DRB1_1502 DRB1_1503 DRB1_1601 DRB1_1602 DPA10103-DPB10101 DPA10103-DPB10201 DPA10103-DPB11501 DPA10103-DPB11601 DPA10103-DPB13101 DPA10103-DPB13401 DPA10103-DPB14801 DPA10103-DPB15001 DPA10104-DPB10101 DPA10104-DPB11501 DPA10105-DPB10101 DPA10105-DPB15001 DPA10106-DPB10101 DPA10201-DPB10101 DPA10201-DPB11501 DPA10202-DPB10101 DPA10202-DPB10201 DPA10202-DPB10202 DPA10202-DPB110601 DPA10202-DPB11901 DPA10202-DPB13101 DPA10202-DPB15501 DPA10202-DPB16501 DPA10301-DPB10101 DPA10301-DPB10201 DPA10301-DPB10202 DPA10301-DPB10401 DPA10301-DPB10402 DPA10301-DPB110501 DPA10301-DPB110601 DPA10301-DPB11101 DPA10301-DPB11801 DPA10301-DPB12301 DPA10301-DPB13901 DPA10301-DPB14001 DPA10301-DPB14901 DPA10301-DPB15501 DPA10301-DPB16501 DPA10301-DPB17501 DPA10301-DPB18001 DPA10401-DPB10101; note = HLAs: DPA10401-DPB10201 DPA10401-DPB10202 DPA10401-DPB10301 DPA10401-DPB10501 DPA10401-DPB11401 DQA10102-DQB10501 DQA10102-DQB10503 DQA10102-DQB10601 DQA10102-DQB10602 DQA10102-DQB10609 DQA10102-DQB10611 DQA10103-DQB10501 DQA10103-DQB10503 DQA10103-DQB10601 DQA10103-DQB10602 DQA10103-DQB10604 DQA10103-DQB10608 DQA10103-DQB10609 DQA10201-DQB10301 DQA10201-DQB10303 DQA10501-DQB10301 DQA10501-DQB10319 DQA10503-DQB10301 DQA10505-DQB10301 DQA10505-DQB10309 DQA10505-DQB10319 DQA10505-DQB10402 DQA10506-DQB10303 DQA10508-DQB10301 DQA10509-DQB10301 DQA10601-DQB10301
EKAFSPEVIPMFSALSEGAT

SEQ ID NO: 3228 - protein, 21 aa, Human immunodeficiency virus 1
  source 1..21: note = HLAs: DRB1_0101 DRB1_0102 DRB1_0401 DRB1_0404 DRB1_0405 DRB1_0408 DRB1_0410 DRB1_0802 DRB1_0804 DRB1_0809 DRB1_0813 DRB1_0901 DRB1_1001 DRB1_1104 DRB1_1406 DRB1_1501 DRB1_1601 DRB1_1602 DPA10103-DPB10101 DPA10103-DPB11501 DPA10103-DPB15001 DPA10104-DPB10101 DPA10104-DPB11501 DPA10105-DPB10101 DPA10105-DPB15001 DPA10202-DPB10101 DPA10301-DPB10101 DPA10301-DPB10201 DPA10301-DPB10202 DPA10301-DPB10401 DPA10301-DPB110601 DPA10301-DPB11801 DPA10301-DPB12301 DPA10301-DPB13901 DPA10301-DPB14001 DPA10301-DPB16501 DPA10401-DPB10101 DPA10401-DPB10201 DPA10401-DPB10501 DQA10102-DQB10501 DQA10102-DQB10503 DQA10102-DQB10601 DQA10102-DQB10609 DQA10103-DQB10501 DQA10103-DQB10601 DQA10103-DQB10609 DQA10201-DQB10301 DQA10201-DQB10303 DQA10505-DQB10402 DQA10506-DQB10303
EKAFSPEVIPMFSALSEGATP

SEQ ID NO: 3229 - protein, 22 aa, Human immunodeficiency virus 1
  source 1..22: note = HLAs: DRB1_0101 DRB1_0102 DRB1_0401 DRB1_0404 DRB1_0405 DRB1_0408 DRB1_0410 DRB1_0802 DRB1_0804 DRB1_0806 DRB1_0809 DRB1_0813 DRB1_0901 DRB1_1001 DRB1_1104 DRB1_1406 DRB1_1501 DRB1_1601 DRB1_1602 DPA10103-DPB10101 DPA10103-DPB11501 DPA10103-DPB15001 DPA10104-DPB10101 DPA10104-DPB11501 DPA10105-DPB10101 DPA10105-DPB15001 DPA10202-DPB10101 DPA10301-DPB10101 DPA10301-DPB10201 DPA10301-DPB10202 DPA10301-DPB10401 DPA10301-DPB10402 DPA10301-DPB110501 DPA10301-DPB110601 DPA10301-DPB11801 DPA10301-DPB12301 DPA10301-DPB13901 DPA10301-DPB14001 DPA10301-DPB14901 DPA10301-DPB16501 DPA10301-DPB18001 DPA10401-DPB10101 DPA10401-DPB10201 DPA10401-DPB10202 DPA10401-DPB10501 DQA10102-DQB10501 DQA10102-DQB10503 DQA10102-DQB10601 DQA10102-DQB10609 DQA10103-DQB10501 DQA10103-DQB10601 DQA10103-DQB10609 DQA10201-DQB10301 DQA10201-DQB10303 DQA10501-DQB10301 DQA10501-DQB10319 DQA10503-DQB10301 DQA10505-DQB10301 DQA10505-DQB10309 DQA10505-DQB10319 DQA10505-DQB10402 DQA10506-DQB10303 DQA10508-DQB10301; note = HLAs: DQA10509-DQB10301
EKAFSPEVIPMFSALSEGATPQ

SEQ ID NO: 3230 - protein, 23 aa, Human immunodeficiency virus 1
  source 1..23: note = HLAs: DRB1_0101 DRB1_0102 DRB1_0401 DRB1_0404 DRB1_0405 DRB1_0408 DRB1_0410 DRB1_0802 DRB1_0804 DRB1_0806 DRB1_0809 DRB1_0813 DRB1_0901 DRB1_1001 DRB1_1104 DRB1_1406 DRB1_1501 DRB1_1601 DRB1_1602 DPA10103-DPB10101 DPA10103-DPB11501 DPA10103-DPB15001 DPA10104-DPB10101 DPA10104-DPB11501 DPA10105-DPB10101 DPA10105-DPB15001 DPA10202-DPB10101 DPA10301-DPB10101 DPA10301-DPB10201 DPA10301-DPB10202 DPA10301-DPB10401 DPA10301-DPB10402 DPA10301-DPB110501 DPA10301-DPB110601 DPA10301-DPB11801 DPA10301-DPB12301 DPA10301-DPB13901 DPA10301-DPB14001 DPA10301-DPB14901 DPA10301-DPB16501 DPA10301-DPB18001 DPA10401-DPB10101 DPA10401-DPB10201 DPA10401-DPB10202 DPA10401-DPB10501 DQA10102-DQB10501 DQA10102-DQB10503 DQA10102-DQB10601 DQA10102-DQB10609 DQA10103-DQB10501 DQA10103-DQB10601 DQA10103-DQB10609 DQA10201-DQB10301 DQA10201-DQB10303 DQA10501-DQB10301 DQA10501-DQB10319 DQA10503-DQB10301 DQA10505-DQB10301 DQA10505-DQB10309 DQA10505-DQB10319 DQA10505-DQB10402 DQA10506-DQB10303 DQA10508-DQB10301; note = HLAs: DQA10509-DQB10301
EKAFSPEVIPMFSALSEGATPQD

SEQ ID NO: 3231 - protein, 24 aa, Human immunodeficiency virus 1
  source 1..24: note = HLAs: DRB1_0101 DRB1_0102 DRB1_0401 DRB1_0404 DRB1_0405 DRB1_0408 DRB1_0410 DRB1_0802 DRB1_0804 DRB1_0806 DRB1_0809 DRB1_0813 DRB1_0901 DRB1_1001 DRB1_1104 DRB1_1406 DRB1_1501 DRB1_1601 DRB1_1602 DPA10103-DPB10101 DPA10103-DPB11501 DPA10103-DPB15001 DPA10104-DPB10101 DPA10104-DPB11501 DPA10105-DPB10101 DPA10105-DPB15001 DPA10202-DPB10101 DPA10301-DPB10101 DPA10301-DPB10201 DPA10301-DPB10202 DPA10301-DPB10401 DPA10301-DPB10402 DPA10301-DPB110501 DPA10301-DPB110601 DPA10301-DPB11801 DPA10301-DPB12301 DPA10301-DPB13901 DPA10301-DPB14001 DPA10301-DPB14901 DPA10301-DPB16501 DPA10301-DPB18001 DPA10401-DPB10101 DPA10401-DPB10201 DPA10401-DPB10202 DPA10401-DPB10501 DQA10102-DQB10501 DQA10102-DQB10503 DQA10102-DQB10601 DQA10102-DQB10609 DQA10102-DQB10611 DQA10103-DQB10501 DQA10103-DQB10601 DQA10103-DQB10609 DQA10201-DQB10301 DQA10201-DQB10303 DQA10401-DQB10301 DQA10401-DQB10319 DQA10501-DQB10301 DQA10501-DQB10319 DQA10503-DQB10301 DQA10505-DQB10301 DQA10505-DQB10309 DQA10505-DQB10319; note = HLAs: DQA10505-DQB10402 DQA10506-DQB10303 DQA10508-DQB10301 DQA10509-DQB10301 DQA10601-DQB10301
EKAFSPEVIPMFSALSEGATPQDL

SEQ ID NO: 3232 - protein, 25 aa, Human immunodeficiency virus 1
  source 1..25: note = HLAs: DRB1_0101 DRB1_0102 DRB1_0401 DRB1_0404 DRB1_0405 DRB1_0408 DRB1_0410 DRB1_0802 DRB1_0804 DRB1_0806 DRB1_0809 DRB1_0813 DRB1_0901 DRB1_1001 DRB1_1104 DRB1_1406 DRB1_1501 DRB1_1601 DRB1_1602 DPA10103-DPB10101 DPA10103-DPB11501 DPA10103-DPB15001 DPA10104-DPB10101 DPA10104-DPB11501 DPA10105-DPB10101 DPA10105-DPB15001 DPA10202-DPB10101 DPA10301-DPB10101 DPA10301-DPB10201 DPA10301-DPB10202 DPA10301-DPB10401 DPA10301-DPB10402 DPA10301-DPB110501 DPA10301-DPB110601 DPA10301-DPB11801 DPA10301-DPB12301 DPA10301-DPB13901 DPA10301-DPB14001 DPA10301-DPB14901 DPA10301-DPB16501 DPA10301-DPB18001 DPA10401-DPB10101 DPA10401-DPB10201 DPA10401-DPB10202 DPA10401-DPB10501 DQA10102-DQB10501 DQA10102-DQB10503 DQA10102-DQB10601 DQA10102-DQB10609 DQA10102-DQB10611 DQA10103-DQB10501 DQA10103-DQB10601 DQA10103-DQB10609 DQA10201-DQB10301 DQA10201-DQB10303 DQA10401-DQB10301 DQA10401-DQB10319 DQA10501-DQB10301 DQA10501-DQB10319 DQA10503-DQB10301 DQA10505-DQB10301 DQA10505-DQB10302 DQA10505-DQB10309; note = HLAs: DQA10505-DQB10319 DQA10505-DQB10402 DQA10506-DQB10303 DQA10508-DQB10301 DQA10509-DQB10301 DQA10601-DQB10301
EKAFSPEVIPMFSALSEGATPQDLN

SEQ ID NO: 3233 - protein, 14 aa, Human immunodeficiency virus 1
  source 1..14: note = HLAs: DQA10102-DQB10501
ELELAENREILKEP

SEQ ID NO: 3234 - protein, 15 aa, Human immunodeficiency virus 1
  source 1..15: note = HLAs: DRB1_0101 DRB1_1114 DRB1_1302 DQA10102-DQB10501
ELELAENREILKEPV

SEQ ID NO: 3235 - protein, 16 aa, Human immunodeficiency virus 1
  source 1..16: note = HLAs: DQA10102-DQB10501
ELELAENREILKEPVH

SEQ ID NO: 3236 - protein, 17 aa, Human immunodeficiency virus 1
  source 1..17: note = HLAs: DQA10102-DQB10501
ELELAENREILKEPVHG

SEQ ID NO: 3237 - protein, 15 aa, Human immunodeficiency virus 1
  source 1..15: note = HLAs: DPA10301-DPB10101 DPA10401-DPB10101 DQA10505-DQB10402
ELHPDKWTVQPIQLP

SEQ ID NO: 3238 - protein, 14 aa, Human immunodeficiency virus 1
  source 1..14: note = HLAs: DRB1_0804 DRB1_0806 DRB1_1102 DRB1_1103 DRB1_1104 DRB1_1301 DRB1_1304 DRB1_1406
ELKKIIGQVRDQAE

SEQ ID NO: 3239 - protein, 15 aa, Human immunodeficiency virus 1
  source 1..15: note = HLAs: DRB1_0101 DRB1_0102 DRB1_0404 DRB1_0410 DRB1_0801 DRB1_0804 DRB1_0806 DRB1_1001 DRB1_1101 DRB1_1102 DRB1_1103 DRB1_1104 DRB1_1301 DRB1_1304 DRB1_1305 DRB1_1406 DRB1_1501 DQA10102-DQB10501 DQA10102-DQB10609
ELKKIIGQVRDQAEH

SEQ ID NO: 3240 - protein, 16 aa, Human immunodeficiency virus 1
  source 1..16: note = HLAs: DRB1_0410 DRB1_0804 DRB1_0806 DRB1_1101 DRB1_1102 DRB1_1103 DRB1_1104 DRB1_1301 DRB1_1304 DRB1_1305 DRB1_1406 DQA10102-DQB10501 DQA10102-DQB10503 DQA10102-DQB10604 DQA10102-DQB10609
ELKKIIGQVRDQAEHL

SEQ ID NO: 3241 - protein, 17 aa, Human immunodeficiency virus 1
  source 1..17: note = HLAs: DRB1_0410 DRB1_0804 DRB1_0806 DRB1_1101 DRB1_1102 DRB1_1103 DRB1_1104 DRB1_1301 DRB1_1304 DRB1_1305 DRB1_1406 DQA10102-DQB10501 DQA10102-DQB10604 DQA10102-DQB10609
ELKKIIGQVRDQAEHLK

SEQ ID NO: 3242 - protein, 18 aa, Human immunodeficiency virus 1
  source 1..18: note = HLAs: DRB1_1406 DQA10102-DQB10609
ELKKIIGQVRDQAEHLKT

SEQ ID NO: 3243 - protein, 19 aa, Human immunodeficiency virus 1
  source 1..19: note = HLAs: DRB1_0804 DRB1_0806 DRB1_1102 DRB1_1103 DRB1_1104 DRB1_1301 DRB1_1304 DRB1_1406 DQA10102-DQB10501 DQA10102-DQB10604 DQA10102-DQB10609
ELKKIIGQVRDQAEHLKTA

SEQ ID NO: 3244 - protein, 20 aa, Human immunodeficiency virus 1
  source 1..20: note = HLAs: DRB1_0410 DRB1_0804 DRB1_0806 DRB1_1101 DRB1_1102 DRB1_1103 DRB1_1104 DRB1_1301 DRB1_1304 DRB1_1305 DRB1_1406 DPA10202-DPB10501 DPA10202-DPB13801 DPA10301-DPB11801 DQA10102-DQB10501 DQA10102-DQB10503 DQA10102-DQB10604 DQA10102-DQB10609
ELKKIIGQVRDQAEHLKTAV

SEQ ID NO: 3245 - protein, 21 aa, Human immunodeficiency virus 1
  source 1..21: note = HLAs: DRB1_0410 DRB1_0804 DRB1_0806 DRB1_1101 DRB1_1102 DRB1_1103 DRB1_1104 DRB1_1301 DRB1_1304 DRB1_1305 DRB1_1406 DQA10102-DQB10501 DQA10102-DQB10604 DQA10102-DQB10609
ELKKIIGQVRDQAEHLKTAVQ

SEQ ID NO: 3246 - protein, 22 aa, Human immunodeficiency virus 1
  source 1..22: note = HLAs: DRB1_0410 DRB1_0804 DRB1_0806 DRB1_1101 DRB1_1102 DRB1_1103 DRB1_1104 DRB1_1301 DRB1_1304 DRB1_1305 DRB1_1406 DQA10102-DQB10501 DQA10102-DQB10604 DQA10102-DQB10609
ELKKIIGQVRDQAEHLKTAVQM

SEQ ID NO: 3247 - protein, 23 aa, Human immunodeficiency virus 1
  source 1..23: note = HLAs: DRB1_0410 DRB1_0804 DRB1_0806 DRB1_1101 DRB1_1102 DRB1_1103 DRB1_1104 DRB1_1301 DRB1_1304 DRB1_1305 DRB1_1406 DQA10102-DQB10501 DQA10102-DQB10604 DQA10102-DQB10609
ELKKIIGQVRDQAEHLKTAVQMA

SEQ ID NO: 3248 - protein, 24 aa, Human immunodeficiency virus 1
  source 1..24: note = HLAs: DRB1_0410 DRB1_0804 DRB1_0806 DRB1_1001 DRB1_1101 DRB1_1102 DRB1_1103 DRB1_1104 DRB1_1301 DRB1_1304 DRB1_1305 DRB1_1406 DPA10301-DPB10101 DPA10301-DPB11801 DPA10401-DPB10101 DQA10102-DQB10501 DQA10102-DQB10604 DQA10102-DQB10609 DQA10103-DQB10501 DQA10103-DQB10609
ELKKIIGQVRDQAEHLKTAVQMAV

SEQ ID NO: 3249 - protein, 25 aa, Human immunodeficiency virus 1
  source 1..25: note = HLAs: DRB1_0101 DRB1_0404 DRB1_0410 DRB1_0804 DRB1_0806 DRB1_1001 DRB1_1101 DRB1_1102 DRB1_1103 DRB1_1104 DRB1_1301 DRB1_1304 DRB1_1305 DRB1_1406 DPA10103-DPB11501 DPA10103-DPB15001 DPA10104-DPB11501 DPA10105-DPB15001 DPA10202-DPB10101 DPA10301-DPB10101 DPA10301-DPB10201 DPA10301-DPB10202 DPA10301-DPB110601 DPA10301-DPB11801 DPA10301-DPB14001 DPA10301-DPB16501 DPA10401-DPB10101 DPA10401-DPB10501 DQA10102-DQB10501 DQA10102-DQB10503 DQA10102-DQB10601 DQA10102-DQB10604 DQA10102-DQB10609 DQA10103-DQB10501 DQA10103-DQB10601 DQA10103-DQB10609
ELKKIIGQVRDQAEHLKTAVQMAVF

SEQ ID NO: 3250 - protein, 14 aa, Human immunodeficiency virus 1
  source 1..14: note = HLAs: DPA10103-DPB11501 DPA10104-DPB11501 DPA10301-DPB10101 DPA10301-DPB10201 DPA10301-DPB10202 DPA10401-DPB10101
ELNKRTQDFWEVQL

SEQ ID NO: 3251 - protein, 15 aa, Human immunodeficiency virus 1
  source 1..15: note = HLAs: DPA10103-DPB10101 DPA10103-DPB11501 DPA10104-DPB10101 DPA10104-DPB11501 DPA10105-DPB10101 DPA10301-DPB10101 DPA10301-DPB10201 DPA10301-DPB10202 DPA10301-DPB14001 DPA10401-DPB10101 DPA10401-DPB10202 DQA10102-DQB10501
ELNKRTQDFWEVQLG

SEQ ID NO: 3252 - protein, 16 aa, Human immunodeficiency virus 1
  source 1..16: note = HLAs: DPA10103-DPB10101 DPA10103-DPB11501 DPA10103-DPB13101 DPA10104-DPB10101 DPA10104-DPB11501 DPA10105-DPB10101 DPA10301-DPB10101 DPA10301-DPB10201 DPA10301-DPB10202 DPA10301-DPB110601 DPA10301-DPB11801 DPA10301-DPB14001 DPA10301-DPB16501 DPA10401-DPB10101 DQA10101-DQB10501 DQA10102-DQB10501 DQA10102-DQB10503 DQA10104-DQB10501 DQA10105-DQB10501
ELNKRTQDFWEVQLGI

SEQ ID NO: 3253 - protein, 17 aa, Human immunodeficiency virus 1
  source 1..17: note = HLAs: DPA10103-DPB10101 DPA10103-DPB11501 DPA10103-DPB13101 DPA10103-DPB15001 DPA10104-DPB10101 DPA10104-DPB11501 DPA10105-DPB10101 DPA10105-DPB15001 DPA10202-DPB10101 DPA10301-DPB10101 DPA10301-DPB10201 DPA10301-DPB10202 DPA10301-DPB10401 DPA10301-DPB110601 DPA10301-DPB11801 DPA10301-DPB12301 DPA10301-DPB13901 DPA10301-DPB14001 DPA10301-DPB16501 DPA10401-DPB10101 DPA10401-DPB10202 DQA10102-DQB10501
ELNKRTQDFWEVQLGIP

SEQ ID NO: 3254 - protein, 18 aa, Human immunodeficiency virus 1
  source 1..18: note = HLAs: DPA10103-DPB11501 DPA10104-DPB11501 DPA10301-DPB10101 DPA10301-DPB10201 DPA10301-DPB10202 DPA10301-DPB16501 DPA10401-DPB10101 DQA10102-DQB10501
ELNKRTQDFWEVQLGIPH

SEQ ID NO: 3255 - protein, 19 aa, Human immunodeficiency virus 1
  source 1..19: note = HLAs: DRB1_1001 DPA10103-DPB10101 DPA10103-DPB11501 DPA10103-DPB13101 DPA10103-DPB15001 DPA10104-DPB10101 DPA10104-DPB11501 DPA10105-DPB10101 DPA10105-DPB15001 DPA10106-DPB10101 DPA10201-DPB10101 DPA10202-DPB10101 DPA10301-DPB10101 DPA10301-DPB10201 DPA10301-DPB10202 DPA10301-DPB10401 DPA10301-DPB110601 DPA10301-DPB11801 DPA10301-DPB12301 DPA10301-DPB13901 DPA10301-DPB14001 DPA10301-DPB16501 DPA10401-DPB10101 DPA10401-DPB10201 DPA10401-DPB10202 DQA10102-DQB10501 DQA10102-DQB10503
ELNKRTQDFWEVQLGIPHP

SEQ ID NO: 3256 - protein, 20 aa, Human immunodeficiency virus 1
  source 1..20: note = HLAs: DRB1_0101 DRB1_1001 DPA10103-DPB10101 DPA10103-DPB11501 DPA10103-DPB11601 DPA10103-DPB11901 DPA10103-DPB13101 DPA10103-DPB13401 DPA10103-DPB15001 DPA10104-DPB10101 DPA10104-DPB11501 DPA10105-DPB10101 DPA10105-DPB15001 DPA10106-DPB10101 DPA10201-DPB10101 DPA10201-DPB11501 DPA10202-DPB10101 DPA10202-DPB110601 DPA10202-DPB11901 DPA10202-DPB13101 DPA10202-DPB16501 DPA10301-DPB10101 DPA10301-DPB10201 DPA10301-DPB10202 DPA10301-DPB10401 DPA10301-DPB10402 DPA10301-DPB110501 DPA10301-DPB110601 DPA10301-DPB11801 DPA10301-DPB12301 DPA10301-DPB13901 DPA10301-DPB14001 DPA10301-DPB14901 DPA10301-DPB15501 DPA10301-DPB16501 DPA10301-DPB18001 DPA10401-DPB10101 DPA10401-DPB10201 DPA10401-DPB10202 DPA10401-DPB10501 DQA10102-DQB10501 DQA10102-DQB10503 DQA10102-DQB10601 DQA10102-DQB10609 DQA10103-DQB10501 DQA10103-DQB10601 DQA10103-DQB10609 DQA10201-DQB10301 DQA10201-DQB10303 DQA10301-DQB10301 DQA10302-DQB10301 DQA10303-DQB10301 DQA10501-DQB10301 DQA10501-DQB10319 DQA10503-DQB10301; note = HLAs: DQA10505-DQB10301 DQA10505-DQB10309 DQA10505-DQB10319 DQA10505-DQB10402 DQA10506-DQB10303 DQA10508-DQB10301 DQA10509-DQB10301 DQA10601-DQB10301
ELNKRTQDFWEVQLGIPHPA

SEQ ID NO: 3257 - protein, 21 aa, Human immunodeficiency virus 1
  source 1..21: note = HLAs: DRB1_0101 DRB1_1001 DPA10103-DPB10101 DPA10103-DPB11501 DPA10103-DPB13101 DPA10103-DPB15001 DPA10104-DPB10101 DPA10104-DPB11501 DPA10105-DPB10101 DPA10105-DPB15001 DPA10202-DPB10101 DPA10301-DPB10101 DPA10301-DPB10201 DPA10301-DPB10202 DPA10301-DPB10401 DPA10301-DPB110601 DPA10301-DPB11801 DPA10301-DPB12301 DPA10301-DPB13901 DPA10301-DPB14001 DPA10301-DPB16501 DPA10401-DPB10101 DPA10401-DPB10202 DPA10401-DPB10501 DQA10102-DQB10501 DQA10102-DQB10503 DQA10102-DQB10601 DQA10103-DQB10501 DQA10103-DQB10601 DQA10201-DQB10301 DQA10301-DQB10301 DQA10302-DQB10301 DQA10303-DQB10301 DQA10501-DQB10301 DQA10501-DQB10319 DQA10503-DQB10301 DQA10505-DQB10301 DQA10505-DQB10309 DQA10505-DQB10319 DQA10508-DQB10301 DQA10509-DQB10301 DQA10601-DQB10301
ELNKRTQDFWEVQLGIPHPAG

SEQ ID NO: 3258 - protein, 22 aa, Human immunodeficiency virus 1
  source 1..22: note = HLAs: DRB1_0101 DRB1_0102 DRB1_1001 DPA10103-DPB10101 DPA10103-DPB11501 DPA10103-DPB13101 DPA10103-DPB15001 DPA10104-DPB10101 DPA10104-DPB11501 DPA10105-DPB10101 DPA10105-DPB15001 DPA10202-DPB10101 DPA10301-DPB10101 DPA10301-DPB10201 DPA10301-DPB10202 DPA10301-DPB10401 DPA10301-DPB110601 DPA10301-DPB11801 DPA10301-DPB12301 DPA10301-DPB13901 DPA10301-DPB14001 DPA10301-DPB16501 DPA10401-DPB10101 DPA10401-DPB10202 DPA10401-DPB10501 DQA10102-DQB10501 DQA10102-DQB10503 DQA10102-DQB10601 DQA10103-DQB10501 DQA10103-DQB10601 DQA10201-DQB10301 DQA10201-DQB10303 DQA10301-DQB10301 DQA10302-DQB10301 DQA10303-DQB10301 DQA10501-DQB10301 DQA10501-DQB10319 DQA10503-DQB10301 DQA10505-DQB10301 DQA10505-DQB10309 DQA10505-DQB10319 DQA10505-DQB10402 DQA10506-DQB10303 DQA10508-DQB10301 DQA10509-DQB10301 DQA10601-DQB10301
ELNKRTQDFWEVQLGIPHPAGL

SEQ ID NO: 3259 - protein, 23 aa, Human immunodeficiency virus 1
  source 1..23: note = HLAs: DRB1_0101 DRB1_0102 DRB1_0901 DRB1_1001 DPA10103-DPB10101 DPA10103-DPB11501 DPA10103-DPB13101 DPA10103-DPB15001 DPA10104-DPB10101 DPA10104-DPB11501 DPA10105-DPB10101 DPA10105-DPB15001 DPA10202-DPB10101 DPA10301-DPB10101 DPA10301-DPB10201 DPA10301-DPB10202 DPA10301-DPB10401 DPA10301-DPB110601 DPA10301-DPB11801 DPA10301-DPB12301 DPA10301-DPB13901 DPA10301-DPB14001 DPA10301-DPB16501 DPA10401-DPB10101 DPA10401-DPB10201 DPA10401-DPB10202 DPA10401-DPB10501 DQA10102-DQB10501 DQA10102-DQB10503 DQA10102-DQB10601 DQA10103-DQB10501 DQA10103-DQB10601 DQA10103-DQB10602 DQA10201-DQB10301 DQA10201-DQB10303 DQA10301-DQB10301 DQA10302-DQB10301 DQA10303-DQB10301 DQA10401-DQB10301 DQA10401-DQB10319 DQA10501-DQB10301 DQA10501-DQB10319 DQA10503-DQB10301 DQA10505-DQB10301 DQA10505-DQB10309 DQA10505-DQB10319 DQA10505-DQB10402 DQA10506-DQB10303 DQA10508-DQB10301 DQA10509-DQB10301 DQA10601-DQB10301
ELNKRTQDFWEVQLGIPHPAGLK

SEQ ID NO: 3260 - protein, 24 aa, Human immunodeficiency virus 1
  source 1..24: note = HLAs: DRB1_0101 DRB1_0102 DRB1_0901 DRB1_1001 DPA10103-DPB10101 DPA10103-DPB11501 DPA10103-DPB13101 DPA10103-DPB15001 DPA10104-DPB10101 DPA10104-DPB11501 DPA10105-DPB10101 DPA10105-DPB15001 DPA10202-DPB10101 DPA10301-DPB10101 DPA10301-DPB10201 DPA10301-DPB10202 DPA10301-DPB10401 DPA10301-DPB110601 DPA10301-DPB11801 DPA10301-DPB12301 DPA10301-DPB13901 DPA10301-DPB14001 DPA10301-DPB16501 DPA10401-DPB10101 DPA10401-DPB10201 DPA10401-DPB10202 DPA10401-DPB10501 DQA10102-DQB10501 DQA10102-DQB10503 DQA10102-DQB10601 DQA10103-DQB10501 DQA10103-DQB10601 DQA10103-DQB10602 DQA10103-DQB10609 DQA10201-DQB10301 DQA10201-DQB10303 DQA10301-DQB10301 DQA10302-DQB10301 DQA10303-DQB10301 DQA10401-DQB10301 DQA10401-DQB10319 DQA10501-DQB10301 DQA10501-DQB10319 DQA10503-DQB10301 DQA10505-DQB10301 DQA10505-DQB10309 DQA10505-DQB10319 DQA10505-DQB10402 DQA10506-DQB10303 DQA10508-DQB10301 DQA10509-DQB10301 DQA10601-DQB10301
ELNKRTQDFWEVQLGIPHPAGLKK

SEQ ID NO: 3261 - protein, 25 aa, Human immunodeficiency virus 1
  source 1..25: note = HLAs: DRB1_0101 DRB1_0102 DRB1_0901 DRB1_1001 DPA10103-DPB10101 DPA10103-DPB11501 DPA10103-DPB13101 DPA10103-DPB15001 DPA10104-DPB10101 DPA10104-DPB11501 DPA10105-DPB10101 DPA10105-DPB15001 DPA10202-DPB10101 DPA10301-DPB10101 DPA10301-DPB10201 DPA10301-DPB10202 DPA10301-DPB10401 DPA10301-DPB110601 DPA10301-DPB11801 DPA10301-DPB12301 DPA10301-DPB13901 DPA10301-DPB14001 DPA10301-DPB16501 DPA10401-DPB10101 DPA10401-DPB10201 DPA10401-DPB10202 DPA10401-DPB10501 DQA10102-DQB10501 DQA10102-DQB10503 DQA10102-DQB10601 DQA10103-DQB10501 DQA10103-DQB10601 DQA10103-DQB10602 DQA10103-DQB10609 DQA10201-DQB10301 DQA10201-DQB10303 DQA10301-DQB10301 DQA10302-DQB10301 DQA10303-DQB10301 DQA10401-DQB10301 DQA10401-DQB10319 DQA10501-DQB10301 DQA10501-DQB10319 DQA10503-DQB10301 DQA10505-DQB10301 DQA10505-DQB10309 DQA10505-DQB10319 DQA10505-DQB10402 DQA10506-DQB10303 DQA10508-DQB10301 DQA10509-DQB10301 DQA10601-DQB10301
ELNKRTQDFWEVQLGIPHPAGLKKK

SEQ ID NO: 3262 - protein, 14 aa, Human immunodeficiency virus 1
  source 1..14: note = HLAs: DRB1_0101 DRB1_0102 DRB1_0404 DRB1_0405 DRB1_0408 DRB1_0410 DRB1_0701 DRB1_0801 DRB1_0804 DRB1_0806 DRB1_0813 DRB1_1001 DRB1_1102 DRB1_1103 DRB1_1104 DRB1_1114 DRB1_1201 DRB1_1301 DRB1_1302 DRB1_1304 DRB1_1401 DRB1_1404 DRB1_1406 DRB1_1454 DRB1_1501 DRB1_1502 DRB1_1503 DRB1_1601 DRB1_1602 DPA10103-DPB11501 DPA10104-DPB11501 DPA10202-DPB10101 DPA10202-DPB110601 DPA10202-DPB11901 DPA10202-DPB13101 DPA10202-DPB16501 DPA10301-DPB10101 DPA10301-DPB10201 DPA10301-DPB10202 DPA10301-DPB10401 DPA10301-DPB110601 DPA10301-DPB11801 DPA10301-DPB12301 DPA10301-DPB13901 DPA10301-DPB14001 DPA10301-DPB16501 DPA10401-DPB10101 DQA10102-DQB10501 DQA10103-DQB10501
ELQKQITKIQNFRV

SEQ ID NO: 3263 - protein, 15 aa, Human immunodeficiency virus 1
  source 1..15: note = HLAs: DRB1_0101 DRB1_0102 DRB1_0103 DRB1_0401 DRB1_0402 DRB1_0404 DRB1_0405 DRB1_0408 DRB1_0410 DRB1_0701 DRB1_0801 DRB1_0802 DRB1_0803 DRB1_0804 DRB1_0806 DRB1_0809 DRB1_0813 DRB1_0901 DRB1_1001 DRB1_1101 DRB1_1102 DRB1_1103 DRB1_1104 DRB1_1114 DRB1_1201 DRB1_1202 DRB1_1301 DRB1_1302 DRB1_1303 DRB1_1304 DRB1_1305 DRB1_1312 DRB1_1401 DRB1_1402 DRB1_1403 DRB1_1404 DRB1_1405 DRB1_1406 DRB1_1418 DRB1_1454 DRB1_1501 DRB1_1502 DRB1_1503 DRB1_1601 DRB1_1602 DPA10103-DPB10101 DPA10103-DPB10202 DPA10103-DPB11501 DPA10103-DPB11601 DPA10103-DPB11801 DPA10103-DPB11901 DPA10103-DPB13101 DPA10103-DPB13401 DPA10103-DPB14001 DPA10103-DPB15001 DPA10104-DPB10101 DPA10104-DPB11501 DPA10105-DPB10101 DPA10105-DPB11801 DPA10105-DPB15001 DPA10106-DPB10101 DPA10201-DPB10101 DPA10201-DPB110601 DPA10201-DPB11501 DPA10201-DPB11901 DPA10201-DPB13401 DPA10202-DPB10101 DPA10202-DPB10201 DPA10202-DPB10202 DPA10202-DPB10401 DPA10202-DPB10501 DPA10202-DPB110001 DPA10202-DPB110601 DPA10202-DPB11301 DPA10202-DPB11801; note = HLAs: DPA10202-DPB11901 DPA10202-DPB13101 DPA10202-DPB13801 DPA10202-DPB15501 DPA10202-DPB16501 DPA10301-DPB10101 DPA10301-DPB10201 DPA10301-DPB10202 DPA10301-DPB10401 DPA10301-DPB10402 DPA10301-DPB110501 DPA10301-DPB110601 DPA10301-DPB11801 DPA10301-DPB12301 DPA10301-DPB13901 DPA10301-DPB14001 DPA10301-DPB14901 DPA10301-DPB16501 DPA10301-DPB17501 DPA10301-DPB18001 DPA10401-DPB10101 DPA10401-DPB10201 DPA10401-DPB10202 DPA10401-DPB10501 DQA10102-DQB10501 DQA10103-DQB10501 DQA10103-DQB10609 DQA10505-DQB10402
ELQKQITKIQNFRVY

SEQ ID NO: 3264 - protein, 16 aa, Human immunodeficiency virus 1
  source 1..16: note = HLAs: DRB1_0101 DRB1_0102 DRB1_0103 DRB1_0401 DRB1_0402 DRB1_0404 DRB1_0405 DRB1_0408 DRB1_0410 DRB1_0701 DRB1_0801 DRB1_0802 DRB1_0803 DRB1_0804 DRB1_0806 DRB1_0809 DRB1_0813 DRB1_0901 DRB1_1001 DRB1_1101 DRB1_1102 DRB1_1103 DRB1_1104 DRB1_1114 DRB1_1201 DRB1_1202 DRB1_1301 DRB1_1302 DRB1_1304 DRB1_1305 DRB1_1312 DRB1_1401 DRB1_1402 DRB1_1403 DRB1_1404 DRB1_1405 DRB1_1406 DRB1_1454 DRB1_1501 DRB1_1502 DRB1_1503 DRB1_1601 DRB1_1602 DPA10103-DPB10101 DPA10103-DPB10202 DPA10103-DPB11501 DPA10103-DPB11601 DPA10103-DPB11901 DPA10103-DPB13101 DPA10103-DPB13401 DPA10103-DPB14001 DPA10103-DPB15001 DPA10104-DPB10101 DPA10104-DPB11501 DPA10105-DPB10101 DPA10105-DPB15001 DPA10106-DPB10101 DPA10201-DPB10101 DPA10201-DPB110601 DPA10201-DPB11501 DPA10201-DPB11901 DPA10202-DPB10101 DPA10202-DPB10201 DPA10202-DPB10202 DPA10202-DPB10401 DPA10202-DPB10501 DPA10202-DPB110001 DPA10202-DPB110601 DPA10202-DPB11301 DPA10202-DPB11801 DPA10202-DPB11901 DPA10202-DPB13101 DPA10202-DPB13801 DPA10202-DPB15501; note = HLAs: DPA10202-DPB16501 DPA10301-DPB10101 DPA10301-DPB10201 DPA10301-DPB10202 DPA10301-DPB10401 DPA10301-DPB10402 DPA10301-DPB110501 DPA10301-DPB110601 DPA10301-DPB11801 DPA10301-DPB12301 DPA10301-DPB13901 DPA10301-DPB14001 DPA10301-DPB14901 DPA10301-DPB15501 DPA10301-DPB16501 DPA10301-DPB17501 DPA10301-DPB18001 DPA10401-DPB10101 DPA10401-DPB10201 DPA10401-DPB10202 DPA10401-DPB10501 DQA10102-DQB10501 DQA10102-DQB10503 DQA10103-DQB10501 DQA10103-DQB10609
ELQKQITKIQNFRVYY

SEQ ID NO: 3265 - protein, 17 aa, Human immunodeficiency virus 1
  source 1..17: note = HLAs: DRB1_0101 DRB1_0102 DRB1_0103 DRB1_0401 DRB1_0402 DRB1_0404 DRB1_0405 DRB1_0408 DRB1_0410 DRB1_0701 DRB1_0801 DRB1_0802 DRB1_0803 DRB1_0804 DRB1_0806 DRB1_0809 DRB1_0813 DRB1_0901 DRB1_1001 DRB1_1101 DRB1_1102 DRB1_1103 DRB1_1104 DRB1_1114 DRB1_1201 DRB1_1202 DRB1_1301 DRB1_1302 DRB1_1303 DRB1_1304 DRB1_1305 DRB1_1312 DRB1_1401 DRB1_1402 DRB1_1403 DRB1_1404 DRB1_1405 DRB1_1406 DRB1_1418 DRB1_1454 DRB1_1501 DRB1_1502 DRB1_1503 DRB1_1601 DRB1_1602 DPA10103-DPB10101 DPA10103-DPB10201 DPA10103-DPB10202 DPA10103-DPB10501 DPA10103-DPB11501 DPA10103-DPB11601 DPA10103-DPB11801 DPA10103-DPB11901 DPA10103-DPB13101 DPA10103-DPB13401 DPA10103-DPB14001 DPA10103-DPB14101 DPA10103-DPB14801 DPA10103-DPB15001 DPA10103-DPB15901 DPA10104-DPB10101 DPA10104-DPB11501 DPA10105-DPB10101 DPA10105-DPB11801 DPA10105-DPB15001 DPA10106-DPB10101 DPA10201-DPB10101 DPA10201-DPB10202 DPA10201-DPB10501 DPA10201-DPB110601 DPA10201-DPB11501 DPA10201-DPB11601 DPA10201-DPB11801 DPA10201-DPB11901 DPA10201-DPB13401; note = HLAs: DPA10202-DPB10101 DPA10202-DPB10201 DPA10202-DPB10202 DPA10202-DPB10401 DPA10202-DPB10402 DPA10202-DPB10501 DPA10202-DPB110001 DPA10202-DPB110501 DPA10202-DPB110601 DPA10202-DPB11101 DPA10202-DPB11301 DPA10202-DPB11801 DPA10202-DPB11901 DPA10202-DPB12101 DPA10202-DPB13001 DPA10202-DPB13101 DPA10202-DPB13801 DPA10202-DPB15501 DPA10202-DPB16501 DPA10301-DPB10101 DPA10301-DPB10201 DPA10301-DPB10202 DPA10301-DPB10401 DPA10301-DPB10402 DPA10301-DPB110501 DPA10301-DPB110601 DPA10301-DPB11801 DPA10301-DPB12301 DPA10301-DPB13901 DPA10301-DPB14001 DPA10301-DPB14901 DPA10301-DPB16501 DPA10301-DPB17501 DPA10301-DPB18001 DPA10401-DPB10101 DPA10401-DPB10201 DPA10401-DPB10202 DPA10401-DPB10501 DQA10102-DQB10501 DQA10102-DQB10503 DQA10103-DQB10501 DQA10103-DQB10503 DQA10103-DQB10601 DQA10103-DQB10608 DQA10103-DQB10609 DQA10505-DQB10402
ELQKQITKIQNFRVYYR

SEQ ID NO: 3266 - protein, 18 aa, Human immunodeficiency virus 1
  source 1..18: note = HLAs: DRB1_0101 DRB1_0102 DRB1_0401 DRB1_0402 DRB1_0404 DRB1_0405 DRB1_0408 DRB1_0410 DRB1_0701 DRB1_0801 DRB1_0802 DRB1_0804 DRB1_0806 DRB1_0809 DRB1_0813 DRB1_1001 DRB1_1101 DRB1_1102 DRB1_1103 DRB1_1104 DRB1_1114 DRB1_1201 DRB1_1202 DRB1_1301 DRB1_1302 DRB1_1304 DRB1_1305 DRB1_1401 DRB1_1402 DRB1_1404 DRB1_1406 DRB1_1454 DRB1_1501 DRB1_1502 DRB1_1503 DRB1_1601 DRB1_1602 DPA10103-DPB10101 DPA10103-DPB11501 DPA10103-DPB13101 DPA10103-DPB13401 DPA10104-DPB10101 DPA10104-DPB11501 DPA10105-DPB10101 DPA10106-DPB10101 DPA10201-DPB10101 DPA10201-DPB110601 DPA10201-DPB11501 DPA10201-DPB11901 DPA10202-DPB10101 DPA10202-DPB10201 DPA10202-DPB10202 DPA10202-DPB10501 DPA10202-DPB110601 DPA10202-DPB11801 DPA10202-DPB11901 DPA10202-DPB13101 DPA10202-DPB13801 DPA10202-DPB16501 DPA10301-DPB10101 DPA10301-DPB10201 DPA10301-DPB10202 DPA10301-DPB10401 DPA10301-DPB110601 DPA10301-DPB11801 DPA10301-DPB12301 DPA10301-DPB13901 DPA10301-DPB14001 DPA10301-DPB16501 DPA10401-DPB10101 DPA10401-DPB10201; note = HLAs: DPA10401-DPB10202 DPA10401-DPB10501 DQA10102-DQB10501 DQA10102-DQB10503 DQA10103-DQB10501
ELQKQITKIQNFRVYYRD

SEQ ID NO: 3267 - protein, 15 aa, Human immunodeficiency virus 1
  source 1..15: note = HLAs: DQA10103-DQB10601
ENPYNTPVFAIKKKD

SEQ ID NO: 3268 - protein, 16 aa, Human immunodeficiency virus 1
  source 1..16: note = HLAs: DRB1_1103 DRB1_1104
ENPYNTPVFAIKKKDS

SEQ ID NO: 3269 - protein, 17 aa, Human immunodeficiency virus 1
  source 1..17: note = HLAs: DRB1_0804 DRB1_0806 DRB1_1101 DRB1_1103 DRB1_1104 DRB1_1305
ENPYNTPVFAIKKKDST

SEQ ID NO: 3270 - protein, 18 aa, Human immunodeficiency virus 1
  source 1..18: note = HLAs: DRB1_1103 DRB1_1104
ENPYNTPVFAIKKKDSTK

SEQ ID NO: 3271 - protein, 19 aa, Human immunodeficiency virus 1
  source 1..19: note = HLAs: DRB1_0804 DRB1_0806 DRB1_1101 DRB1_1102 DRB1_1103 DRB1_1104 DRB1_1301 DRB1_1304 DRB1_1305
ENPYNTPVFAIKKKDSTKW

SEQ ID NO: 3272 - protein, 20 aa, Human immunodeficiency virus 1
  source 1..20: note = HLAs: DRB1_0801 DRB1_0802 DRB1_0804 DRB1_0806 DRB1_0809 DRB1_1101 DRB1_1102 DRB1_1103 DRB1_1104 DRB1_1301 DRB1_1304 DRB1_1305 DRB1_1406 DPA10401-DPB10101
ENPYNTPVFAIKKKDSTKWR

SEQ ID NO: 3273 - protein, 21 aa, Human immunodeficiency virus 1
  source 1..21: note = HLAs: DRB1_0801 DRB1_0804 DRB1_0806 DRB1_1101 DRB1_1102 DRB1_1103 DRB1_1104 DRB1_1301 DRB1_1304 DRB1_1305 DRB1_1406
ENPYNTPVFAIKKKDSTKWRK

SEQ ID NO: 3274 - protein, 22 aa, Human immunodeficiency virus 1
  source 1..22: note = HLAs: DRB1_0801 DRB1_0804 DRB1_0806 DRB1_1101 DRB1_1102 DRB1_1103 DRB1_1104 DRB1_1301 DRB1_1304 DRB1_1305 DRB1_1406
ENPYNTPVFAIKKKDSTKWRKL

SEQ ID NO: 3275 - protein, 23 aa, Human immunodeficiency virus 1
  source 1..23: note = HLAs: DRB1_0801 DRB1_0804 DRB1_0806 DRB1_1101 DRB1_1102 DRB1_1103 DRB1_1104 DRB1_1301 DRB1_1304 DRB1_1305 DRB1_1406 DPA10103-DPB15001 DPA10105-DPB15001
ENPYNTPVFAIKKKDSTKWRKLV

SEQ ID NO: 3276 - protein, 24 aa, Human immunodeficiency virus 1
  source 1..24: note = HLAs: DRB1_0801 DRB1_0804 DRB1_0806 DRB1_1101 DRB1_1102 DRB1_1103 DRB1_1104 DRB1_1301 DRB1_1304 DRB1_1305 DRB1_1406 DPA10103-DPB11501 DPA10103-DPB15001 DPA10104-DPB11501 DPA10105-DPB15001 DPA10401-DPB10101
ENPYNTPVFAIKKKDSTKWRKLVD

SEQ ID NO: 3277 - protein, 25 aa, Human immunodeficiency virus 1
  source 1..25: note = HLAs: DRB1_0801 DRB1_0804 DRB1_0806 DRB1_1101 DRB1_1102 DRB1_1103 DRB1_1104 DRB1_1301 DRB1_1304 DRB1_1305 DRB1_1406 DPA10103-DPB11501 DPA10103-DPB15001 DPA10104-DPB11501 DPA10105-DPB15001 DPA10202-DPB13101 DPA10301-DPB10201 DPA10401-DPB10101 DPA10401-DPB10201 DPA10401-DPB10202
ENPYNTPVFAIKKKDSTKWRKLVDF

SEQ ID NO: 3278 - protein, 13 aa, Human immunodeficiency virus 1
  source 1..13: note = HLAs: DPA10103-DPB10101 DPA10103-DPB10201 DPA10103-DPB10202 DPA10103-DPB10401 DPA10103-DPB112601 DPA10103-DPB11501 DPA10103-DPB12301 DPA10103-DPB13101 DPA10103-DPB13401 DPA10103-DPB13901 DPA10103-DPB14801 DPA10104-DPB10101 DPA10104-DPB11501 DPA10105-DPB10101 DPA10105-DPB10401 DPA10106-DPB10101 DPA10201-DPB10101 DPA10201-DPB11501 DPA10202-DPB10101 DPA10202-DPB13101 DPA10301-DPB10101 DPA10301-DPB10201 DPA10301-DPB10202 DPA10301-DPB10401 DPA10301-DPB10402 DPA10301-DPB110501 DPA10301-DPB110601 DPA10301-DPB11801 DPA10301-DPB12301 DPA10301-DPB13901 DPA10301-DPB14001 DPA10301-DPB14901 DPA10301-DPB16501 DPA10301-DPB18001 DPA10401-DPB10101 DPA10401-DPB10201 DPA10401-DPB10202
EPPFLWMGYELHP

SEQ ID NO: 3279 - protein, 14 aa, Human immunodeficiency virus 1
  source 1..14: note = HLAs: DRB1_1001 DPA10103-DPB10101 DPA10103-DPB10201 DPA10103-DPB10202 DPA10103-DPB10401 DPA10103-DPB112601 DPA10103-DPB11501 DPA10103-DPB11601 DPA10103-DPB11901 DPA10103-DPB12301 DPA10103-DPB13101 DPA10103-DPB13401 DPA10103-DPB13901 DPA10103-DPB14001 DPA10103-DPB14101 DPA10103-DPB14801 DPA10103-DPB15001 DPA10103-DPB15901 DPA10104-DPB10101 DPA10104-DPB11501 DPA10105-DPB10101 DPA10105-DPB10401 DPA10105-DPB15001 DPA10106-DPB10101 DPA10201-DPB10101 DPA10201-DPB110601 DPA10201-DPB11501 DPA10201-DPB11601 DPA10201-DPB11901 DPA10202-DPB10101 DPA10202-DPB10201 DPA10202-DPB10202 DPA10202-DPB10401 DPA10202-DPB110601 DPA10202-DPB11901 DPA10202-DPB13101 DPA10202-DPB16501 DPA10301-DPB10101 DPA10301-DPB10201 DPA10301-DPB10202 DPA10301-DPB10401 DPA10301-DPB10402 DPA10301-DPB110501 DPA10301-DPB110601 DPA10301-DPB11801 DPA10301-DPB12301 DPA10301-DPB13901 DPA10301-DPB14001 DPA10301-DPB14901 DPA10301-DPB15501 DPA10301-DPB16501 DPA10301-DPB17501 DPA10301-DPB18001 DPA10401-DPB10101 DPA10401-DPB10201; note = HLAs: DPA10401-DPB10202 DPA10401-DPB10402 DPA10401-DPB110501 DPA10401-DPB14901 DQA10101-DQB10501 DQA10102-DQB10501 DQA10102-DQB10502 DQA10102-DQB10503 DQA10104-DQB10501 DQA10105-DQB10501
EPPFLWMGYELHPD

SEQ ID NO: 3280 - protein, 15 aa, Human immunodeficiency virus 1
  source 1..15: note = HLAs: DRB1_0101 DRB1_0405 DRB1_0410 DRB1_1001 DRB1_1304 DRB1_1501 DRB1_1503 DRB1_1602 DPA10103-DPB10101 DPA10103-DPB10201 DPA10103-DPB10202 DPA10103-DPB10401 DPA10103-DPB10402 DPA10103-DPB110501 DPA10103-DPB112601 DPA10103-DPB11501 DPA10103-DPB11601 DPA10103-DPB11801 DPA10103-DPB11901 DPA10103-DPB12301 DPA10103-DPB13101 DPA10103-DPB13401 DPA10103-DPB13901 DPA10103-DPB14001 DPA10103-DPB14101 DPA10103-DPB14801 DPA10103-DPB14901 DPA10103-DPB15001 DPA10103-DPB15101 DPA10103-DPB15501 DPA10103-DPB15901 DPA10103-DPB18001 DPA10104-DPB10101 DPA10104-DPB11501 DPA10105-DPB10101 DPA10105-DPB10401 DPA10105-DPB11801 DPA10105-DPB15001 DPA10106-DPB10101 DPA10201-DPB10101 DPA10201-DPB10201 DPA10201-DPB10202 DPA10201-DPB10401 DPA10201-DPB110601 DPA10201-DPB11501 DPA10201-DPB11601 DPA10201-DPB11901 DPA10201-DPB13401 DPA10202-DPB10101 DPA10202-DPB10201 DPA10202-DPB10202 DPA10202-DPB10401 DPA10202-DPB110601 DPA10202-DPB11901 DPA10202-DPB13101 DPA10202-DPB15501 DPA10202-DPB16501 DPA10301-DPB10101; note = HLAs: DPA10301-DPB10201 DPA10301-DPB10202 DPA10301-DPB10401 DPA10301-DPB10402 DPA10301-DPB110501 DPA10301-DPB110601 DPA10301-DPB11301 DPA10301-DPB11801 DPA10301-DPB12301 DPA10301-DPB13901 DPA10301-DPB14001 DPA10301-DPB14901 DPA10301-DPB15501 DPA10301-DPB16501 DPA10301-DPB17501 DPA10301-DPB18001 DPA10401-DPB10101 DPA10401-DPB10201 DPA10401-DPB10202 DPA10401-DPB10402 DPA10401-DPB10501 DPA10401-DPB110501 DPA10401-DPB14901 DQA10101-DQB10501 DQA10101-DQB10503 DQA10102-DQB10501 DQA10102-DQB10502 DQA10102-DQB10503 DQA10103-DQB10501 DQA10104-DQB10501 DQA10104-DQB10503 DQA10105-DQB10501 DQA10107-DQB10503 DQA10505-DQB10402
EPPFLWMGYELHPDK

SEQ ID NO: 3281 - protein, 16 aa, Human immunodeficiency virus 1
  source 1..16: note = HLAs: DRB1_1001 DPA10103-DPB10101 DPA10103-DPB10201 DPA10103-DPB10202 DPA10103-DPB10401 DPA10103-DPB112601 DPA10103-DPB11501 DPA10103-DPB11601 DPA10103-DPB11801 DPA10103-DPB11901 DPA10103-DPB12301 DPA10103-DPB13101 DPA10103-DPB13401 DPA10103-DPB13901 DPA10103-DPB14001 DPA10103-DPB14101 DPA10103-DPB14801 DPA10103-DPB15001 DPA10103-DPB15501 DPA10103-DPB15901 DPA10104-DPB10101 DPA10104-DPB11501 DPA10105-DPB10101 DPA10105-DPB10401 DPA10105-DPB11801 DPA10105-DPB15001 DPA10106-DPB10101 DPA10201-DPB10101 DPA10201-DPB10201 DPA10201-DPB10202 DPA10201-DPB110601 DPA10201-DPB11501 DPA10201-DPB11601 DPA10201-DPB11901 DPA10201-DPB13401 DPA10202-DPB10101 DPA10202-DPB10201 DPA10202-DPB10202 DPA10202-DPB10401 DPA10202-DPB110601 DPA10202-DPB11101 DPA10202-DPB11301 DPA10202-DPB11901 DPA10202-DPB13101 DPA10202-DPB15501 DPA10202-DPB16501 DPA10301-DPB10101 DPA10301-DPB10201 DPA10301-DPB10202 DPA10301-DPB10401 DPA10301-DPB10402 DPA10301-DPB110501 DPA10301-DPB110601 DPA10301-DPB11301 DPA10301-DPB11801; note = HLAs: DPA10301-DPB12301 DPA10301-DPB13901 DPA10301-DPB14001 DPA10301-DPB14901 DPA10301-DPB15501 DPA10301-DPB16501 DPA10301-DPB17501 DPA10301-DPB18001 DPA10401-DPB10101 DPA10401-DPB10201 DPA10401-DPB10202 DPA10401-DPB10402 DPA10401-DPB10501 DPA10401-DPB110501 DPA10401-DPB14901 DQA10101-DQB10501 DQA10101-DQB10503 DQA10102-DQB10501 DQA10102-DQB10502 DQA10102-DQB10503 DQA10103-DQB10501 DQA10104-DQB10501 DQA10104-DQB10503 DQA10105-DQB10501 DQA10107-DQB10503 DQA10505-DQB10402
EPPFLWMGYELHPDKW

SEQ ID NO: 3282 - protein, 17 aa, Human immunodeficiency virus 1
  source 1..17: note = HLAs: DRB1_1001 DPA10103-DPB10101 DPA10103-DPB10201 DPA10103-DPB10202 DPA10103-DPB10401 DPA10103-DPB112601 DPA10103-DPB11501 DPA10103-DPB11601 DPA10103-DPB11801 DPA10103-DPB11901 DPA10103-DPB12301 DPA10103-DPB13101 DPA10103-DPB13401 DPA10103-DPB13901 DPA10103-DPB14001 DPA10103-DPB14101 DPA10103-DPB14801 DPA10103-DPB15001 DPA10103-DPB15901 DPA10104-DPB10101 DPA10104-DPB11501 DPA10105-DPB10101 DPA10105-DPB10401 DPA10105-DPB11801 DPA10105-DPB15001 DPA10106-DPB10101 DPA10201-DPB10101 DPA10201-DPB10202 DPA10201-DPB110601 DPA10201-DPB11501 DPA10201-DPB11601 DPA10201-DPB11901 DPA10201-DPB13401 DPA10202-DPB10101 DPA10202-DPB10201 DPA10202-DPB10202 DPA10202-DPB10401 DPA10202-DPB110601 DPA10202-DPB11901 DPA10202-DPB13101 DPA10202-DPB15501 DPA10202-DPB16501 DPA10301-DPB10101 DPA10301-DPB10201 DPA10301-DPB10202 DPA10301-DPB10401 DPA10301-DPB10402 DPA10301-DPB110501 DPA10301-DPB110601 DPA10301-DPB11801 DPA10301-DPB12301 DPA10301-DPB13901 DPA10301-DPB14001 DPA10301-DPB14901 DPA10301-DPB15501; note = HLAs: DPA10301-DPB16501 DPA10301-DPB17501 DPA10301-DPB18001 DPA10401-DPB10101 DPA10401-DPB10201 DPA10401-DPB10202 DPA10401-DPB10402 DPA10401-DPB10501 DPA10401-DPB110501 DPA10401-DPB14901 DQA10101-DQB10501 DQA10101-DQB10503 DQA10102-DQB10501 DQA10102-DQB10502 DQA10102-DQB10503 DQA10103-DQB10501 DQA10104-DQB10501 DQA10104-DQB10503 DQA10105-DQB10501 DQA10107-DQB10503
EPPFLWMGYELHPDKWT

SEQ ID NO: 3283 - protein, 18 aa, Human immunodeficiency virus 1
  source 1..18: note = HLAs: DPA10103-DPB10101 DPA10103-DPB10201 DPA10103-DPB10202 DPA10103-DPB10401 DPA10103-DPB112601 DPA10103-DPB11501 DPA10103-DPB11601 DPA10103-DPB12301 DPA10103-DPB13101 DPA10103-DPB13401 DPA10103-DPB13901 DPA10103-DPB14001 DPA10103-DPB14101 DPA10103-DPB14801 DPA10103-DPB15001 DPA10104-DPB10101 DPA10104-DPB11501 DPA10105-DPB10101 DPA10105-DPB10401 DPA10105-DPB15001 DPA10106-DPB10101 DPA10201-DPB10101 DPA10201-DPB11501 DPA10201-DPB11601 DPA10202-DPB10101 DPA10202-DPB13101 DPA10202-DPB16501 DPA10301-DPB10101 DPA10301-DPB10201 DPA10301-DPB10202 DPA10301-DPB10401 DPA10301-DPB10402 DPA10301-DPB110501 DPA10301-DPB110601 DPA10301-DPB11801 DPA10301-DPB12301 DPA10301-DPB13901 DPA10301-DPB14001 DPA10301-DPB14901 DPA10301-DPB15501 DPA10301-DPB16501 DPA10301-DPB18001 DPA10401-DPB10101 DPA10401-DPB10201 DPA10401-DPB10202 DQA10101-DQB10501 DQA10101-DQB10503 DQA10102-DQB10501 DQA10102-DQB10502 DQA10102-DQB10503 DQA10104-DQB10501 DQA10104-DQB10503 DQA10105-DQB10501 DQA10107-DQB10503
EPPFLWMGYELHPDKWTV

SEQ ID NO: 3284 - protein, 19 aa, Human immunodeficiency virus 1
  source 1..19: note = HLAs: DRB1_1001 DPA10103-DPB10101 DPA10103-DPB10201 DPA10103-DPB10202 DPA10103-DPB10401 DPA10103-DPB112601 DPA10103-DPB11501 DPA10103-DPB11601 DPA10103-DPB11801 DPA10103-DPB11901 DPA10103-DPB12301 DPA10103-DPB13101 DPA10103-DPB13401 DPA10103-DPB13901 DPA10103-DPB14001 DPA10103-DPB14101 DPA10103-DPB14801 DPA10103-DPB15001 DPA10103-DPB15901 DPA10104-DPB10101 DPA10104-DPB11501 DPA10105-DPB10101 DPA10105-DPB10401 DPA10105-DPB11801 DPA10105-DPB15001 DPA10106-DPB10101 DPA10201-DPB10101 DPA10201-DPB10202 DPA10201-DPB110601 DPA10201-DPB11501 DPA10201-DPB11601 DPA10201-DPB11901 DPA10201-DPB13401 DPA10202-DPB10101 DPA10202-DPB10201 DPA10202-DPB10202 DPA10202-DPB10401 DPA10202-DPB110601 DPA10202-DPB11901 DPA10202-DPB13101 DPA10202-DPB15501 DPA10202-DPB16501 DPA10301-DPB10101 DPA10301-DPB10201 DPA10301-DPB10202 DPA10301-DPB10401 DPA10301-DPB10402 DPA10301-DPB110501 DPA10301-DPB110601 DPA10301-DPB11801 DPA10301-DPB12301 DPA10301-DPB13901 DPA10301-DPB14001 DPA10301-DPB14901 DPA10301-DPB15501; note = HLAs: DPA10301-DPB16501 DPA10301-DPB17501 DPA10301-DPB18001 DPA10401-DPB10101 DPA10401-DPB10201 DPA10401-DPB10202 DPA10401-DPB10402 DPA10401-DPB10501 DPA10401-DPB110501 DPA10401-DPB14901 DQA10101-DQB10501 DQA10101-DQB10503 DQA10102-DQB10501 DQA10102-DQB10502 DQA10102-DQB10503 DQA10103-DQB10501 DQA10104-DQB10501 DQA10104-DQB10503 DQA10105-DQB10501 DQA10107-DQB10503
EPPFLWMGYELHPDKWTVQ

SEQ ID NO: 3285 - protein, 20 aa, Human immunodeficiency virus 1
  source 1..20: note = HLAs: DRB1_0101 DRB1_0405 DRB1_1001 DRB1_1501 DRB1_1602 DPA10103-DPB10101 DPA10103-DPB10201 DPA10103-DPB10202 DPA10103-DPB10401 DPA10103-DPB10402 DPA10103-DPB10501 DPA10103-DPB110501 DPA10103-DPB112601 DPA10103-DPB11501 DPA10103-DPB11601 DPA10103-DPB11801 DPA10103-DPB11901 DPA10103-DPB12301 DPA10103-DPB13101 DPA10103-DPB13401 DPA10103-DPB13901 DPA10103-DPB14001 DPA10103-DPB14101 DPA10103-DPB14801 DPA10103-DPB14901 DPA10103-DPB15001 DPA10103-DPB15101 DPA10103-DPB15501 DPA10103-DPB15901 DPA10103-DPB18001 DPA10104-DPB10101 DPA10104-DPB11501 DPA10105-DPB10101 DPA10105-DPB10401 DPA10105-DPB11801 DPA10105-DPB15001 DPA10106-DPB10101 DPA10201-DPB10101 DPA10201-DPB10201 DPA10201-DPB10202 DPA10201-DPB10401 DPA10201-DPB10501 DPA10201-DPB110601 DPA10201-DPB11501 DPA10201-DPB11601 DPA10201-DPB11901 DPA10201-DPB13401 DPA10202-DPB10101 DPA10202-DPB10201 DPA10202-DPB10202 DPA10202-DPB10401 DPA10202-DPB10501 DPA10202-DPB110601 DPA10202-DPB11901 DPA10202-DPB13101 DPA10202-DPB13801 DPA10202-DPB15501; note = HLAs: DPA10202-DPB16501 DPA10301-DPB10101 DPA10301-DPB10201 DPA10301-DPB10202 DPA10301-DPB10401 DPA10301-DPB10402 DPA10301-DPB110501 DPA10301-DPB110601 DPA10301-DPB11101 DPA10301-DPB11301 DPA10301-DPB11801 DPA10301-DPB12301 DPA10301-DPB13901 DPA10301-DPB14001 DPA10301-DPB14901 DPA10301-DPB15501 DPA10301-DPB16501 DPA10301-DPB17501 DPA10301-DPB18001 DPA10401-DPB10101 DPA10401-DPB10201 DPA10401-DPB10202 DPA10401-DPB10402 DPA10401-DPB10501 DPA10401-DPB110501 DPA10401-DPB14901 DQA10101-DQB10501 DQA10101-DQB10503 DQA10102-DQB10501 DQA10102-DQB10502 DQA10102-DQB10503 DQA10103-DQB10501 DQA10104-DQB10501 DQA10104-DQB10503 DQA10105-DQB10501 DQA10107-DQB10503 DQA10505-DQB10402
EPPFLWMGYELHPDKWTVQP

SEQ ID NO: 3286 - protein, 21 aa, Human immunodeficiency virus 1
  source 1..21: note = HLAs: DRB1_1001 DPA10103-DPB10101 DPA10103-DPB10201 DPA10103-DPB10202 DPA10103-DPB10401 DPA10103-DPB112601 DPA10103-DPB11501 DPA10103-DPB11601 DPA10103-DPB11801 DPA10103-DPB11901 DPA10103-DPB12301 DPA10103-DPB13101 DPA10103-DPB13401 DPA10103-DPB13901 DPA10103-DPB14001 DPA10103-DPB14101 DPA10103-DPB14801 DPA10103-DPB15001 DPA10103-DPB15901 DPA10104-DPB10101 DPA10104-DPB11501 DPA10105-DPB10101 DPA10105-DPB10401 DPA10105-DPB11801 DPA10105-DPB15001 DPA10106-DPB10101 DPA10201-DPB10101 DPA10201-DPB110601 DPA10201-DPB11501 DPA10201-DPB11601 DPA10201-DPB11901 DPA10202-DPB10101 DPA10202-DPB10202 DPA10202-DPB110601 DPA10202-DPB11901 DPA10202-DPB13101 DPA10202-DPB16501 DPA10301-DPB10101 DPA10301-DPB10201 DPA10301-DPB10202 DPA10301-DPB10401 DPA10301-DPB10402 DPA10301-DPB110501 DPA10301-DPB110601 DPA10301-DPB11801 DPA10301-DPB12301 DPA10301-DPB13901 DPA10301-DPB14001 DPA10301-DPB14901 DPA10301-DPB15501 DPA10301-DPB16501 DPA10301-DPB17501 DPA10301-DPB18001 DPA10401-DPB10101 DPA10401-DPB10201; note = HLAs: DPA10401-DPB10202 DPA10401-DPB10402 DPA10401-DPB10501 DPA10401-DPB110501 DPA10401-DPB14901 DQA10101-DQB10501 DQA10102-DQB10501 DQA10102-DQB10502 DQA10102-DQB10503 DQA10103-DQB10501 DQA10104-DQB10501 DQA10105-DQB10501
EPPFLWMGYELHPDKWTVQPI

SEQ ID NO: 3287 - protein, 22 aa, Human immunodeficiency virus 1
  source 1..22: note = HLAs: DRB1_1001 DPA10103-DPB10101 DPA10103-DPB10201 DPA10103-DPB10202 DPA10103-DPB10401 DPA10103-DPB112601 DPA10103-DPB11501 DPA10103-DPB11601 DPA10103-DPB11801 DPA10103-DPB11901 DPA10103-DPB12301 DPA10103-DPB13101 DPA10103-DPB13401 DPA10103-DPB13901 DPA10103-DPB14001 DPA10103-DPB14101 DPA10103-DPB14801 DPA10103-DPB15001 DPA10103-DPB15901 DPA10104-DPB10101 DPA10104-DPB11501 DPA10105-DPB10101 DPA10105-DPB10401 DPA10105-DPB11801 DPA10105-DPB15001 DPA10106-DPB10101 DPA10201-DPB10101 DPA10201-DPB110601 DPA10201-DPB11501 DPA10201-DPB11601 DPA10201-DPB11901 DPA10202-DPB10101 DPA10202-DPB10202 DPA10202-DPB10401 DPA10202-DPB110601 DPA10202-DPB11901 DPA10202-DPB13101 DPA10202-DPB16501 DPA10301-DPB10101 DPA10301-DPB10201 DPA10301-DPB10202 DPA10301-DPB10401 DPA10301-DPB10402 DPA10301-DPB110501 DPA10301-DPB110601 DPA10301-DPB11801 DPA10301-DPB12301 DPA10301-DPB13901 DPA10301-DPB14001 DPA10301-DPB14901 DPA10301-DPB15501 DPA10301-DPB16501 DPA10301-DPB17501 DPA10301-DPB18001 DPA10401-DPB10101; note = HLAs: DPA10401-DPB10201 DPA10401-DPB10202 DPA10401-DPB10402 DPA10401-DPB10501 DPA10401-DPB110501 DPA10401-DPB14901 DQA10101-DQB10501 DQA10102-DQB10501 DQA10102-DQB10502 DQA10102-DQB10503 DQA10103-DQB10501 DQA10104-DQB10501 DQA10105-DQB10501
EPPFLWMGYELHPDKWTVQPIQ

SEQ ID NO: 3288 - protein, 23 aa, Human immunodeficiency virus 1
  source 1..23: note = HLAs: DRB1_1001 DPA10103-DPB10101 DPA10103-DPB10201 DPA10103-DPB10202 DPA10103-DPB10401 DPA10103-DPB112601 DPA10103-DPB11501 DPA10103-DPB11601 DPA10103-DPB11801 DPA10103-DPB11901 DPA10103-DPB12301 DPA10103-DPB13101 DPA10103-DPB13401 DPA10103-DPB13901 DPA10103-DPB14001 DPA10103-DPB14101 DPA10103-DPB14801 DPA10103-DPB15001 DPA10103-DPB15901 DPA10104-DPB10101 DPA10104-DPB11501 DPA10105-DPB10101 DPA10105-DPB10401 DPA10105-DPB11801 DPA10105-DPB15001 DPA10106-DPB10101 DPA10201-DPB10101 DPA10201-DPB110601 DPA10201-DPB11501 DPA10201-DPB11601 DPA10201-DPB11901 DPA10202-DPB10101 DPA10202-DPB10201 DPA10202-DPB10202 DPA10202-DPB10401 DPA10202-DPB110601 DPA10202-DPB11901 DPA10202-DPB13101 DPA10202-DPB16501 DPA10301-DPB10101 DPA10301-DPB10201 DPA10301-DPB10202 DPA10301-DPB10401 DPA10301-DPB10402 DPA10301-DPB110501 DPA10301-DPB110601 DPA10301-DPB11801 DPA10301-DPB12301 DPA10301-DPB13901 DPA10301-DPB14001 DPA10301-DPB14901 DPA10301-DPB15501 DPA10301-DPB16501 DPA10301-DPB17501 DPA10301-DPB18001; note = HLAs: DPA10401-DPB10101 DPA10401-DPB10201 DPA10401-DPB10202 DPA10401-DPB10402 DPA10401-DPB10501 DPA10401-DPB110501 DPA10401-DPB14901 DQA10101-DQB10501 DQA10102-DQB10501 DQA10102-DQB10502 DQA10102-DQB10503 DQA10103-DQB10501 DQA10104-DQB10501 DQA10105-DQB10501 DQA10505-DQB10402
EPPFLWMGYELHPDKWTVQPIQL

SEQ ID NO: 3289 - protein, 24 aa, Human immunodeficiency virus 1
  source 1..24: note = HLAs: DRB1_1001 DPA10103-DPB10101 DPA10103-DPB10201 DPA10103-DPB10202 DPA10103-DPB10401 DPA10103-DPB112601 DPA10103-DPB11501 DPA10103-DPB11601 DPA10103-DPB11801 DPA10103-DPB11901 DPA10103-DPB12301 DPA10103-DPB13101 DPA10103-DPB13401 DPA10103-DPB13901 DPA10103-DPB14001 DPA10103-DPB14101 DPA10103-DPB14801 DPA10103-DPB15001 DPA10103-DPB15901 DPA10104-DPB10101 DPA10104-DPB11501 DPA10105-DPB10101 DPA10105-DPB10401 DPA10105-DPB11801 DPA10105-DPB15001 DPA10106-DPB10101 DPA10201-DPB10101 DPA10201-DPB110601 DPA10201-DPB11501 DPA10201-DPB11601 DPA10201-DPB11901 DPA10202-DPB10101 DPA10202-DPB10201 DPA10202-DPB10202 DPA10202-DPB10401 DPA10202-DPB110601 DPA10202-DPB11901 DPA10202-DPB13101 DPA10202-DPB15501 DPA10202-DPB16501 DPA10301-DPB10101 DPA10301-DPB10201 DPA10301-DPB10202 DPA10301-DPB10401 DPA10301-DPB10402 DPA10301-DPB110501 DPA10301-DPB110601 DPA10301-DPB11801 DPA10301-DPB12301 DPA10301-DPB13901 DPA10301-DPB14001 DPA10301-DPB14901 DPA10301-DPB15501 DPA10301-DPB16501 DPA10301-DPB17501; note = HLAs: DPA10301-DPB18001 DPA10401-DPB10101 DPA10401-DPB10201 DPA10401-DPB10202 DPA10401-DPB10402 DPA10401-DPB10501 DPA10401-DPB110501 DPA10401-DPB14901 DQA10101-DQB10501 DQA10102-DQB10501 DQA10102-DQB10502 DQA10102-DQB10503 DQA10103-DQB10501 DQA10104-DQB10501 DQA10105-DQB10501 DQA10505-DQB10402
EPPFLWMGYELHPDKWTVQPIQLP

SEQ ID NO: 3290 - protein, 13 aa, Human immunodeficiency virus 1
  source 1..13: note = HLAs: DQA10201-DQB10301 DQA10501-DQB10301 DQA10501-DQB10319 DQA10503-DQB10301 DQA10505-DQB10301 DQA10505-DQB10309 DQA10505-DQB10319 DQA10508-DQB10301 DQA10509-DQB10301
EPRGSDIAGTTST

SEQ ID NO: 3291 - protein, 14 aa, Human immunodeficiency virus 1
  source 1..14: note = HLAs: DQA10201-DQB10301 DQA10301-DQB10301 DQA10302-DQB10301 DQA10303-DQB10301 DQA10401-DQB10301 DQA10401-DQB10319 DQA10501-DQB10301 DQA10501-DQB10319 DQA10503-DQB10301 DQA10505-DQB10301 DQA10505-DQB10309 DQA10505-DQB10319 DQA10508-DQB10301 DQA10509-DQB10301 DQA10601-DQB10301
EPRGSDIAGTTSTL

SEQ ID NO: 3292 - protein, 15 aa, Human immunodeficiency virus 1
  source 1..15: note = HLAs: DQA10102-DQB10601 DQA10103-DQB10601 DQA10201-DQB10301 DQA10201-DQB10303 DQA10301-DQB10301 DQA10302-DQB10301 DQA10303-DQB10301 DQA10401-DQB10301 DQA10401-DQB10319 DQA10501-DQB10301 DQA10501-DQB10319 DQA10503-DQB10301 DQA10505-DQB10301 DQA10505-DQB10309 DQA10505-DQB10319 DQA10506-DQB10303 DQA10508-DQB10301 DQA10509-DQB10301 DQA10601-DQB10301
EPRGSDIAGTTSTLQ

SEQ ID NO: 3293 - protein, 16 aa, Human immunodeficiency virus 1
  source 1..16: note = HLAs: DQA10102-DQB10601 DQA10201-DQB10301 DQA10201-DQB10303 DQA10301-DQB10301 DQA10302-DQB10301 DQA10303-DQB10301 DQA10401-DQB10301 DQA10401-DQB10319 DQA10501-DQB10301 DQA10501-DQB10319 DQA10503-DQB10301 DQA10505-DQB10301 DQA10505-DQB10309 DQA10505-DQB10319 DQA10506-DQB10303 DQA10508-DQB10301 DQA10509-DQB10301 DQA10601-DQB10301
EPRGSDIAGTTSTLQE

SEQ ID NO: 3294 - protein, 17 aa, Human immunodeficiency virus 1
  source 1..17: note = HLAs: DQA10102-DQB10601 DQA10103-DQB10601 DQA10201-DQB10301 DQA10301-DQB10301 DQA10302-DQB10301 DQA10303-DQB10301 DQA10401-DQB10301 DQA10401-DQB10319 DQA10501-DQB10301 DQA10501-DQB10319 DQA10503-DQB10301 DQA10505-DQB10301 DQA10505-DQB10309 DQA10505-DQB10319 DQA10506-DQB10303 DQA10508-DQB10301 DQA10509-DQB10301 DQA10601-DQB10301
EPRGSDIAGTTSTLQEQ

SEQ ID NO: 3295 - protein, 18 aa, Human immunodeficiency virus 1
  source 1..18: note = HLAs: DQA10201-DQB10301 DQA10501-DQB10301 DQA10501-DQB10319 DQA10503-DQB10301 DQA10505-DQB10301 DQA10505-DQB10309 DQA10505-DQB10319 DQA10508-DQB10301 DQA10509-DQB10301
EPRGSDIAGTTSTLQEQI

SEQ ID NO: 3296 - protein, 14 aa, Human immunodeficiency virus 1
  source 1..14: note = HLAs: DRB1_0101 DRB1_0102 DRB1_0701 DRB1_0901 DRB1_1001 DRB1_1102 DRB1_1114 DRB1_1301 DRB1_1302 DRB1_1304 DRB1_1406 DPA10103-DPB11501 DPA10104-DPB11501 DPA10202-DPB10101 DPA10202-DPB110601 DPA10202-DPB11901 DPA10301-DPB10101 DPA10301-DPB10201 DPA10301-DPB10202 DPA10301-DPB10401 DPA10301-DPB11801 DPA10301-DPB12301 DPA10301-DPB13901 DPA10301-DPB14001 DPA10401-DPB10201 DPA10401-DPB10202 DQA10102-DQB10501 DQA10102-DQB10601 DQA10103-DQB10601 DQA10103-DQB10609 DQA10201-DQB10301
EQVDKLVSSGIRKV

SEQ ID NO: 3297 - protein, 15 aa, Human immunodeficiency virus 1
  source 1..15: note = HLAs: DRB1_0101 DRB1_0102 DRB1_0103 DRB1_0404 DRB1_0410 DRB1_0701 DRB1_0801 DRB1_0802 DRB1_0804 DRB1_0806 DRB1_0809 DRB1_0813 DRB1_0901 DRB1_1001 DRB1_1101 DRB1_1102 DRB1_1103 DRB1_1104 DRB1_1114 DRB1_1201 DRB1_1202 DRB1_1301 DRB1_1302 DRB1_1303 DRB1_1304 DRB1_1305 DRB1_1312 DRB1_1401 DRB1_1402 DRB1_1403 DRB1_1404 DRB1_1405 DRB1_1406 DRB1_1454 DRB1_1501 DRB1_1502 DRB1_1503 DRB1_1601 DRB1_1602 DPA10103-DPB10201 DPA10103-DPB10202 DPA10103-DPB11501 DPA10103-DPB11801 DPA10103-DPB11901 DPA10103-DPB13401 DPA10103-DPB14001 DPA10103-DPB14101 DPA10103-DPB14801 DPA10103-DPB15001 DPA10104-DPB11501 DPA10105-DPB11801 DPA10105-DPB15001 DPA10201-DPB110601 DPA10201-DPB11501 DPA10201-DPB11901 DPA10202-DPB10101 DPA10202-DPB10201 DPA10202-DPB10202 DPA10202-DPB10501 DPA10202-DPB10901 DPA10202-DPB110601 DPA10202-DPB11401 DPA10202-DPB11801 DPA10202-DPB11901 DPA10202-DPB13101 DPA10202-DPB13801 DPA10202-DPB16501 DPA10301-DPB10101 DPA10301-DPB10201 DPA10301-DPB10202 DPA10301-DPB10401 DPA10301-DPB10402; note = HLAs: DPA10301-DPB110501 DPA10301-DPB110601 DPA10301-DPB11801 DPA10301-DPB12301 DPA10301-DPB13901 DPA10301-DPB14001 DPA10301-DPB14901 DPA10301-DPB15501 DPA10301-DPB16501 DPA10301-DPB17501 DPA10301-DPB18001 DPA10401-DPB10101 DPA10401-DPB10201 DPA10401-DPB10202 DPA10401-DPB10501 DQA10102-DQB10501 DQA10102-DQB10601 DQA10102-DQB10602 DQA10102-DQB10609 DQA10102-DQB10611 DQA10103-DQB10501 DQA10103-DQB10601 DQA10103-DQB10602 DQA10103-DQB10608 DQA10103-DQB10609 DQA10201-DQB10301 DQA10201-DQB10303 DQA10501-DQB10301 DQA10501-DQB10319 DQA10503-DQB10301 DQA10505-DQB10301 DQA10505-DQB10309 DQA10505-DQB10319 DQA10505-DQB10402 DQA10506-DQB10303 DQA10508-DQB10301 DQA10509-DQB10301
EQVDKLVSSGIRKVL

SEQ ID NO: 3298 - protein, 16 aa, Human immunodeficiency virus 1
  source 1..16: note = HLAs: DRB1_0101 DRB1_0102 DRB1_0404 DRB1_0410 DRB1_0701 DRB1_0801 DRB1_0802 DRB1_0804 DRB1_0806 DRB1_0809 DRB1_0813 DRB1_0901 DRB1_1001 DRB1_1101 DRB1_1102 DRB1_1103 DRB1_1104 DRB1_1114 DRB1_1201 DRB1_1301 DRB1_1302 DRB1_1304 DRB1_1305 DRB1_1401 DRB1_1402 DRB1_1403 DRB1_1404 DRB1_1405 DRB1_1406 DRB1_1454 DRB1_1501 DRB1_1502 DRB1_1503 DRB1_1602 DPA10103-DPB10101 DPA10103-DPB10201 DPA10103-DPB10202 DPA10103-DPB10401 DPA10103-DPB112601 DPA10103-DPB11501 DPA10103-DPB11601 DPA10103-DPB11801 DPA10103-DPB11901 DPA10103-DPB12301 DPA10103-DPB13101 DPA10103-DPB13401 DPA10103-DPB13901 DPA10103-DPB14001 DPA10103-DPB14101 DPA10103-DPB14801 DPA10103-DPB15001 DPA10103-DPB15901 DPA10104-DPB10101 DPA10104-DPB11501 DPA10105-DPB10101 DPA10105-DPB10401 DPA10105-DPB11801 DPA10105-DPB15001 DPA10106-DPB10101 DPA10201-DPB10101 DPA10201-DPB10201 DPA10201-DPB10202 DPA10201-DPB110601 DPA10201-DPB11501 DPA10201-DPB11601 DPA10201-DPB11901 DPA10201-DPB13401 DPA10202-DPB10101 DPA10202-DPB10201 DPA10202-DPB10202; note = HLAs: DPA10202-DPB10401 DPA10202-DPB10501 DPA10202-DPB10901 DPA10202-DPB110601 DPA10202-DPB11301 DPA10202-DPB11401 DPA10202-DPB11801 DPA10202-DPB11901 DPA10202-DPB12901 DPA10202-DPB13101 DPA10202-DPB13801 DPA10202-DPB15501 DPA10202-DPB16501 DPA10301-DPB10101 DPA10301-DPB10201 DPA10301-DPB10202 DPA10301-DPB10401 DPA10301-DPB10402 DPA10301-DPB110501 DPA10301-DPB110601 DPA10301-DPB11801 DPA10301-DPB12301 DPA10301-DPB13901 DPA10301-DPB14001 DPA10301-DPB14901 DPA10301-DPB15501 DPA10301-DPB16501 DPA10301-DPB17501 DPA10301-DPB18001 DPA10401-DPB10101 DPA10401-DPB10201 DPA10401-DPB10202 DPA10401-DPB10402 DPA10401-DPB10501 DPA10401-DPB110501 DPA10401-DPB11401 DPA10401-DPB14901 DQA10101-DQB10601 DQA10102-DQB10501 DQA10102-DQB10503 DQA10102-DQB10601 DQA10102-DQB10602 DQA10102-DQB10609 DQA10102-DQB10611 DQA10103-DQB10501 DQA10103-DQB10601 DQA10103-DQB10602 DQA10103-DQB10604 DQA10103-DQB10608 DQA10103-DQB10609 DQA10201-DQB10301 DQA10201-DQB10303 DQA10501-DQB10301 DQA10501-DQB10319 DQA10503-DQB10301; note = HLAs: DQA10505-DQB10301 DQA10505-DQB10309 DQA10505-DQB10319 DQA10505-DQB10402 DQA10506-DQB10303 DQA10508-DQB10301 DQA10509-DQB10301 DQA10601-DQB10301
EQVDKLVSSGIRKVLF

SEQ ID NO: 3299 - protein, 17 aa, Human immunodeficiency virus 1
  source 1..17: note = HLAs: DRB1_0101 DRB1_0102 DRB1_0404 DRB1_0410 DRB1_0701 DRB1_0801 DRB1_0802 DRB1_0803 DRB1_0804 DRB1_0806 DRB1_0809 DRB1_0813 DRB1_0901 DRB1_1001 DRB1_1101 DRB1_1102 DRB1_1103 DRB1_1104 DRB1_1114 DRB1_1201 DRB1_1202 DRB1_1301 DRB1_1302 DRB1_1303 DRB1_1304 DRB1_1305 DRB1_1312 DRB1_1401 DRB1_1402 DRB1_1403 DRB1_1404 DRB1_1405 DRB1_1406 DRB1_1454 DRB1_1501 DRB1_1502 DRB1_1503 DRB1_1601 DRB1_1602 DPA10103-DPB10101 DPA10103-DPB10201 DPA10103-DPB10202 DPA10103-DPB10401 DPA10103-DPB10501 DPA10103-DPB112601 DPA10103-DPB11501 DPA10103-DPB11601 DPA10103-DPB11801 DPA10103-DPB11901 DPA10103-DPB12301 DPA10103-DPB13101 DPA10103-DPB13401 DPA10103-DPB13901 DPA10103-DPB14001 DPA10103-DPB14101 DPA10103-DPB14801 DPA10103-DPB15001 DPA10103-DPB15901 DPA10104-DPB10101 DPA10104-DPB11501 DPA10105-DPB10101 DPA10105-DPB10401 DPA10105-DPB11801 DPA10105-DPB15001 DPA10106-DPB10101 DPA10201-DPB10101 DPA10201-DPB10201 DPA10201-DPB10202 DPA10201-DPB110601 DPA10201-DPB11501 DPA10201-DPB11601 DPA10201-DPB11801; note = HLAs: DPA10201-DPB11901 DPA10201-DPB13401 DPA10202-DPB10101 DPA10202-DPB10201 DPA10202-DPB10202 DPA10202-DPB10401 DPA10202-DPB10402 DPA10202-DPB10501 DPA10202-DPB10901 DPA10202-DPB110001 DPA10202-DPB110501 DPA10202-DPB110601 DPA10202-DPB11301 DPA10202-DPB11401 DPA10202-DPB11801 DPA10202-DPB11901 DPA10202-DPB12901 DPA10202-DPB13101 DPA10202-DPB13801 DPA10202-DPB15501 DPA10202-DPB16501 DPA10301-DPB10101 DPA10301-DPB10201 DPA10301-DPB10202 DPA10301-DPB10401 DPA10301-DPB10402 DPA10301-DPB110501 DPA10301-DPB110601 DPA10301-DPB11801 DPA10301-DPB12301 DPA10301-DPB13901 DPA10301-DPB14001 DPA10301-DPB14901 DPA10301-DPB15501 DPA10301-DPB16501 DPA10301-DPB17501 DPA10301-DPB18001 DPA10401-DPB10101 DPA10401-DPB10201 DPA10401-DPB10202 DPA10401-DPB10402 DPA10401-DPB10501 DPA10401-DPB110501 DPA10401-DPB11401 DPA10401-DPB14901 DQA10101-DQB10601 DQA10102-DQB10501 DQA10102-DQB10503 DQA10102-DQB10601 DQA10102-DQB10602 DQA10102-DQB10609 DQA10102-DQB10611 DQA10103-DQB10501 DQA10103-DQB10601; note = HLAs: DQA10103-DQB10602 DQA10103-DQB10604 DQA10103-DQB10608 DQA10103-DQB10609 DQA10201-DQB10301 DQA10201-DQB10303 DQA10501-DQB10301 DQA10501-DQB10319 DQA10503-DQB10301 DQA10505-DQB10301 DQA10505-DQB10309 DQA10505-DQB10319 DQA10505-DQB10402 DQA10506-DQB10303 DQA10508-DQB10301 DQA10509-DQB10301
EQVDKLVSSGIRKVLFL

SEQ ID NO: 3300 - protein, 18 aa, Human immunodeficiency virus 1
  source 1..18: note = HLAs: DRB1_0101 DRB1_0701 DRB1_0813 DRB1_0901 DRB1_1001 DRB1_1102 DRB1_1103 DRB1_1114 DRB1_1301 DRB1_1302 DRB1_1304 DRB1_1401 DRB1_1406 DRB1_1454 DPA10103-DPB10101 DPA10103-DPB10201 DPA10103-DPB10202 DPA10103-DPB11501 DPA10103-DPB11901 DPA10103-DPB13401 DPA10103-DPB14801 DPA10104-DPB10101 DPA10104-DPB11501 DPA10105-DPB10101 DPA10106-DPB10101 DPA10201-DPB10101 DPA10201-DPB110601 DPA10201-DPB11501 DPA10201-DPB11901 DPA10202-DPB10101 DPA10202-DPB10201 DPA10202-DPB10202 DPA10202-DPB110601 DPA10202-DPB11801 DPA10202-DPB11901 DPA10202-DPB13101 DPA10202-DPB16501 DPA10301-DPB10101 DPA10301-DPB10201 DPA10301-DPB10202 DPA10301-DPB10401 DPA10301-DPB10402 DPA10301-DPB110501 DPA10301-DPB110601 DPA10301-DPB11801 DPA10301-DPB12301 DPA10301-DPB13901 DPA10301-DPB14001 DPA10301-DPB14901 DPA10301-DPB16501 DPA10301-DPB17501 DPA10301-DPB18001 DPA10401-DPB10101 DPA10401-DPB10201 DPA10401-DPB10202 DQA10102-DQB10501 DQA10102-DQB10601 DQA10102-DQB10602 DQA10102-DQB10609 DQA10102-DQB10611 DQA10103-DQB10501; note = HLAs: DQA10103-DQB10601 DQA10103-DQB10602 DQA10103-DQB10609 DQA10201-DQB10301
EQVDKLVSSGIRKVLFLD

SEQ ID NO: 3301 - protein, 19 aa, Human immunodeficiency virus 1
  source 1..19: note = HLAs: DRB1_0101 DRB1_0102 DRB1_0404 DRB1_0410 DRB1_0701 DRB1_0801 DRB1_0804 DRB1_0806 DRB1_0813 DRB1_0901 DRB1_1001 DRB1_1101 DRB1_1102 DRB1_1103 DRB1_1104 DRB1_1114 DRB1_1201 DRB1_1301 DRB1_1302 DRB1_1304 DRB1_1305 DRB1_1401 DRB1_1402 DRB1_1404 DRB1_1405 DRB1_1406 DRB1_1454 DRB1_1501 DRB1_1502 DRB1_1503 DRB1_1602 DPA10103-DPB10101 DPA10103-DPB10201 DPA10103-DPB10202 DPA10103-DPB10401 DPA10103-DPB10501 DPA10103-DPB112601 DPA10103-DPB11501 DPA10103-DPB11601 DPA10103-DPB11801 DPA10103-DPB11901 DPA10103-DPB12301 DPA10103-DPB13101 DPA10103-DPB13401 DPA10103-DPB13901 DPA10103-DPB14001 DPA10103-DPB14101 DPA10103-DPB14801 DPA10103-DPB15001 DPA10103-DPB15901 DPA10104-DPB10101 DPA10104-DPB11501 DPA10105-DPB10101 DPA10105-DPB10401 DPA10105-DPB11801 DPA10105-DPB15001 DPA10106-DPB10101 DPA10201-DPB10101 DPA10201-DPB10201 DPA10201-DPB10202 DPA10201-DPB110601 DPA10201-DPB11501 DPA10201-DPB11601 DPA10201-DPB11901 DPA10202-DPB10101 DPA10202-DPB10201 DPA10202-DPB10202 DPA10202-DPB10401; note = HLAs: DPA10202-DPB10501 DPA10202-DPB10901 DPA10202-DPB110601 DPA10202-DPB11301 DPA10202-DPB11801 DPA10202-DPB11901 DPA10202-DPB13101 DPA10202-DPB13801 DPA10202-DPB15501 DPA10202-DPB16501 DPA10301-DPB10101 DPA10301-DPB10201 DPA10301-DPB10202 DPA10301-DPB10401 DPA10301-DPB10402 DPA10301-DPB110501 DPA10301-DPB110601 DPA10301-DPB11801 DPA10301-DPB12301 DPA10301-DPB13901 DPA10301-DPB14001 DPA10301-DPB14901 DPA10301-DPB15501 DPA10301-DPB16501 DPA10301-DPB17501 DPA10301-DPB18001 DPA10401-DPB10101 DPA10401-DPB10201 DPA10401-DPB10202 DPA10401-DPB10402 DPA10401-DPB10501 DPA10401-DPB110501 DPA10401-DPB11301 DPA10401-DPB113301 DPA10401-DPB14901 DQA10102-DQB10501 DQA10102-DQB10503 DQA10102-DQB10601 DQA10102-DQB10602 DQA10102-DQB10609 DQA10102-DQB10611 DQA10103-DQB10501 DQA10103-DQB10601 DQA10103-DQB10602 DQA10103-DQB10608 DQA10103-DQB10609 DQA10201-DQB10301 DQA10201-DQB10303 DQA10505-DQB10402
EQVDKLVSSGIRKVLFLDG

SEQ ID NO: 3302 - protein, 20 aa, Human immunodeficiency virus 1
  source 1..20: note = HLAs: DRB1_0101 DRB1_0102 DRB1_0404 DRB1_0410 DRB1_0701 DRB1_0801 DRB1_0802 DRB1_0803 DRB1_0804 DRB1_0806 DRB1_0809 DRB1_0813 DRB1_0901 DRB1_1001 DRB1_1101 DRB1_1102 DRB1_1103 DRB1_1104 DRB1_1114 DRB1_1201 DRB1_1301 DRB1_1302 DRB1_1303 DRB1_1304 DRB1_1305 DRB1_1312 DRB1_1401 DRB1_1402 DRB1_1403 DRB1_1404 DRB1_1405 DRB1_1406 DRB1_1454 DRB1_1501 DRB1_1502 DRB1_1503 DRB1_1601 DRB1_1602 DPA10103-DPB10101 DPA10103-DPB10201 DPA10103-DPB10202 DPA10103-DPB10401 DPA10103-DPB10402 DPA10103-DPB10501 DPA10103-DPB110501 DPA10103-DPB112601 DPA10103-DPB11501 DPA10103-DPB11601 DPA10103-DPB11801 DPA10103-DPB11901 DPA10103-DPB12301 DPA10103-DPB13101 DPA10103-DPB13401 DPA10103-DPB13901 DPA10103-DPB14001 DPA10103-DPB14101 DPA10103-DPB14801 DPA10103-DPB14901 DPA10103-DPB15001 DPA10103-DPB15101 DPA10103-DPB15501 DPA10103-DPB15901 DPA10103-DPB18001 DPA10104-DPB10101 DPA10104-DPB11501 DPA10105-DPB10101 DPA10105-DPB10401 DPA10105-DPB11801 DPA10105-DPB15001 DPA10106-DPB10101 DPA10201-DPB10101 DPA10201-DPB10201; note = HLAs: DPA10201-DPB10202 DPA10201-DPB10501 DPA10201-DPB110601 DPA10201-DPB11501 DPA10201-DPB11601 DPA10201-DPB11801 DPA10201-DPB11901 DPA10201-DPB13401 DPA10201-DPB15501 DPA10202-DPB10101 DPA10202-DPB10201 DPA10202-DPB10202 DPA10202-DPB10401 DPA10202-DPB10402 DPA10202-DPB10501 DPA10202-DPB10901 DPA10202-DPB110001 DPA10202-DPB110501 DPA10202-DPB110601 DPA10202-DPB11101 DPA10202-DPB11301 DPA10202-DPB113101 DPA10202-DPB11401 DPA10202-DPB11701 DPA10202-DPB11801 DPA10202-DPB11901 DPA10202-DPB12101 DPA10202-DPB12901 DPA10202-DPB13001 DPA10202-DPB13101 DPA10202-DPB13801 DPA10202-DPB15501 DPA10202-DPB16501 DPA10202-DPB18501 DPA10301-DPB10101 DPA10301-DPB10201 DPA10301-DPB10202 DPA10301-DPB10401 DPA10301-DPB10402 DPA10301-DPB10901 DPA10301-DPB110501 DPA10301-DPB110601 DPA10301-DPB11101 DPA10301-DPB11301 DPA10301-DPB11701 DPA10301-DPB11801 DPA10301-DPB12301 DPA10301-DPB13901 DPA10301-DPB14001 DPA10301-DPB14901 DPA10301-DPB15501 DPA10301-DPB16501 DPA10301-DPB17501 DPA10301-DPB18001; note = HLAs: DPA10401-DPB10101 DPA10401-DPB10201 DPA10401-DPB10202 DPA10401-DPB10301 DPA10401-DPB10402 DPA10401-DPB10501 DPA10401-DPB110501 DPA10401-DPB11301 DPA10401-DPB113301 DPA10401-DPB11401 DPA10401-DPB14901 DQA10102-DQB10501 DQA10102-DQB10503 DQA10102-DQB10601 DQA10102-DQB10602 DQA10102-DQB10609 DQA10102-DQB10611 DQA10103-DQB10501 DQA10103-DQB10503 DQA10103-DQB10601 DQA10103-DQB10602 DQA10103-DQB10604 DQA10103-DQB10608 DQA10103-DQB10609 DQA10201-DQB10301 DQA10201-DQB10303 DQA10505-DQB10402 DQA10506-DQB10303
EQVDKLVSSGIRKVLFLDGI

SEQ ID NO: 3303 - protein, 15 aa, Human immunodeficiency virus 1
  source 1..15: note = HLAs: DRB1_0101 DRB1_0801 DRB1_0804 DRB1_0806 DRB1_1101 DRB1_1102 DRB1_1103 DRB1_1104 DRB1_1202 DRB1_1301 DRB1_1304 DRB1_1305 DRB1_1406 DRB1_1501 DRB1_1601
ESMNKELKKIIGQVR

SEQ ID NO: 3304 - protein, 16 aa, Human immunodeficiency virus 1
  source 1..16: note = HLAs: DRB1_0806 DRB1_1102 DRB1_1103 DRB1_1104 DRB1_1301 DRB1_1304 DRB1_1406
ESMNKELKKIIGQVRD

SEQ ID NO: 3305 - protein, 17 aa, Human immunodeficiency virus 1
  source 1..17: note = HLAs: DRB1_0804 DRB1_0806 DRB1_1101 DRB1_1102 DRB1_1103 DRB1_1104 DRB1_1301 DRB1_1304 DRB1_1305 DRB1_1406 DRB1_1601
ESMNKELKKIIGQVRDQ

SEQ ID NO: 3306 - protein, 18 aa, Human immunodeficiency virus 1
  source 1..18: note = HLAs: DRB1_1103 DRB1_1406
ESMNKELKKIIGQVRDQA

SEQ ID NO: 3307 - protein, 19 aa, Human immunodeficiency virus 1
  source 1..19: note = HLAs: DRB1_0804 DRB1_0806 DRB1_1101 DRB1_1102 DRB1_1103 DRB1_1104 DRB1_1301 DRB1_1304 DRB1_1305 DRB1_1406
ESMNKELKKIIGQVRDQAE

SEQ ID NO: 3308 - protein, 20 aa, Human immunodeficiency virus 1
  source 1..20: note = HLAs: DRB1_0101 DRB1_0410 DRB1_0801 DRB1_0802 DRB1_0804 DRB1_0806 DRB1_0809 DRB1_1001 DRB1_1101 DRB1_1102 DRB1_1103 DRB1_1104 DRB1_1202 DRB1_1301 DRB1_1304 DRB1_1305 DRB1_1406 DRB1_1501 DRB1_1601 DPA10202-DPB10501 DPA10202-DPB110601 DPA10202-DPB11901 DPA10202-DPB13801 DPA10301-DPB11801 DQA10102-DQB10501 DQA10102-DQB10604 DQA10102-DQB10609
ESMNKELKKIIGQVRDQAEH

SEQ ID NO: 3309 - protein, 21 aa, Human immunodeficiency virus 1
  source 1..21: note = HLAs: DRB1_0101 DRB1_0410 DRB1_0801 DRB1_0804 DRB1_0806 DRB1_1101 DRB1_1102 DRB1_1103 DRB1_1104 DRB1_1301 DRB1_1304 DRB1_1305 DRB1_1406 DRB1_1501 DRB1_1601 DQA10102-DQB10501 DQA10102-DQB10604 DQA10102-DQB10609
ESMNKELKKIIGQVRDQAEHL

SEQ ID NO: 3310 - protein, 14 aa, Human immunodeficiency virus 1
  source 1..14: note = HLAs: DRB1_0101 DRB1_0401 DRB1_0404 DRB1_0405 DRB1_0408 DRB1_0410 DRB1_0813 DRB1_1001 DRB1_1501 DQA10102-DQB10501
ETPGIRYQYNVLPQ

SEQ ID NO: 3311 - protein, 15 aa, Human immunodeficiency virus 1
  source 1..15: note = HLAs: DRB1_0101 DRB1_0102 DRB1_0401 DRB1_0402 DRB1_0404 DRB1_0405 DRB1_0408 DRB1_0410 DRB1_0801 DRB1_0802 DRB1_0804 DRB1_0806 DRB1_0809 DRB1_0813 DRB1_1001 DRB1_1102 DRB1_1104 DRB1_1114 DRB1_1301 DRB1_1302 DRB1_1304 DRB1_1402 DRB1_1406 DRB1_1501 DRB1_1502 DRB1_1503 DRB1_1601 DRB1_1602 DPA10301-DPB10201 DPA10301-DPB10202 DPA10401-DPB10101 DQA10102-DQB10501
ETPGIRYQYNVLPQG

SEQ ID NO: 3312 - protein, 16 aa, Human immunodeficiency virus 1
  source 1..16: note = HLAs: DRB1_0101 DRB1_0102 DRB1_0401 DRB1_0402 DRB1_0404 DRB1_0405 DRB1_0408 DRB1_0410 DRB1_0802 DRB1_0809 DRB1_0813 DRB1_1001 DRB1_1114 DRB1_1302 DRB1_1402 DRB1_1406 DRB1_1501 DRB1_1502 DRB1_1602 DPA10301-DPB10101 DPA10301-DPB10201 DPA10301-DPB10202 DPA10301-DPB110601 DPA10401-DPB10101 DQA10102-DQB10501 DQA10102-DQB10503 DQA10103-DQB10501
ETPGIRYQYNVLPQGW

SEQ ID NO: 3313 - protein, 17 aa, Human immunodeficiency virus 1
  source 1..17: note = HLAs: DRB1_0101 DRB1_0102 DRB1_0401 DRB1_0404 DRB1_0405 DRB1_0408 DRB1_0410 DRB1_0801 DRB1_0802 DRB1_0804 DRB1_0806 DRB1_0809 DRB1_0813 DRB1_1001 DRB1_1101 DRB1_1102 DRB1_1104 DRB1_1114 DRB1_1301 DRB1_1302 DRB1_1304 DRB1_1305 DRB1_1402 DRB1_1406 DRB1_1501 DRB1_1502 DRB1_1601 DRB1_1602 DPA10301-DPB10101 DPA10301-DPB10201 DPA10301-DPB10202 DPA10301-DPB110601 DPA10401-DPB10101 DQA10102-DQB10501 DQA10102-DQB10503 DQA10103-DQB10501
ETPGIRYQYNVLPQGWK

SEQ ID NO: 3314 - protein, 18 aa, Human immunodeficiency virus 1
  source 1..18: note = HLAs: DRB1_0401 DRB1_0404 DRB1_0408 DRB1_0813 DRB1_1001 DQA10102-DQB10501
ETPGIRYQYNVLPQGWKG

SEQ ID NO: 3315 - protein, 19 aa, Human immunodeficiency virus 1
  source 1..19: note = HLAs: DRB1_0101 DRB1_0102 DRB1_0401 DRB1_0404 DRB1_0405 DRB1_0408 DRB1_0410 DRB1_0802 DRB1_0809 DRB1_0813 DRB1_1001 DRB1_1101 DRB1_1114 DRB1_1302 DRB1_1305 DRB1_1406 DRB1_1501 DRB1_1602 DPA10301-DPB10101 DPA10301-DPB10201 DPA10301-DPB10202 DPA10301-DPB110601 DPA10401-DPB10101 DQA10102-DQB10501 DQA10102-DQB10503 DQA10103-DQB10501
ETPGIRYQYNVLPQGWKGS

SEQ ID NO: 3316 - protein, 20 aa, Human immunodeficiency virus 1
  source 1..20: note = HLAs: DRB1_0101 DRB1_0102 DRB1_0401 DRB1_0404 DRB1_0405 DRB1_0408 DRB1_0410 DRB1_0801 DRB1_0802 DRB1_0804 DRB1_0806 DRB1_0809 DRB1_0813 DRB1_1001 DRB1_1101 DRB1_1102 DRB1_1104 DRB1_1114 DRB1_1301 DRB1_1302 DRB1_1304 DRB1_1305 DRB1_1402 DRB1_1403 DRB1_1406 DRB1_1501 DRB1_1502 DRB1_1503 DRB1_1601 DRB1_1602 DPA10103-DPB10101 DPA10103-DPB11501 DPA10103-DPB15001 DPA10104-DPB10101 DPA10104-DPB11501 DPA10105-DPB10101 DPA10105-DPB15001 DPA10202-DPB10101 DPA10202-DPB10501 DPA10202-DPB110601 DPA10202-DPB11901 DPA10202-DPB13101 DPA10202-DPB13801 DPA10301-DPB10101 DPA10301-DPB10201 DPA10301-DPB10202 DPA10301-DPB110601 DPA10301-DPB11801 DPA10301-DPB14001 DPA10301-DPB16501 DPA10401-DPB10101 DPA10401-DPB10201 DPA10401-DPB10202 DPA10401-DPB10501 DQA10102-DQB10501 DQA10102-DQB10503 DQA10103-DQB10501
ETPGIRYQYNVLPQGWKGSP

SEQ ID NO: 3317 - protein, 21 aa, Human immunodeficiency virus 1
  source 1..21: note = HLAs: DRB1_0101 DRB1_0401 DRB1_0404 DRB1_0405 DRB1_0408 DRB1_0410 DRB1_0801 DRB1_0802 DRB1_0809 DRB1_0813 DRB1_1001 DRB1_1101 DRB1_1114 DRB1_1302 DRB1_1305 DRB1_1406 DRB1_1501 DRB1_1602 DPA10301-DPB10101 DPA10301-DPB110601 DPA10401-DPB10101 DQA10102-DQB10501 DQA10103-DQB10501
ETPGIRYQYNVLPQGWKGSPA

SEQ ID NO: 3318 - protein, 22 aa, Human immunodeficiency virus 1
  source 1..22: note = HLAs: DRB1_0101 DRB1_0102 DRB1_0401 DRB1_0404 DRB1_0405 DRB1_0408 DRB1_0410 DRB1_0801 DRB1_0802 DRB1_0809 DRB1_0813 DRB1_1001 DRB1_1101 DRB1_1102 DRB1_1114 DRB1_1301 DRB1_1302 DRB1_1305 DRB1_1406 DRB1_1501 DRB1_1602 DPA10301-DPB10101 DPA10301-DPB110601 DPA10301-DPB11801 DPA10401-DPB10101 DQA10102-DQB10501 DQA10103-DQB10501
ETPGIRYQYNVLPQGWKGSPAI

SEQ ID NO: 3319 - protein, 23 aa, Human immunodeficiency virus 1
  source 1..23: note = HLAs: DRB1_0101 DRB1_0102 DRB1_0401 DRB1_0404 DRB1_0405 DRB1_0408 DRB1_0410 DRB1_0801 DRB1_0802 DRB1_0806 DRB1_0809 DRB1_0813 DRB1_1001 DRB1_1101 DRB1_1102 DRB1_1104 DRB1_1114 DRB1_1301 DRB1_1302 DRB1_1304 DRB1_1305 DRB1_1402 DRB1_1406 DRB1_1501 DRB1_1601 DRB1_1602 DPA10301-DPB10101 DPA10301-DPB110601 DPA10301-DPB11801 DPA10401-DPB10101 DQA10102-DQB10501 DQA10102-DQB10503 DQA10103-DQB10501
ETPGIRYQYNVLPQGWKGSPAIF

SEQ ID NO: 3320 - protein, 24 aa, Human immunodeficiency virus 1
  source 1..24: note = HLAs: DRB1_0101 DRB1_0102 DRB1_0401 DRB1_0404 DRB1_0405 DRB1_0408 DRB1_0410 DRB1_0801 DRB1_0802 DRB1_0806 DRB1_0809 DRB1_0813 DRB1_1001 DRB1_1101 DRB1_1102 DRB1_1104 DRB1_1114 DRB1_1301 DRB1_1302 DRB1_1304 DRB1_1305 DRB1_1402 DRB1_1406 DRB1_1501 DRB1_1601 DRB1_1602 DPA10301-DPB10101 DPA10301-DPB10201 DPA10301-DPB10202 DPA10301-DPB110601 DPA10301-DPB11801 DPA10401-DPB10101 DQA10102-DQB10501 DQA10102-DQB10503 DQA10103-DQB10501 DQA10505-DQB10402
ETPGIRYQYNVLPQGWKGSPAIFQ

SEQ ID NO: 3321 - protein, 13 aa, Human immunodeficiency virus 1
  source 1..13: note = HLAs: DRB1_0101 DRB1_0404 DRB1_0408 DRB1_1001 DQA10102-DQB10501 DQA10201-DQB10301 DQA10201-DQB10303
EVIPMFSALSEGA

SEQ ID NO: 3322 - protein, 14 aa, Human immunodeficiency virus 1
  source 1..14: note = HLAs: DRB1_0101 DRB1_0102 DRB1_0401 DRB1_0404 DRB1_0405 DRB1_0408 DRB1_0410 DRB1_0901 DRB1_1001 DQA10102-DQB10501 DQA10102-DQB10503 DQA10102-DQB10601 DQA10102-DQB10602 DQA10102-DQB10611 DQA10103-DQB10501 DQA10103-DQB10601 DQA10103-DQB10609 DQA10201-DQB10301 DQA10201-DQB10302 DQA10201-DQB10303 DQA10301-DQB10301 DQA10302-DQB10301 DQA10303-DQB10301 DQA10401-DQB10301 DQA10401-DQB10319 DQA10501-DQB10301 DQA10501-DQB10319 DQA10503-DQB10301 DQA10505-DQB10301 DQA10505-DQB10302 DQA10505-DQB10309 DQA10505-DQB10319 DQA10505-DQB10402 DQA10506-DQB10303 DQA10508-DQB10301 DQA10509-DQB10301 DQA10601-DQB10301
EVIPMFSALSEGAT

SEQ ID NO: 3323 - protein, 15 aa, Human immunodeficiency virus 1
  source 1..15: note = HLAs: DRB1_0101 DRB1_0102 DRB1_0401 DRB1_0404 DRB1_0405 DRB1_0408 DRB1_0410 DRB1_0701 DRB1_0801 DRB1_0802 DRB1_0804 DRB1_0806 DRB1_0809 DRB1_0813 DRB1_0901 DRB1_1001 DRB1_1104 DRB1_1304 DRB1_1406 DRB1_1501 DRB1_1503 DRB1_1601 DRB1_1602 DPA10301-DPB10101 DQA10102-DQB10501 DQA10102-DQB10503 DQA10102-DQB10601 DQA10102-DQB10602 DQA10102-DQB10609 DQA10102-DQB10611 DQA10103-DQB10501 DQA10103-DQB10601 DQA10103-DQB10602 DQA10103-DQB10609 DQA10201-DQB10301 DQA10201-DQB10302 DQA10201-DQB10303 DQA10301-DQB10301 DQA10302-DQB10301 DQA10303-DQB10301 DQA10401-DQB10301 DQA10401-DQB10319 DQA10501-DQB10203 DQA10501-DQB10301 DQA10501-DQB10319 DQA10503-DQB10301 DQA10505-DQB10301 DQA10505-DQB10302 DQA10505-DQB10309 DQA10505-DQB10319 DQA10505-DQB10402 DQA10506-DQB10303 DQA10508-DQB10301 DQA10509-DQB10301 DQA10601-DQB10301
EVIPMFSALSEGATP

SEQ ID NO: 3324 - protein, 16 aa, Human immunodeficiency virus 1
  source 1..16: note = HLAs: DRB1_0101 DRB1_0102 DRB1_0401 DRB1_0404 DRB1_0405 DRB1_0408 DRB1_0410 DRB1_0802 DRB1_0809 DRB1_0901 DRB1_1001 DRB1_1602 DPA10301-DPB10101 DQA10102-DQB10501 DQA10102-DQB10503 DQA10102-DQB10601 DQA10102-DQB10602 DQA10102-DQB10609 DQA10102-DQB10611 DQA10103-DQB10501 DQA10103-DQB10601 DQA10103-DQB10602 DQA10103-DQB10609 DQA10201-DQB10301 DQA10201-DQB10302 DQA10201-DQB10303 DQA10301-DQB10301 DQA10301-DQB10304 DQA10302-DQB10301 DQA10302-DQB10304 DQA10303-DQB10301 DQA10303-DQB10304 DQA10401-DQB10301 DQA10401-DQB10319 DQA10501-DQB10203 DQA10501-DQB10301 DQA10501-DQB10319 DQA10503-DQB10301 DQA10505-DQB10301 DQA10505-DQB10302 DQA10505-DQB10309 DQA10505-DQB10319 DQA10505-DQB10402 DQA10506-DQB10303 DQA10508-DQB10301 DQA10509-DQB10301 DQA10601-DQB10301
EVIPMFSALSEGATPQ

SEQ ID NO: 3325 - protein, 17 aa, Human immunodeficiency virus 1
  source 1..17: note = HLAs: DRB1_0101 DRB1_0102 DRB1_0401 DRB1_0404 DRB1_0405 DRB1_0408 DRB1_0410 DRB1_0802 DRB1_0804 DRB1_0809 DRB1_0901 DRB1_1001 DRB1_1602 DPA10301-DPB10101 DQA10102-DQB10501 DQA10102-DQB10503 DQA10102-DQB10601 DQA10102-DQB10602 DQA10102-DQB10609 DQA10102-DQB10611 DQA10103-DQB10501 DQA10103-DQB10601 DQA10103-DQB10602 DQA10103-DQB10609 DQA10201-DQB10301 DQA10201-DQB10302 DQA10201-DQB10303 DQA10301-DQB10301 DQA10302-DQB10301 DQA10303-DQB10301 DQA10401-DQB10301 DQA10401-DQB10319 DQA10501-DQB10203 DQA10501-DQB10301 DQA10501-DQB10319 DQA10503-DQB10301 DQA10505-DQB10301 DQA10505-DQB10302 DQA10505-DQB10309 DQA10505-DQB10319 DQA10505-DQB10402 DQA10506-DQB10303 DQA10508-DQB10301 DQA10509-DQB10301 DQA10601-DQB10301
EVIPMFSALSEGATPQD

SEQ ID NO: 3326 - protein, 18 aa, Human immunodeficiency virus 1
  source 1..18: note = HLAs: DRB1_0101 DRB1_0404 DRB1_1001 DQA10102-DQB10501 DQA10102-DQB10601 DQA10103-DQB10601 DQA10201-DQB10301 DQA10201-DQB10303 DQA10401-DQB10301 DQA10401-DQB10319 DQA10501-DQB10301 DQA10501-DQB10319 DQA10503-DQB10301 DQA10505-DQB10301 DQA10505-DQB10309 DQA10505-DQB10319 DQA10506-DQB10303 DQA10508-DQB10301 DQA10509-DQB10301 DQA10601-DQB10301
EVIPMFSALSEGATPQDL

SEQ ID NO: 3327 - protein, 19 aa, Human immunodeficiency virus 1
  source 1..19: note = HLAs: DRB1_0101 DRB1_0102 DRB1_0404 DRB1_0408 DRB1_0410 DRB1_0901 DRB1_1001 DQA10102-DQB10501 DQA10102-DQB10503 DQA10102-DQB10601 DQA10102-DQB10602 DQA10102-DQB10609 DQA10102-DQB10611 DQA10103-DQB10501 DQA10103-DQB10601 DQA10103-DQB10609 DQA10201-DQB10301 DQA10201-DQB10302 DQA10201-DQB10303 DQA10301-DQB10301 DQA10302-DQB10301 DQA10303-DQB10301 DQA10401-DQB10301 DQA10401-DQB10319 DQA10501-DQB10301 DQA10501-DQB10319 DQA10503-DQB10301 DQA10505-DQB10301 DQA10505-DQB10302 DQA10505-DQB10309 DQA10505-DQB10319 DQA10505-DQB10402 DQA10506-DQB10303 DQA10508-DQB10301 DQA10509-DQB10301 DQA10601-DQB10301
EVIPMFSALSEGATPQDLN

SEQ ID NO: 3328 - protein, 20 aa, Human immunodeficiency virus 1
  source 1..20: note = HLAs: DRB1_0101 DRB1_0102 DRB1_0401 DRB1_0404 DRB1_0405 DRB1_0408 DRB1_0410 DRB1_0901 DRB1_1001 DRB1_1602 DPA10301-DPB10101 DPA10401-DPB10101 DQA10102-DQB10501 DQA10102-DQB10503 DQA10102-DQB10601 DQA10102-DQB10602 DQA10102-DQB10609 DQA10102-DQB10611 DQA10103-DQB10501 DQA10103-DQB10601 DQA10103-DQB10602 DQA10103-DQB10609 DQA10201-DQB10301 DQA10201-DQB10303 DQA10301-DQB10301 DQA10302-DQB10301 DQA10303-DQB10301 DQA10401-DQB10301 DQA10401-DQB10319 DQA10501-DQB10301 DQA10501-DQB10319 DQA10503-DQB10301 DQA10505-DQB10301 DQA10505-DQB10302 DQA10505-DQB10309 DQA10505-DQB10319 DQA10505-DQB10402 DQA10506-DQB10303 DQA10508-DQB10301 DQA10509-DQB10301 DQA10601-DQB10301
EVIPMFSALSEGATPQDLNT

SEQ ID NO: 3329 - protein, 21 aa, Human immunodeficiency virus 1
  source 1..21: note = HLAs: DRB1_0101 DRB1_0404 DRB1_0408 DRB1_0410 DRB1_0901 DRB1_1001 DQA10102-DQB10501 DQA10102-DQB10601 DQA10102-DQB10609 DQA10103-DQB10501 DQA10103-DQB10601 DQA10103-DQB10609 DQA10201-DQB10301 DQA10201-DQB10303 DQA10501-DQB10301 DQA10501-DQB10319 DQA10503-DQB10301 DQA10505-DQB10301 DQA10505-DQB10309 DQA10505-DQB10319 DQA10506-DQB10303 DQA10508-DQB10301 DQA10509-DQB10301 DQA10601-DQB10301
EVIPMFSALSEGATPQDLNTM

SEQ ID NO: 3330 - protein, 22 aa, Human immunodeficiency virus 1
  source 1..22: note = HLAs: DRB1_0101 DRB1_0404 DRB1_0408 DRB1_0410 DRB1_0901 DRB1_1001 DQA10102-DQB10501 DQA10102-DQB10601 DQA10102-DQB10609 DQA10103-DQB10501 DQA10103-DQB10601 DQA10103-DQB10609 DQA10201-DQB10301 DQA10201-DQB10303 DQA10501-DQB10301 DQA10501-DQB10319 DQA10503-DQB10301 DQA10505-DQB10301 DQA10505-DQB10309 DQA10505-DQB10319 DQA10506-DQB10303 DQA10508-DQB10301 DQA10509-DQB10301 DQA10601-DQB10301
EVIPMFSALSEGATPQDLNTML

SEQ ID NO: 3331 - protein, 23 aa, Human immunodeficiency virus 1
  source 1..23: note = HLAs: DRB1_0101 DRB1_0404 DRB1_0408 DRB1_0410 DRB1_0901 DRB1_1001 DQA10102-DQB10501 DQA10102-DQB10601 DQA10102-DQB10609 DQA10103-DQB10501 DQA10103-DQB10601 DQA10103-DQB10609 DQA10201-DQB10301 DQA10201-DQB10303 DQA10501-DQB10301 DQA10501-DQB10319 DQA10503-DQB10301 DQA10505-DQB10301 DQA10505-DQB10309 DQA10505-DQB10319 DQA10506-DQB10303 DQA10508-DQB10301 DQA10509-DQB10301 DQA10601-DQB10301
EVIPMFSALSEGATPQDLNTMLN

SEQ ID NO: 3332 - protein, 24 aa, Human immunodeficiency virus 1
  source 1..24: note = HLAs: DRB1_0101 DRB1_0404 DRB1_0408 DRB1_0410 DRB1_0901 DRB1_1001 DQA10102-DQB10501 DQA10102-DQB10601 DQA10102-DQB10609 DQA10103-DQB10501 DQA10103-DQB10601 DQA10103-DQB10609 DQA10201-DQB10301 DQA10201-DQB10303 DQA10501-DQB10301 DQA10501-DQB10319 DQA10503-DQB10301 DQA10505-DQB10301 DQA10505-DQB10309 DQA10505-DQB10319 DQA10506-DQB10303 DQA10508-DQB10301 DQA10509-DQB10301 DQA10601-DQB10301
EVIPMFSALSEGATPQDLNTMLNT

SEQ ID NO: 3333 - protein, 25 aa, Human immunodeficiency virus 1
  source 1..25: note = HLAs: DRB1_0101 DRB1_0404 DRB1_0408 DRB1_0410 DRB1_0901 DRB1_1001 DPA10301-DPB10101 DQA10102-DQB10501 DQA10102-DQB10601 DQA10102-DQB10609 DQA10103-DQB10501 DQA10103-DQB10601 DQA10103-DQB10609 DQA10201-DQB10301 DQA10201-DQB10303 DQA10501-DQB10301 DQA10501-DQB10319 DQA10503-DQB10301 DQA10505-DQB10301 DQA10505-DQB10309 DQA10505-DQB10319 DQA10506-DQB10303 DQA10508-DQB10301 DQA10509-DQB10301 DQA10601-DQB10301
EVIPMFSALSEGATPQDLNTMLNTV

SEQ ID NO: 3334 - protein, 13 aa, Human immunodeficiency virus 1
  source 1..13: note = HLAs: DRB1_0301
EVNIVTDSQYALG

SEQ ID NO: 3335 - protein, 14 aa, Human immunodeficiency virus 1
  source 1..14: note = HLAs: DRB1_0301 DQA10102-DQB10501 DQA10102-DQB10609
EVNIVTDSQYALGI

SEQ ID NO: 3336 - protein, 15 aa, Human immunodeficiency virus 1
  source 1..15: note = HLAs: DRB1_0101 DRB1_0301 DRB1_1114 DRB1_1302 DRB1_1402 DRB1_1406 DPA10301-DPB10101 DPA10301-DPB11801 DQA10102-DQB10501 DQA10102-DQB10609 DQA10103-DQB10609
EVNIVTDSQYALGII

SEQ ID NO: 3337 - protein, 16 aa, Human immunodeficiency virus 1
  source 1..16: note = HLAs: DRB1_0301 DPA10301-DPB10101 DPA10301-DPB10201 DPA10301-DPB10202 DPA10401-DPB10101 DQA10102-DQB10501 DQA10102-DQB10503 DQA10102-DQB10609 DQA10103-DQB10501 DQA10103-DQB10609
EVNIVTDSQYALGIIQ

SEQ ID NO: 3338 - protein, 17 aa, Human immunodeficiency virus 1
  source 1..17: note = HLAs: DRB1_0301 DRB1_1001 DPA10103-DPB11501 DPA10104-DPB11501 DPA10301-DPB10101 DPA10401-DPB10101 DQA10102-DQB10501 DQA10102-DQB10503 DQA10102-DQB10601 DQA10102-DQB10609 DQA10103-DQB10501 DQA10103-DQB10609
EVNIVTDSQYALGIIQA

SEQ ID NO: 3339 - protein, 18 aa, Human immunodeficiency virus 1
  source 1..18: note = HLAs: DQA10102-DQB10501 DQA10102-DQB10503 DQA10102-DQB10601 DQA10102-DQB10602 DQA10102-DQB10609 DQA10102-DQB10611 DQA10201-DQB10301
EVNIVTDSQYALGIIQAQ

SEQ ID NO: 3340 - protein, 19 aa, Human immunodeficiency virus 1
  source 1..19: note = HLAs: DRB1_0301 DRB1_1001 DPA10103-DPB11501 DPA10104-DPB11501 DPA10301-DPB10101 DPA10301-DPB10201 DPA10301-DPB10202 DPA10301-DPB11801 DPA10301-DPB14001 DPA10301-DPB16501 DPA10401-DPB10101 DQA10102-DQB10501 DQA10102-DQB10503 DQA10102-DQB10601 DQA10102-DQB10602 DQA10102-DQB10609 DQA10102-DQB10611 DQA10103-DQB10501 DQA10103-DQB10601 DQA10103-DQB10602 DQA10103-DQB10609 DQA10201-DQB10301 DQA10201-DQB10303 DQA10301-DQB10301 DQA10302-DQB10301 DQA10303-DQB10301 DQA10401-DQB10301 DQA10401-DQB10319 DQA10501-DQB10301 DQA10501-DQB10319 DQA10503-DQB10301 DQA10505-DQB10301 DQA10505-DQB10309 DQA10505-DQB10319 DQA10506-DQB10303 DQA10508-DQB10301 DQA10509-DQB10301 DQA10601-DQB10301
EVNIVTDSQYALGIIQAQP

SEQ ID NO: 3341 - protein, 20 aa, Human immunodeficiency virus 1
  source 1..20: note = HLAs: DRB1_0101 DRB1_0301 DRB1_0408 DRB1_1001 DPA10103-DPB10101 DPA10103-DPB11501 DPA10104-DPB10101 DPA10104-DPB11501 DPA10105-DPB10101 DPA10202-DPB10101 DPA10301-DPB10101 DPA10301-DPB10201 DPA10301-DPB10202 DPA10301-DPB10401 DPA10301-DPB110601 DPA10301-DPB11801 DPA10301-DPB12301 DPA10301-DPB13901 DPA10301-DPB14001 DPA10301-DPB16501 DPA10401-DPB10101 DPA10401-DPB10201 DPA10401-DPB10202 DPA10401-DPB10501 DQA10102-DQB10501 DQA10102-DQB10503 DQA10102-DQB10601 DQA10102-DQB10602 DQA10102-DQB10604 DQA10102-DQB10609 DQA10102-DQB10610 DQA10102-DQB10611 DQA10103-DQB10501 DQA10103-DQB10601 DQA10103-DQB10602 DQA10103-DQB10604 DQA10103-DQB10609 DQA10201-DQB10301 DQA10201-DQB10302 DQA10201-DQB10303 DQA10301-DQB10301 DQA10302-DQB10301 DQA10303-DQB10301 DQA10401-DQB10301 DQA10401-DQB10319 DQA10501-DQB10301 DQA10501-DQB10319 DQA10503-DQB10301 DQA10505-DQB10301 DQA10505-DQB10302 DQA10505-DQB10309 DQA10505-DQB10319 DQA10506-DQB10303 DQA10508-DQB10301 DQA10509-DQB10301 DQA10601-DQB10301
EVNIVTDSQYALGIIQAQPD

SEQ ID NO: 3342 - protein, 21 aa, Human immunodeficiency virus 1
  source 1..21: note = HLAs: DRB1_0101 DRB1_0405 DRB1_0408 DRB1_0410 DRB1_1001 DPA10103-DPB11501 DPA10104-DPB11501 DPA10301-DPB10101 DPA10301-DPB10201 DPA10301-DPB10202 DPA10301-DPB110601 DPA10301-DPB11801 DPA10301-DPB14001 DPA10301-DPB16501 DPA10401-DPB10101 DQA10102-DQB10501 DQA10102-DQB10503 DQA10102-DQB10601 DQA10102-DQB10602 DQA10102-DQB10609 DQA10102-DQB10611 DQA10103-DQB10501 DQA10103-DQB10601 DQA10103-DQB10602 DQA10103-DQB10609 DQA10201-DQB10301 DQA10201-DQB10303 DQA10301-DQB10301 DQA10302-DQB10301 DQA10303-DQB10301 DQA10401-DQB10301 DQA10401-DQB10319 DQA10501-DQB10301 DQA10501-DQB10319 DQA10503-DQB10301 DQA10505-DQB10301 DQA10505-DQB10309 DQA10505-DQB10319 DQA10506-DQB10303 DQA10508-DQB10301 DQA10509-DQB10301 DQA10601-DQB10301
EVNIVTDSQYALGIIQAQPDK

SEQ ID NO: 3343 - protein, 22 aa, Human immunodeficiency virus 1
  source 1..22: note = HLAs: DRB1_0101 DRB1_0401 DRB1_0404 DRB1_0405 DRB1_0408 DRB1_0410 DRB1_1001 DPA10103-DPB11501 DPA10104-DPB11501 DPA10202-DPB10101 DPA10301-DPB10101 DPA10301-DPB10201 DPA10301-DPB10202 DPA10301-DPB110601 DPA10301-DPB11801 DPA10301-DPB14001 DPA10301-DPB16501 DPA10401-DPB10101 DQA10102-DQB10501 DQA10102-DQB10503 DQA10102-DQB10601 DQA10102-DQB10602 DQA10102-DQB10609 DQA10102-DQB10611 DQA10103-DQB10501 DQA10103-DQB10601 DQA10103-DQB10602 DQA10103-DQB10609 DQA10201-DQB10301 DQA10201-DQB10303 DQA10301-DQB10301 DQA10302-DQB10301 DQA10303-DQB10301 DQA10401-DQB10301 DQA10401-DQB10319 DQA10501-DQB10301 DQA10501-DQB10319 DQA10503-DQB10301 DQA10505-DQB10301 DQA10505-DQB10309 DQA10505-DQB10319 DQA10506-DQB10303 DQA10508-DQB10301 DQA10509-DQB10301 DQA10601-DQB10301
EVNIVTDSQYALGIIQAQPDKS

SEQ ID NO: 3344 - protein, 23 aa, Human immunodeficiency virus 1
  source 1..23: note = HLAs: DRB1_0101 DRB1_0301 DRB1_0401 DRB1_0404 DRB1_0405 DRB1_0408 DRB1_0410 DRB1_1001 DPA10103-DPB11501 DPA10104-DPB11501 DPA10202-DPB10101 DPA10301-DPB10101 DPA10301-DPB10201 DPA10301-DPB10202 DPA10301-DPB110601 DPA10301-DPB11801 DPA10301-DPB14001 DPA10301-DPB16501 DPA10401-DPB10101 DQA10102-DQB10501 DQA10102-DQB10503 DQA10102-DQB10601 DQA10102-DQB10602 DQA10102-DQB10609 DQA10102-DQB10611 DQA10103-DQB10501 DQA10103-DQB10601 DQA10103-DQB10602 DQA10103-DQB10609 DQA10201-DQB10301 DQA10201-DQB10303 DQA10301-DQB10301 DQA10302-DQB10301 DQA10303-DQB10301 DQA10401-DQB10301 DQA10401-DQB10319 DQA10501-DQB10301 DQA10501-DQB10319 DQA10503-DQB10301 DQA10505-DQB10301 DQA10505-DQB10302 DQA10505-DQB10309 DQA10505-DQB10319 DQA10506-DQB10303 DQA10508-DQB10301 DQA10509-DQB10301 DQA10601-DQB10301
EVNIVTDSQYALGIIQAQPDKSE

SEQ ID NO: 3345 - protein, 24 aa, Human immunodeficiency virus 1
  source 1..24: note = HLAs: DRB1_0101 DRB1_0301 DRB1_0401 DRB1_0404 DRB1_0405 DRB1_0408 DRB1_0410 DRB1_1001 DPA10103-DPB11501 DPA10104-DPB11501 DPA10202-DPB10101 DPA10301-DPB10101 DPA10301-DPB10201 DPA10301-DPB10202 DPA10301-DPB110601 DPA10301-DPB11801 DPA10301-DPB14001 DPA10301-DPB16501 DPA10401-DPB10101 DQA10102-DQB10501 DQA10102-DQB10503 DQA10102-DQB10601 DQA10102-DQB10602 DQA10102-DQB10609 DQA10102-DQB10611 DQA10103-DQB10501 DQA10103-DQB10601 DQA10103-DQB10602 DQA10103-DQB10609 DQA10201-DQB10301 DQA10201-DQB10303 DQA10301-DQB10301 DQA10302-DQB10301 DQA10303-DQB10301 DQA10401-DQB10301 DQA10401-DQB10319 DQA10501-DQB10301 DQA10501-DQB10319 DQA10503-DQB10301 DQA10505-DQB10301 DQA10505-DQB10302 DQA10505-DQB10309 DQA10505-DQB10319 DQA10506-DQB10303 DQA10508-DQB10301 DQA10509-DQB10301 DQA10601-DQB10301
EVNIVTDSQYALGIIQAQPDKSES

SEQ ID NO: 3346 - protein, 25 aa, Human immunodeficiency virus 1
  source 1..25: note = HLAs: DRB1_0101 DRB1_0301 DRB1_0401 DRB1_0404 DRB1_0405 DRB1_0408 DRB1_0410 DRB1_0813 DRB1_1001 DPA10103-DPB11501 DPA10104-DPB11501 DPA10202-DPB10101 DPA10301-DPB10101 DPA10301-DPB10201 DPA10301-DPB10202 DPA10301-DPB110601 DPA10301-DPB11801 DPA10301-DPB14001 DPA10301-DPB16501 DPA10401-DPB10101 DQA10102-DQB10501 DQA10102-DQB10503 DQA10102-DQB10601 DQA10102-DQB10602 DQA10102-DQB10609 DQA10102-DQB10611 DQA10103-DQB10501 DQA10103-DQB10601 DQA10103-DQB10602 DQA10103-DQB10609 DQA10201-DQB10301 DQA10201-DQB10303 DQA10301-DQB10301 DQA10302-DQB10301 DQA10303-DQB10301 DQA10401-DQB10301 DQA10401-DQB10319 DQA10501-DQB10301 DQA10501-DQB10319 DQA10503-DQB10301 DQA10505-DQB10301 DQA10505-DQB10302 DQA10505-DQB10309 DQA10505-DQB10319 DQA10506-DQB10303 DQA10508-DQB10301 DQA10509-DQB10301 DQA10601-DQB10301
EVNIVTDSQYALGIIQAQPDKSESE

SEQ ID NO: 3347 - protein, 13 aa, Human immunodeficiency virus 1
  source 1..13: note = HLAs: DQA10102-DQB10601 DQA10201-DQB10301 DQA10301-DQB10301 DQA10302-DQB10301 DQA10303-DQB10301 DQA10501-DQB10301 DQA10501-DQB10319 DQA10503-DQB10301 DQA10505-DQB10301 DQA10505-DQB10309 DQA10505-DQB10319 DQA10508-DQB10301 DQA10509-DQB10301 DQA10601-DQB10301
EVQLGIPHPAGLK

SEQ ID NO: 3348 - protein, 14 aa, Human immunodeficiency virus 1
  source 1..14: note = HLAs: DQA10102-DQB10601 DQA10103-DQB10601 DQA10201-DQB10301 DQA10301-DQB10301 DQA10302-DQB10301 DQA10303-DQB10301 DQA10401-DQB10301 DQA10401-DQB10319 DQA10501-DQB10301 DQA10501-DQB10319 DQA10503-DQB10301 DQA10505-DQB10301 DQA10505-DQB10309 DQA10505-DQB10319 DQA10506-DQB10303 DQA10508-DQB10301 DQA10509-DQB10301 DQA10601-DQB10301
EVQLGIPHPAGLKK

SEQ ID NO: 3349 - protein, 15 aa, Human immunodeficiency virus 1
  source 1..15: note = HLAs: DRB1_0101 DRB1_0102 DRB1_1001 DRB1_1102 DRB1_1301 DQA10102-DQB10601 DQA10103-DQB10601 DQA10201-DQB10301 DQA10201-DQB10303 DQA10301-DQB10301 DQA10302-DQB10301 DQA10303-DQB10301 DQA10401-DQB10301 DQA10401-DQB10319 DQA10501-DQB10301 DQA10501-DQB10319 DQA10503-DQB10301 DQA10505-DQB10301 DQA10505-DQB10309 DQA10505-DQB10319 DQA10505-DQB10402 DQA10506-DQB10303 DQA10508-DQB10301 DQA10509-DQB10301 DQA10601-DQB10301
EVQLGIPHPAGLKKK

SEQ ID NO: 3350 - protein, 16 aa, Human immunodeficiency virus 1
  source 1..16: note = HLAs: DRB1_0101 DQA10102-DQB10601 DQA10103-DQB10601 DQA10201-DQB10301 DQA10301-DQB10301 DQA10302-DQB10301 DQA10303-DQB10301 DQA10401-DQB10301 DQA10401-DQB10319 DQA10501-DQB10301 DQA10501-DQB10319 DQA10503-DQB10301 DQA10505-DQB10301 DQA10505-DQB10309 DQA10505-DQB10319 DQA10505-DQB10402 DQA10506-DQB10303 DQA10508-DQB10301 DQA10509-DQB10301 DQA10601-DQB10301
EVQLGIPHPAGLKKKK

SEQ ID NO: 3351 - protein, 17 aa, Human immunodeficiency virus 1
  source 1..17: note = HLAs: DRB1_0101 DQA10102-DQB10601 DQA10103-DQB10601 DQA10201-DQB10301 DQA10301-DQB10301 DQA10302-DQB10301 DQA10303-DQB10301 DQA10501-DQB10301 DQA10501-DQB10319 DQA10503-DQB10301 DQA10505-DQB10301 DQA10505-DQB10309 DQA10505-DQB10319 DQA10506-DQB10303 DQA10508-DQB10301 DQA10509-DQB10301 DQA10601-DQB10301
EVQLGIPHPAGLKKKKS

SEQ ID NO: 3352 - protein, 18 aa, Human immunodeficiency virus 1
  source 1..18: note = HLAs: DQA10102-DQB10601 DQA10103-DQB10601 DQA10201-DQB10301 DQA10301-DQB10301 DQA10302-DQB10301 DQA10303-DQB10301 DQA10501-DQB10301 DQA10501-DQB10319 DQA10503-DQB10301 DQA10505-DQB10301 DQA10505-DQB10309 DQA10505-DQB10319 DQA10508-DQB10301 DQA10509-DQB10301 DQA10601-DQB10301
EVQLGIPHPAGLKKKKSV

SEQ ID NO: 3353 - protein, 19 aa, Human immunodeficiency virus 1
  source 1..19: note = HLAs: DQA10102-DQB10601 DQA10103-DQB10601 DQA10201-DQB10301 DQA10301-DQB10301 DQA10302-DQB10301 DQA10303-DQB10301 DQA10501-DQB10301 DQA10501-DQB10319 DQA10503-DQB10301 DQA10505-DQB10301 DQA10505-DQB10309 DQA10505-DQB10319 DQA10508-DQB10301 DQA10509-DQB10301 DQA10601-DQB10301
EVQLGIPHPAGLKKKKSVT

SEQ ID NO: 3354 - protein, 20 aa, Human immunodeficiency virus 1
  source 1..20: note = HLAs: DRB1_0101 DRB1_1102 DRB1_1104 DRB1_1301 DQA10102-DQB10601 DQA10103-DQB10601 DQA10201-DQB10301 DQA10301-DQB10301 DQA10302-DQB10301 DQA10303-DQB10301 DQA10501-DQB10301 DQA10501-DQB10319 DQA10503-DQB10301 DQA10505-DQB10301 DQA10505-DQB10309 DQA10505-DQB10319 DQA10508-DQB10301 DQA10509-DQB10301 DQA10601-DQB10301
EVQLGIPHPAGLKKKKSVTV

SEQ ID NO: 3355 - protein, 21 aa, Human immunodeficiency virus 1
  source 1..21: note = HLAs: DRB1_0101 DRB1_1102 DRB1_1103 DRB1_1104 DRB1_1301 DRB1_1304 DQA10102-DQB10601 DQA10103-DQB10601 DQA10201-DQB10301 DQA10501-DQB10301 DQA10501-DQB10319 DQA10503-DQB10301 DQA10505-DQB10301 DQA10505-DQB10309 DQA10505-DQB10319 DQA10508-DQB10301 DQA10509-DQB10301
EVQLGIPHPAGLKKKKSVTVL

SEQ ID NO: 3356 - protein, 22 aa, Human immunodeficiency virus 1
  source 1..22: note = HLAs: DRB1_0101 DRB1_1102 DRB1_1103 DRB1_1104 DRB1_1301 DRB1_1304 DQA10102-DQB10601 DQA10103-DQB10601 DQA10201-DQB10301 DQA10501-DQB10301 DQA10501-DQB10319 DQA10503-DQB10301 DQA10505-DQB10301 DQA10505-DQB10309 DQA10505-DQB10319 DQA10508-DQB10301 DQA10509-DQB10301
EVQLGIPHPAGLKKKKSVTVLD

SEQ ID NO: 3357 - protein, 23 aa, Human immunodeficiency virus 1
  source 1..23: note = HLAs: DRB1_0101 DRB1_0806 DRB1_1102 DRB1_1103 DRB1_1104 DRB1_1301 DRB1_1304 DPA10202-DPB10101 DPA10301-DPB10101 DPA10301-DPB10202 DPA10301-DPB110601 DPA10301-DPB11801 DPA10301-DPB16501 DPA10401-DPB10101 DQA10102-DQB10601 DQA10103-DQB10601 DQA10201-DQB10301 DQA10501-DQB10301 DQA10501-DQB10319 DQA10503-DQB10301 DQA10505-DQB10301 DQA10505-DQB10309 DQA10505-DQB10319 DQA10508-DQB10301 DQA10509-DQB10301
EVQLGIPHPAGLKKKKSVTVLDV

SEQ ID NO: 3358 - protein, 24 aa, Human immunodeficiency virus 1
  source 1..24: note = HLAs: DRB1_0101 DRB1_0701 DRB1_0806 DRB1_1001 DRB1_1102 DRB1_1103 DRB1_1104 DRB1_1114 DRB1_1301 DRB1_1302 DRB1_1304 DRB1_1406 DPA10103-DPB15001 DPA10105-DPB15001 DPA10202-DPB10101 DPA10301-DPB10101 DPA10301-DPB10201 DPA10301-DPB10202 DPA10301-DPB110601 DPA10301-DPB11801 DPA10301-DPB16501 DPA10401-DPB10101 DQA10102-DQB10601 DQA10103-DQB10601 DQA10201-DQB10301 DQA10501-DQB10301 DQA10501-DQB10319 DQA10503-DQB10301 DQA10505-DQB10301 DQA10505-DQB10309 DQA10505-DQB10319 DQA10508-DQB10301 DQA10509-DQB10301
EVQLGIPHPAGLKKKKSVTVLDVG

SEQ ID NO: 3359 - protein, 25 aa, Human immunodeficiency virus 1
  source 1..25: note = HLAs: DRB1_0101 DRB1_0701 DRB1_0806 DRB1_1001 DRB1_1102 DRB1_1103 DRB1_1104 DRB1_1114 DRB1_1301 DRB1_1302 DRB1_1304 DRB1_1406 DPA10103-DPB10101 DPA10103-DPB15001 DPA10104-DPB10101 DPA10105-DPB10101 DPA10105-DPB15001 DPA10202-DPB10101 DPA10301-DPB10101 DPA10301-DPB10201 DPA10301-DPB10202 DPA10301-DPB110601 DPA10301-DPB11801 DPA10301-DPB16501 DPA10401-DPB10101 DQA10102-DQB10501 DQA10102-DQB10601 DQA10103-DQB10601 DQA10201-DQB10301 DQA10501-DQB10301 DQA10501-DQB10319 DQA10503-DQB10301 DQA10505-DQB10301 DQA10505-DQB10309 DQA10505-DQB10319 DQA10508-DQB10301 DQA10509-DQB10301
EVQLGIPHPAGLKKKKSVTVLDVGD

SEQ ID NO: 3360 - protein, 13 aa, Human immunodeficiency virus 1
  source 1..13: note = HLAs: DRB1_1001 DRB1_1602 DPA10202-DPB10101 DPA10301-DPB10101 DPA10401-DPB10101
EWEFVNTPPLVKL

SEQ ID NO: 3361 - protein, 14 aa, Human immunodeficiency virus 1
  source 1..14: note = HLAs: DRB1_0101 DRB1_0401 DRB1_0405 DRB1_0408 DRB1_0701 DRB1_0813 DRB1_0901 DRB1_1001 DRB1_1114 DRB1_1302 DRB1_1602 DPA10103-DPB10101 DPA10103-DPB11501 DPA10103-DPB13101 DPA10103-DPB15001 DPA10104-DPB10101 DPA10104-DPB11501 DPA10105-DPB10101 DPA10105-DPB15001 DPA10106-DPB10101 DPA10201-DPB10101 DPA10202-DPB10101 DPA10202-DPB110601 DPA10202-DPB11901 DPA10202-DPB13101 DPA10301-DPB10101 DPA10301-DPB10201 DPA10301-DPB10202 DPA10301-DPB10401 DPA10301-DPB10402 DPA10301-DPB110501 DPA10301-DPB110601 DPA10301-DPB11801 DPA10301-DPB12301 DPA10301-DPB13901 DPA10301-DPB14001 DPA10301-DPB14901 DPA10301-DPB16501 DPA10301-DPB18001 DPA10401-DPB10101 DPA10401-DPB10201 DQA10102-DQB10501
EWEFVNTPPLVKLW

SEQ ID NO: 3362 - protein, 15 aa, Human immunodeficiency virus 1
  source 1..15: note = HLAs: DRB1_0101 DRB1_0102 DRB1_0401 DRB1_0404 DRB1_0405 DRB1_0408 DRB1_0410 DRB1_0701 DRB1_0801 DRB1_0802 DRB1_0803 DRB1_0804 DRB1_0806 DRB1_0809 DRB1_0813 DRB1_0901 DRB1_1001 DRB1_1101 DRB1_1102 DRB1_1103 DRB1_1104 DRB1_1114 DRB1_1301 DRB1_1302 DRB1_1303 DRB1_1304 DRB1_1305 DRB1_1312 DRB1_1401 DRB1_1402 DRB1_1403 DRB1_1404 DRB1_1406 DRB1_1454 DRB1_1502 DRB1_1601 DRB1_1602 DPA10103-DPB10101 DPA10103-DPB10201 DPA10103-DPB10202 DPA10103-DPB11501 DPA10103-DPB11601 DPA10103-DPB11801 DPA10103-DPB13101 DPA10103-DPB13401 DPA10103-DPB14101 DPA10103-DPB14801 DPA10103-DPB15001 DPA10103-DPB15901 DPA10104-DPB10101 DPA10104-DPB11501 DPA10105-DPB10101 DPA10105-DPB11801 DPA10105-DPB15001 DPA10106-DPB10101 DPA10201-DPB10101 DPA10201-DPB11501 DPA10202-DPB10101 DPA10202-DPB10201 DPA10202-DPB10202 DPA10202-DPB10401 DPA10202-DPB10501 DPA10202-DPB110601 DPA10202-DPB11801 DPA10202-DPB11901 DPA10202-DPB13101 DPA10202-DPB13801 DPA10202-DPB15501 DPA10202-DPB16501 DPA10301-DPB10101 DPA10301-DPB10201; note = HLAs: DPA10301-DPB10202 DPA10301-DPB10401 DPA10301-DPB10402 DPA10301-DPB110501 DPA10301-DPB110601 DPA10301-DPB11801 DPA10301-DPB12301 DPA10301-DPB13901 DPA10301-DPB14001 DPA10301-DPB14901 DPA10301-DPB15501 DPA10301-DPB16501 DPA10301-DPB17501 DPA10301-DPB18001 DPA10401-DPB10101 DPA10401-DPB10201 DPA10401-DPB10202 DPA10401-DPB10402 DPA10401-DPB10501 DPA10401-DPB110501 DPA10401-DPB11401 DPA10401-DPB14901 DQA10102-DQB10501 DQA10103-DQB10501
EWEFVNTPPLVKLWY

SEQ ID NO: 3363 - protein, 16 aa, Human immunodeficiency virus 1
  source 1..16: note = HLAs: DRB1_0101 DRB1_0401 DRB1_0405 DRB1_0408 DRB1_0701 DRB1_0801 DRB1_0813 DRB1_0901 DRB1_1001 DRB1_1101 DRB1_1114 DRB1_1302 DRB1_1304 DRB1_1305 DRB1_1402 DRB1_1406 DRB1_1601 DRB1_1602 DPA10103-DPB10101 DPA10103-DPB11501 DPA10103-DPB13101 DPA10103-DPB13401 DPA10103-DPB15001 DPA10104-DPB10101 DPA10104-DPB11501 DPA10105-DPB10101 DPA10105-DPB15001 DPA10106-DPB10101 DPA10201-DPB10101 DPA10201-DPB11501 DPA10202-DPB10101 DPA10202-DPB10201 DPA10202-DPB10202 DPA10202-DPB10501 DPA10202-DPB110601 DPA10202-DPB11901 DPA10202-DPB13101 DPA10202-DPB13801 DPA10202-DPB15501 DPA10202-DPB16501 DPA10301-DPB10101 DPA10301-DPB10201 DPA10301-DPB10202 DPA10301-DPB10401 DPA10301-DPB10402 DPA10301-DPB110501 DPA10301-DPB110601 DPA10301-DPB11801 DPA10301-DPB12301 DPA10301-DPB13901 DPA10301-DPB14001 DPA10301-DPB14901 DPA10301-DPB16501 DPA10301-DPB17501 DPA10301-DPB18001 DPA10401-DPB10101 DPA10401-DPB10201 DPA10401-DPB10202 DPA10401-DPB10301 DPA10401-DPB10501 DPA10401-DPB11401 DQA10102-DQB10501 DQA10103-DQB10501
EWEFVNTPPLVKLWYQ

SEQ ID NO: 3364 - protein, 17 aa, Human immunodeficiency virus 1
  source 1..17: note = HLAs: DRB1_0101 DRB1_0401 DRB1_0405 DRB1_0408 DRB1_0701 DRB1_0801 DRB1_0813 DRB1_0901 DRB1_1001 DRB1_1101 DRB1_1102 DRB1_1103 DRB1_1104 DRB1_1114 DRB1_1301 DRB1_1302 DRB1_1304 DRB1_1305 DRB1_1402 DRB1_1406 DRB1_1601 DRB1_1602 DPA10103-DPB10101 DPA10103-DPB11501 DPA10103-DPB13101 DPA10103-DPB13401 DPA10103-DPB15001 DPA10104-DPB10101 DPA10104-DPB11501 DPA10105-DPB10101 DPA10105-DPB15001 DPA10106-DPB10101 DPA10201-DPB10101 DPA10201-DPB11501 DPA10202-DPB10101 DPA10202-DPB10201 DPA10202-DPB10202 DPA10202-DPB10501 DPA10202-DPB110601 DPA10202-DPB11801 DPA10202-DPB11901 DPA10202-DPB13101 DPA10202-DPB13801 DPA10202-DPB16501 DPA10301-DPB10101 DPA10301-DPB10201 DPA10301-DPB10202 DPA10301-DPB10401 DPA10301-DPB10402 DPA10301-DPB110501 DPA10301-DPB110601 DPA10301-DPB11801 DPA10301-DPB12301 DPA10301-DPB13901 DPA10301-DPB14001 DPA10301-DPB14901 DPA10301-DPB16501 DPA10301-DPB17501 DPA10301-DPB18001 DPA10401-DPB10101 DPA10401-DPB10201 DPA10401-DPB10202 DPA10401-DPB10501 DPA10401-DPB11401; note = HLAs: DQA10102-DQB10501
EWEFVNTPPLVKLWYQL

SEQ ID NO: 3365 - protein, 18 aa, Human immunodeficiency virus 1
  source 1..18: note = HLAs: DRB1_1001 DPA10103-DPB10101 DPA10103-DPB11501 DPA10104-DPB10101 DPA10104-DPB11501 DPA10105-DPB10101 DPA10201-DPB11501 DPA10202-DPB10101 DPA10202-DPB13101 DPA10301-DPB10101 DPA10301-DPB10201 DPA10301-DPB10202 DPA10301-DPB10401 DPA10301-DPB110601 DPA10301-DPB11801 DPA10301-DPB12301 DPA10301-DPB13901 DPA10301-DPB14001 DPA10301-DPB16501 DPA10401-DPB10101 DQA10102-DQB10501
EWEFVNTPPLVKLWYQLE

SEQ ID NO: 3366 - protein, 14 aa, Human immunodeficiency virus 1
  source 1..14: note = HLAs: DRB1_1102 DRB1_1301
FAIKKKDSTKWRKL

SEQ ID NO: 3367 - protein, 15 aa, Human immunodeficiency virus 1
  source 1..15: note = HLAs: DRB1_0804 DRB1_0806 DRB1_1102 DRB1_1103 DRB1_1104 DRB1_1301 DRB1_1304 DRB1_1406 DPA10202-DPB110601 DPA10202-DPB11901
FAIKKKDSTKWRKLV

SEQ ID NO: 3368 - protein, 16 aa, Human immunodeficiency virus 1
  source 1..16: note = HLAs: DRB1_1102 DRB1_1103 DRB1_1301 DRB1_1304
FAIKKKDSTKWRKLVD

SEQ ID NO: 3369 - protein, 17 aa, Human immunodeficiency virus 1
  source 1..17: note = HLAs: DRB1_1102 DRB1_1103 DRB1_1104 DRB1_1301 DRB1_1304
FAIKKKDSTKWRKLVDF

SEQ ID NO: 3370 - protein, 19 aa, Human immunodeficiency virus 1
  source 1..19: note = HLAs: DRB1_1102 DRB1_1103 DRB1_1301 DRB1_1304
FAIKKKDSTKWRKLVDFRE

SEQ ID NO: 3371 - protein, 20 aa, Human immunodeficiency virus 1
  source 1..20: note = HLAs: DRB1_0405 DRB1_0410 DRB1_0806 DRB1_1001 DRB1_1102 DRB1_1103 DRB1_1104 DRB1_1301 DRB1_1304 DPA10103-DPB10101 DPA10103-DPB10201 DPA10103-DPB10202 DPA10103-DPB10501 DPA10103-DPB11501 DPA10103-DPB11601 DPA10103-DPB11901 DPA10103-DPB13101 DPA10103-DPB13401 DPA10103-DPB14001 DPA10103-DPB14101 DPA10103-DPB14801 DPA10103-DPB15001 DPA10104-DPB10101 DPA10104-DPB11501 DPA10105-DPB10101 DPA10105-DPB15001 DPA10201-DPB110601 DPA10201-DPB11501 DPA10201-DPB11601 DPA10201-DPB11901 DPA10202-DPB10101 DPA10202-DPB10202 DPA10202-DPB10501 DPA10202-DPB110601 DPA10202-DPB11901 DPA10202-DPB13101 DPA10202-DPB13801 DPA10202-DPB16501 DPA10301-DPB10101 DPA10301-DPB10201 DPA10301-DPB10202 DPA10301-DPB10401 DPA10301-DPB110601 DPA10301-DPB11801 DPA10301-DPB12301 DPA10301-DPB13901 DPA10301-DPB14001 DPA10301-DPB15501 DPA10301-DPB16501 DPA10401-DPB10101 DPA10401-DPB10201 DPA10401-DPB10202 DPA10401-DPB10501
FAIKKKDSTKWRKLVDFREL

SEQ ID NO: 3372 - protein, 21 aa, Human immunodeficiency virus 1
  source 1..21: note = HLAs: DRB1_0405 DRB1_0410 DRB1_0806 DRB1_1102 DRB1_1103 DRB1_1301 DRB1_1304 DPA10103-DPB10101 DPA10103-DPB10201 DPA10103-DPB10202 DPA10103-DPB10501 DPA10103-DPB11501 DPA10103-DPB11601 DPA10103-DPB11901 DPA10103-DPB13101 DPA10103-DPB13401 DPA10103-DPB14001 DPA10103-DPB14101 DPA10103-DPB14801 DPA10103-DPB15001 DPA10104-DPB10101 DPA10104-DPB11501 DPA10105-DPB10101 DPA10105-DPB15001 DPA10201-DPB110601 DPA10201-DPB11601 DPA10201-DPB11901 DPA10202-DPB10101 DPA10202-DPB10501 DPA10202-DPB110601 DPA10202-DPB11901 DPA10202-DPB13101 DPA10202-DPB13801 DPA10202-DPB16501 DPA10301-DPB10101 DPA10301-DPB10201 DPA10301-DPB10202 DPA10301-DPB10401 DPA10301-DPB110601 DPA10301-DPB11801 DPA10301-DPB12301 DPA10301-DPB13901 DPA10301-DPB14001 DPA10301-DPB16501 DPA10401-DPB10101 DPA10401-DPB10201 DPA10401-DPB10202 DPA10401-DPB10501
FAIKKKDSTKWRKLVDFRELN

SEQ ID NO: 3373 - protein, 22 aa, Human immunodeficiency virus 1
  source 1..22: note = HLAs: DRB1_0405 DRB1_0410 DRB1_0806 DRB1_1001 DRB1_1102 DRB1_1103 DRB1_1104 DRB1_1301 DRB1_1304 DPA10103-DPB10101 DPA10103-DPB10201 DPA10103-DPB10202 DPA10103-DPB10501 DPA10103-DPB11501 DPA10103-DPB11601 DPA10103-DPB11901 DPA10103-DPB13101 DPA10103-DPB13401 DPA10103-DPB14001 DPA10103-DPB14101 DPA10103-DPB14801 DPA10103-DPB15001 DPA10104-DPB10101 DPA10104-DPB11501 DPA10105-DPB10101 DPA10105-DPB15001 DPA10106-DPB10101 DPA10201-DPB10101 DPA10201-DPB110601 DPA10201-DPB11501 DPA10201-DPB11601 DPA10201-DPB11901 DPA10202-DPB10101 DPA10202-DPB10501 DPA10202-DPB110601 DPA10202-DPB11901 DPA10202-DPB13101 DPA10202-DPB13801 DPA10202-DPB16501 DPA10301-DPB10101 DPA10301-DPB10201 DPA10301-DPB10202 DPA10301-DPB10401 DPA10301-DPB110601 DPA10301-DPB11801 DPA10301-DPB12301 DPA10301-DPB13901 DPA10301-DPB14001 DPA10301-DPB15501 DPA10301-DPB16501 DPA10401-DPB10101 DPA10401-DPB10201 DPA10401-DPB10202 DPA10401-DPB10501
FAIKKKDSTKWRKLVDFRELNK

SEQ ID NO: 3374 - protein, 23 aa, Human immunodeficiency virus 1
  source 1..23: note = HLAs: DRB1_0405 DRB1_0410 DRB1_0806 DRB1_1001 DRB1_1102 DRB1_1103 DRB1_1104 DRB1_1301 DRB1_1304 DPA10103-DPB10101 DPA10103-DPB10201 DPA10103-DPB10202 DPA10103-DPB10501 DPA10103-DPB11501 DPA10103-DPB11601 DPA10103-DPB11801 DPA10103-DPB11901 DPA10103-DPB13101 DPA10103-DPB13401 DPA10103-DPB14001 DPA10103-DPB14101 DPA10103-DPB14801 DPA10103-DPB15001 DPA10104-DPB10101 DPA10104-DPB11501 DPA10105-DPB10101 DPA10105-DPB11801 DPA10105-DPB15001 DPA10106-DPB10101 DPA10201-DPB10101 DPA10201-DPB10501 DPA10201-DPB110601 DPA10201-DPB11501 DPA10201-DPB11601 DPA10201-DPB11901 DPA10202-DPB10101 DPA10202-DPB10201 DPA10202-DPB10202 DPA10202-DPB10501 DPA10202-DPB110601 DPA10202-DPB11801 DPA10202-DPB11901 DPA10202-DPB13101 DPA10202-DPB13801 DPA10202-DPB15501 DPA10202-DPB16501 DPA10301-DPB10101 DPA10301-DPB10201 DPA10301-DPB10202 DPA10301-DPB10401 DPA10301-DPB10402 DPA10301-DPB110501 DPA10301-DPB110601 DPA10301-DPB11801 DPA10301-DPB12301 DPA10301-DPB13901 DPA10301-DPB14001 DPA10301-DPB14901 DPA10301-DPB15501; note = HLAs: DPA10301-DPB16501 DPA10301-DPB18001 DPA10401-DPB10101 DPA10401-DPB10201 DPA10401-DPB10202 DPA10401-DPB10501
FAIKKKDSTKWRKLVDFRELNKR

SEQ ID NO: 3375 - protein, 24 aa, Human immunodeficiency virus 1
  source 1..24: note = HLAs: DRB1_0405 DRB1_0410 DRB1_0806 DRB1_1001 DRB1_1102 DRB1_1103 DRB1_1104 DRB1_1301 DRB1_1304 DPA10103-DPB10101 DPA10103-DPB10201 DPA10103-DPB10202 DPA10103-DPB10501 DPA10103-DPB11501 DPA10103-DPB11601 DPA10103-DPB11801 DPA10103-DPB11901 DPA10103-DPB13101 DPA10103-DPB13401 DPA10103-DPB14001 DPA10103-DPB14101 DPA10103-DPB14801 DPA10103-DPB15001 DPA10104-DPB10101 DPA10104-DPB11501 DPA10105-DPB10101 DPA10105-DPB11801 DPA10105-DPB15001 DPA10106-DPB10101 DPA10201-DPB10101 DPA10201-DPB10501 DPA10201-DPB110601 DPA10201-DPB11501 DPA10201-DPB11601 DPA10201-DPB11901 DPA10201-DPB13401 DPA10202-DPB10101 DPA10202-DPB10201 DPA10202-DPB10202 DPA10202-DPB10501 DPA10202-DPB110601 DPA10202-DPB11801 DPA10202-DPB11901 DPA10202-DPB13101 DPA10202-DPB13801 DPA10202-DPB15501 DPA10202-DPB16501 DPA10301-DPB10101 DPA10301-DPB10201 DPA10301-DPB10202 DPA10301-DPB10401 DPA10301-DPB10402 DPA10301-DPB110501 DPA10301-DPB110601 DPA10301-DPB11801 DPA10301-DPB12301 DPA10301-DPB13901 DPA10301-DPB14001 DPA10301-DPB14901; note = HLAs: DPA10301-DPB15501 DPA10301-DPB16501 DPA10301-DPB18001 DPA10401-DPB10101 DPA10401-DPB10201 DPA10401-DPB10202 DPA10401-DPB10501
FAIKKKDSTKWRKLVDFRELNKRT

SEQ ID NO: 3376 - protein, 25 aa, Human immunodeficiency virus 1
  source 1..25: note = HLAs: DRB1_0405 DRB1_0410 DRB1_0801 DRB1_0806 DRB1_1001 DRB1_1101 DRB1_1102 DRB1_1103 DRB1_1104 DRB1_1301 DRB1_1304 DRB1_1305 DPA10103-DPB10101 DPA10103-DPB10201 DPA10103-DPB10202 DPA10103-DPB10501 DPA10103-DPB11501 DPA10103-DPB11601 DPA10103-DPB11801 DPA10103-DPB11901 DPA10103-DPB13101 DPA10103-DPB13401 DPA10103-DPB14001 DPA10103-DPB14101 DPA10103-DPB14801 DPA10103-DPB15001 DPA10103-DPB15901 DPA10104-DPB10101 DPA10104-DPB11501 DPA10105-DPB10101 DPA10105-DPB11801 DPA10105-DPB15001 DPA10106-DPB10101 DPA10201-DPB10101 DPA10201-DPB10501 DPA10201-DPB110601 DPA10201-DPB11501 DPA10201-DPB11601 DPA10201-DPB11901 DPA10201-DPB13401 DPA10202-DPB10101 DPA10202-DPB10201 DPA10202-DPB10202 DPA10202-DPB10501 DPA10202-DPB110601 DPA10202-DPB11801 DPA10202-DPB11901 DPA10202-DPB13101 DPA10202-DPB13801 DPA10202-DPB15501 DPA10202-DPB16501 DPA10301-DPB10101 DPA10301-DPB10201 DPA10301-DPB10202 DPA10301-DPB10401 DPA10301-DPB10402 DPA10301-DPB110501 DPA10301-DPB110601 DPA10301-DPB11801 DPA10301-DPB12301; note = HLAs: DPA10301-DPB13901 DPA10301-DPB14001 DPA10301-DPB14901 DPA10301-DPB15501 DPA10301-DPB16501 DPA10301-DPB18001 DPA10401-DPB10101 DPA10401-DPB10201 DPA10401-DPB10202 DPA10401-DPB10501
FAIKKKDSTKWRKLVDFRELNKRTQ

SEQ ID NO: 3377 - protein, 16 aa, Human immunodeficiency virus 1
  source 1..16: note = HLAs: DQA10201-DQB10301
FGIPYNPQSQGVVESM

SEQ ID NO: 3378 - protein, 20 aa, Human immunodeficiency virus 1
  source 1..20: note = HLAs: DQA10201-DQB10301
FGIPYNPQSQGVVESMNKEL

SEQ ID NO: 3379 - protein, 24 aa, Human immunodeficiency virus 1
  source 1..24: note = HLAs: DRB1_1102 DRB1_1103 DRB1_1104 DRB1_1301 DRB1_1304 DRB1_1406
FGIPYNPQSQGVVESMNKELKKII

SEQ ID NO: 3380 - protein, 25 aa, Human immunodeficiency virus 1
  source 1..25: note = HLAs: DRB1_0806 DRB1_1102 DRB1_1103 DRB1_1104 DRB1_1301 DRB1_1304 DRB1_1406
FGIPYNPQSQGVVESMNKELKKIIG

SEQ ID NO: 3381 - protein, 13 aa, Human immunodeficiency virus 1
  source 1..13: note = HLAs: DRB1_1103
FIHNFKRKGGIGG

SEQ ID NO: 3382 - protein, 14 aa, Human immunodeficiency virus 1
  source 1..14: note = HLAs: DRB1_1101 DRB1_1103 DRB1_1104 DRB1_1305
FIHNFKRKGGIGGY

SEQ ID NO: 3383 - protein, 15 aa, Human immunodeficiency virus 1
  source 1..15: note = HLAs: DRB1_0804 DRB1_0806 DRB1_1101 DRB1_1102 DRB1_1103 DRB1_1104 DRB1_1301 DRB1_1304 DRB1_1305
FIHNFKRKGGIGGYS

SEQ ID NO: 3384 - protein, 16 aa, Human immunodeficiency virus 1
  source 1..16: note = HLAs: DRB1_1101 DRB1_1103 DRB1_1104 DRB1_1305
FIHNFKRKGGIGGYSA

SEQ ID NO: 3385 - protein, 17 aa, Human immunodeficiency virus 1
  source 1..17: note = HLAs: DRB1_1101 DRB1_1103 DRB1_1104 DRB1_1305
FIHNFKRKGGIGGYSAG

SEQ ID NO: 3386 - protein, 19 aa, Human immunodeficiency virus 1
  source 1..19: note = HLAs: DRB1_1103 DRB1_1104
FIHNFKRKGGIGGYSAGER

SEQ ID NO: 3387 - protein, 20 aa, Human immunodeficiency virus 1
  source 1..20: note = HLAs: DRB1_1101 DRB1_1103 DRB1_1104 DRB1_1305
FIHNFKRKGGIGGYSAGERI

SEQ ID NO: 3388 - protein, 21 aa, Human immunodeficiency virus 1
  source 1..21: note = HLAs: DRB1_1103 DRB1_1104
FIHNFKRKGGIGGYSAGERII

SEQ ID NO: 3389 - protein, 22 aa, Human immunodeficiency virus 1
  source 1..22: note = HLAs: DRB1_1103 DRB1_1104
FIHNFKRKGGIGGYSAGERIID

SEQ ID NO: 3390 - protein, 23 aa, Human immunodeficiency virus 1
  source 1..23: note = HLAs: DRB1_1103 DRB1_1104
FIHNFKRKGGIGGYSAGERIIDI

SEQ ID NO: 3391 - protein, 24 aa, Human immunodeficiency virus 1
  source 1..24: note = HLAs: DRB1_1103 DRB1_1104
FIHNFKRKGGIGGYSAGERIIDII

SEQ ID NO: 3392 - protein, 25 aa, Human immunodeficiency virus 1
  source 1..25: note = HLAs: DRB1_1103 DRB1_1104 DRB1_1304
FIHNFKRKGGIGGYSAGERIIDIIA

SEQ ID NO: 3393 - protein, 16 aa, Human immunodeficiency virus 1
  source 1..16: note = HLAs: DQA10201-DQB10301
FKRKGGIGGYSAGERI

SEQ ID NO: 3394 - protein, 17 aa, Human immunodeficiency virus 1
  source 1..17: note = HLAs: DQA10201-DQB10301
FKRKGGIGGYSAGERII

SEQ ID NO: 3395 - protein, 20 aa, Human immunodeficiency virus 1
  source 1..20: note = HLAs: DQA10102-DQB10601 DQA10201-DQB10301
FKRKGGIGGYSAGERIIDII

SEQ ID NO: 3396 - protein, 13 aa, Human immunodeficiency virus 1
  source 1..13: note = HLAs: DPA10103-DPB11501 DPA10104-DPB11501 DPA10301-DPB10101 DPA10301-DPB10201 DPA10301-DPB10202 DPA10301-DPB10401 DPA10301-DPB12301 DPA10301-DPB13901 DPA10301-DPB14001 DQA10101-DQB10501 DQA10102-DQB10501 DQA10102-DQB10502 DQA10104-DQB10501 DQA10105-DQB10501
FLWMGYELHPDKW

SEQ ID NO: 3397 - protein, 14 aa, Human immunodeficiency virus 1
  source 1..14: note = HLAs: DPA10103-DPB10101 DPA10103-DPB11501 DPA10103-DPB13101 DPA10104-DPB10101 DPA10104-DPB11501 DPA10105-DPB10101 DPA10202-DPB10101 DPA10301-DPB10101 DPA10301-DPB10201 DPA10301-DPB10202 DPA10301-DPB10401 DPA10301-DPB110601 DPA10301-DPB11801 DPA10301-DPB12301 DPA10301-DPB13901 DPA10301-DPB14001 DPA10301-DPB16501 DPA10401-DPB10101 DQA10101-DQB10501 DQA10101-DQB10503 DQA10102-DQB10501 DQA10102-DQB10502 DQA10102-DQB10503 DQA10103-DQB10501 DQA10104-DQB10501 DQA10104-DQB10503 DQA10105-DQB10501 DQA10107-DQB10503
FLWMGYELHPDKWT

SEQ ID NO: 3398 - protein, 15 aa, Human immunodeficiency virus 1
  source 1..15: note = HLAs: DRB1_0101 DRB1_1001 DPA10103-DPB10101 DPA10103-DPB10201 DPA10103-DPB10202 DPA10103-DPB11501 DPA10103-DPB11601 DPA10103-DPB13101 DPA10103-DPB13401 DPA10103-DPB14001 DPA10103-DPB14101 DPA10103-DPB14801 DPA10104-DPB10101 DPA10104-DPB11501 DPA10105-DPB10101 DPA10201-DPB11501 DPA10202-DPB10101 DPA10202-DPB13101 DPA10301-DPB10101 DPA10301-DPB10201 DPA10301-DPB10202 DPA10301-DPB10401 DPA10301-DPB110601 DPA10301-DPB11801 DPA10301-DPB12301 DPA10301-DPB13901 DPA10301-DPB14001 DPA10301-DPB16501 DPA10401-DPB10101 DPA10401-DPB10201 DPA10401-DPB10202 DQA10101-DQB10501 DQA10101-DQB10503 DQA10102-DQB10501 DQA10102-DQB10502 DQA10102-DQB10503 DQA10103-DQB10501 DQA10104-DQB10501 DQA10104-DQB10503 DQA10105-DQB10501 DQA10107-DQB10503 DQA10505-DQB10402
FLWMGYELHPDKWTV

SEQ ID NO: 3399 - protein, 16 aa, Human immunodeficiency virus 1
  source 1..16: note = HLAs: DRB1_1001 DPA10103-DPB10101 DPA10103-DPB11501 DPA10103-DPB11601 DPA10103-DPB13101 DPA10103-DPB13401 DPA10104-DPB10101 DPA10104-DPB11501 DPA10105-DPB10101 DPA10202-DPB10101 DPA10301-DPB10101 DPA10301-DPB10201 DPA10301-DPB10202 DPA10301-DPB10401 DPA10301-DPB110601 DPA10301-DPB11801 DPA10301-DPB12301 DPA10301-DPB13901 DPA10301-DPB14001 DPA10301-DPB16501 DPA10401-DPB10101 DPA10401-DPB10202 DQA10101-DQB10501 DQA10101-DQB10503 DQA10102-DQB10501 DQA10102-DQB10502 DQA10102-DQB10503 DQA10103-DQB10501 DQA10104-DQB10501 DQA10104-DQB10503 DQA10105-DQB10501 DQA10107-DQB10503
FLWMGYELHPDKWTVQ

SEQ ID NO: 3400 - protein, 17 aa, Human immunodeficiency virus 1
  source 1..17: note = HLAs: DPA10103-DPB10101 DPA10103-DPB11501 DPA10103-DPB13101 DPA10104-DPB10101 DPA10104-DPB11501 DPA10105-DPB10101 DPA10202-DPB10101 DPA10301-DPB10101 DPA10301-DPB10201 DPA10301-DPB10202 DPA10301-DPB10401 DPA10301-DPB110601 DPA10301-DPB11801 DPA10301-DPB12301 DPA10301-DPB13901 DPA10301-DPB14001 DPA10301-DPB16501 DPA10401-DPB10101 DQA10101-DQB10501 DQA10102-DQB10501 DQA10102-DQB10502 DQA10102-DQB10503 DQA10103-DQB10501 DQA10104-DQB10501 DQA10105-DQB10501
FLWMGYELHPDKWTVQP

SEQ ID NO: 3401 - protein, 18 aa, Human immunodeficiency virus 1
  source 1..18: note = HLAs: DPA10103-DPB11501 DPA10104-DPB11501 DPA10301-DPB10101 DPA10301-DPB10201 DPA10301-DPB10202 DPA10301-DPB10401 DPA10301-DPB12301 DPA10301-DPB13901 DPA10301-DPB14001 DQA10101-DQB10501 DQA10102-DQB10501 DQA10102-DQB10502 DQA10102-DQB10503 DQA10104-DQB10501 DQA10105-DQB10501
FLWMGYELHPDKWTVQPI

SEQ ID NO: 3402 - protein, 19 aa, Human immunodeficiency virus 1
  source 1..19: note = HLAs: DPA10103-DPB10101 DPA10103-DPB11501 DPA10103-DPB13101 DPA10104-DPB10101 DPA10104-DPB11501 DPA10105-DPB10101 DPA10202-DPB10101 DPA10301-DPB10101 DPA10301-DPB10201 DPA10301-DPB10202 DPA10301-DPB10401 DPA10301-DPB110601 DPA10301-DPB11801 DPA10301-DPB12301 DPA10301-DPB13901 DPA10301-DPB14001 DPA10301-DPB16501 DPA10401-DPB10101 DQA10101-DQB10501 DQA10102-DQB10501 DQA10102-DQB10502 DQA10102-DQB10503 DQA10103-DQB10501 DQA10104-DQB10501 DQA10105-DQB10501
FLWMGYELHPDKWTVQPIQ

SEQ ID NO: 3403 - protein, 20 aa, Human immunodeficiency virus 1
  source 1..20: note = HLAs: DRB1_1001 DPA10103-DPB10101 DPA10103-DPB11501 DPA10103-DPB11601 DPA10103-DPB13101 DPA10103-DPB15001 DPA10104-DPB10101 DPA10104-DPB11501 DPA10105-DPB10101 DPA10105-DPB15001 DPA10202-DPB10101 DPA10202-DPB110601 DPA10202-DPB11901 DPA10202-DPB13101 DPA10301-DPB10101 DPA10301-DPB10201 DPA10301-DPB10202 DPA10301-DPB10401 DPA10301-DPB110601 DPA10301-DPB11801 DPA10301-DPB12301 DPA10301-DPB13901 DPA10301-DPB14001 DPA10301-DPB16501 DPA10401-DPB10101 DPA10401-DPB10201 DPA10401-DPB10202 DPA10401-DPB10501 DQA10101-DQB10501 DQA10102-DQB10501 DQA10102-DQB10502 DQA10102-DQB10503 DQA10103-DQB10501 DQA10104-DQB10501 DQA10105-DQB10501 DQA10505-DQB10402
FLWMGYELHPDKWTVQPIQL

SEQ ID NO: 3404 - protein, 21 aa, Human immunodeficiency virus 1
  source 1..21: note = HLAs: DPA10103-DPB10101 DPA10103-DPB11501 DPA10103-DPB13101 DPA10104-DPB10101 DPA10104-DPB11501 DPA10105-DPB10101 DPA10202-DPB10101 DPA10301-DPB10101 DPA10301-DPB10201 DPA10301-DPB10202 DPA10301-DPB10401 DPA10301-DPB110601 DPA10301-DPB11801 DPA10301-DPB12301 DPA10301-DPB13901 DPA10301-DPB14001 DPA10301-DPB16501 DPA10401-DPB10101 DQA10101-DQB10501 DQA10102-DQB10501 DQA10102-DQB10502 DQA10102-DQB10503 DQA10103-DQB10501 DQA10104-DQB10501 DQA10105-DQB10501
FLWMGYELHPDKWTVQPIQLP

SEQ ID NO: 3405 - protein, 13 aa, Human immunodeficiency virus 1
  source 1..13: note = HLAs: DRB1_0101 DRB1_0813 DQA10102-DQB10501
FPISPIETVPVKL

SEQ ID NO: 3406 - protein, 14 aa, Human immunodeficiency virus 1
  source 1..14: note = HLAs: DRB1_0101 DRB1_0102 DRB1_0401 DRB1_0404 DRB1_0405 DRB1_0408 DRB1_0410 DRB1_0701 DRB1_0802 DRB1_0809 DRB1_0813 DRB1_0901 DRB1_1001 DRB1_1102 DRB1_1114 DRB1_1201 DRB1_1301 DRB1_1302 DRB1_1304 DRB1_1404 DRB1_1406 DRB1_1501 DRB1_1502 DRB1_1602 DPA10202-DPB10101 DPA10301-DPB10101 DPA10301-DPB11801 DPA10401-DPB10101 DQA10102-DQB10501 DQA10102-DQB10601 DQA10102-DQB10609 DQA10103-DQB10601 DQA10103-DQB10609 DQA10201-DQB10301 DQA10505-DQB10402
FPISPIETVPVKLK

SEQ ID NO: 3407 - protein, 15 aa, Human immunodeficiency virus 1
  source 1..15: note = HLAs: DRB1_0101 DRB1_0102 DRB1_0401 DRB1_0404 DRB1_0405 DRB1_0408 DRB1_0410 DRB1_0701 DRB1_0801 DRB1_0802 DRB1_0803 DRB1_0804 DRB1_0806 DRB1_0809 DRB1_0813 DRB1_0901 DRB1_1001 DRB1_1102 DRB1_1103 DRB1_1104 DRB1_1114 DRB1_1201 DRB1_1301 DRB1_1302 DRB1_1304 DRB1_1401 DRB1_1402 DRB1_1403 DRB1_1404 DRB1_1405 DRB1_1406 DRB1_1454 DRB1_1501 DRB1_1502 DRB1_1503 DRB1_1601 DRB1_1602 DPA10103-DPB11501 DPA10104-DPB11501 DPA10202-DPB10101 DPA10301-DPB10101 DPA10301-DPB10202 DPA10301-DPB11801 DPA10301-DPB14001 DPA10401-DPB10101 DQA10102-DQB10501 DQA10102-DQB10601 DQA10102-DQB10609 DQA10103-DQB10501 DQA10103-DQB10601 DQA10103-DQB10609 DQA10201-DQB10301 DQA10201-DQB10303 DQA10505-DQB10402 DQA10506-DQB10303
FPISPIETVPVKLKP

SEQ ID NO: 3408 - protein, 16 aa, Human immunodeficiency virus 1
  source 1..16: note = HLAs: DRB1_0101 DRB1_0102 DRB1_0401 DRB1_0404 DRB1_0405 DRB1_0408 DRB1_0410 DRB1_0701 DRB1_0802 DRB1_0804 DRB1_0809 DRB1_0813 DRB1_0901 DRB1_1001 DRB1_1102 DRB1_1114 DRB1_1201 DRB1_1301 DRB1_1302 DRB1_1304 DRB1_1404 DRB1_1406 DRB1_1501 DRB1_1502 DRB1_1602 DPA10202-DPB10101 DPA10301-DPB10101 DPA10301-DPB11801 DPA10401-DPB10101 DQA10102-DQB10501 DQA10102-DQB10601 DQA10102-DQB10609 DQA10103-DQB10501 DQA10103-DQB10601 DQA10103-DQB10609 DQA10201-DQB10301 DQA10201-DQB10303 DQA10505-DQB10402 DQA10506-DQB10303
FPISPIETVPVKLKPG

SEQ ID NO: 3409 - protein, 17 aa, Human immunodeficiency virus 1
  source 1..17: note = HLAs: DRB1_0101 DRB1_0102 DRB1_0401 DRB1_0404 DRB1_0405 DRB1_0408 DRB1_0410 DRB1_0701 DRB1_0802 DRB1_0804 DRB1_0806 DRB1_0809 DRB1_0813 DRB1_0901 DRB1_1001 DRB1_1102 DRB1_1103 DRB1_1104 DRB1_1114 DRB1_1201 DRB1_1301 DRB1_1302 DRB1_1304 DRB1_1401 DRB1_1402 DRB1_1404 DRB1_1406 DRB1_1454 DRB1_1501 DRB1_1502 DRB1_1602 DPA10202-DPB10101 DPA10301-DPB10101 DPA10301-DPB11801 DPA10401-DPB10101 DQA10102-DQB10501 DQA10102-DQB10601 DQA10103-DQB10501 DQA10103-DQB10601 DQA10103-DQB10609 DQA10201-DQB10301 DQA10505-DQB10402
FPISPIETVPVKLKPGM

SEQ ID NO: 3410 - protein, 18 aa, Human immunodeficiency virus 1
  source 1..18: note = HLAs: DRB1_0813 DQA10102-DQB10501
FPISPIETVPVKLKPGMD

SEQ ID NO: 3411 - protein, 19 aa, Human immunodeficiency virus 1
  source 1..19: note = HLAs: DRB1_0101 DRB1_0102 DRB1_0404 DRB1_0405 DRB1_0408 DRB1_0410 DRB1_0701 DRB1_0813 DRB1_0901 DRB1_1001 DRB1_1102 DRB1_1114 DRB1_1301 DRB1_1302 DRB1_1304 DRB1_1404 DRB1_1406 DRB1_1501 DRB1_1602 DPA10202-DPB10101 DPA10301-DPB10101 DPA10301-DPB11801 DPA10401-DPB10101 DQA10102-DQB10501 DQA10102-DQB10601 DQA10103-DQB10501 DQA10103-DQB10601 DQA10103-DQB10609
FPISPIETVPVKLKPGMDG

SEQ ID NO: 3412 - protein, 20 aa, Human immunodeficiency virus 1
  source 1..20: note = HLAs: DRB1_0101 DRB1_0102 DRB1_0404 DRB1_0405 DRB1_0408 DRB1_0410 DRB1_0701 DRB1_0802 DRB1_0804 DRB1_0806 DRB1_0809 DRB1_0813 DRB1_0901 DRB1_1001 DRB1_1102 DRB1_1103 DRB1_1114 DRB1_1201 DRB1_1301 DRB1_1302 DRB1_1304 DRB1_1404 DRB1_1406 DRB1_1501 DRB1_1502 DRB1_1602 DPA10202-DPB10101 DPA10301-DPB10101 DPA10301-DPB11801 DPA10401-DPB10101 DQA10102-DQB10501 DQA10102-DQB10601 DQA10102-DQB10609 DQA10103-DQB10501 DQA10103-DQB10601 DQA10103-DQB10609 DQA10505-DQB10402
FPISPIETVPVKLKPGMDGP

SEQ ID NO: 3413 - protein, 21 aa, Human immunodeficiency virus 1
  source 1..21: note = HLAs: DRB1_0101 DRB1_0102 DRB1_0404 DRB1_0405 DRB1_0408 DRB1_0410 DRB1_0701 DRB1_0806 DRB1_0813 DRB1_0901 DRB1_1001 DRB1_1102 DRB1_1103 DRB1_1114 DRB1_1301 DRB1_1302 DRB1_1304 DRB1_1404 DRB1_1406 DRB1_1501 DRB1_1602 DPA10301-DPB11801 DQA10102-DQB10501 DQA10103-DQB10601 DQA10103-DQB10609
FPISPIETVPVKLKPGMDGPK

SEQ ID NO: 3414 - protein, 22 aa, Human immunodeficiency virus 1
  source 1..22: note = HLAs: DRB1_0101 DRB1_0102 DRB1_0404 DRB1_0405 DRB1_0408 DRB1_0410 DRB1_0701 DRB1_0804 DRB1_0806 DRB1_0813 DRB1_0901 DRB1_1001 DRB1_1102 DRB1_1103 DRB1_1114 DRB1_1301 DRB1_1302 DRB1_1304 DRB1_1404 DRB1_1406 DRB1_1501 DRB1_1602 DPA10301-DPB11801 DQA10102-DQB10501 DQA10103-DQB10601 DQA10103-DQB10609
FPISPIETVPVKLKPGMDGPKV

SEQ ID NO: 3415 - protein, 23 aa, Human immunodeficiency virus 1
  source 1..23: note = HLAs: DRB1_0101 DRB1_0102 DRB1_0404 DRB1_0405 DRB1_0408 DRB1_0410 DRB1_0701 DRB1_0804 DRB1_0806 DRB1_0813 DRB1_0901 DRB1_1001 DRB1_1102 DRB1_1103 DRB1_1114 DRB1_1301 DRB1_1302 DRB1_1304 DRB1_1404 DRB1_1406 DRB1_1501 DRB1_1602 DPA10301-DPB11801 DQA10102-DQB10501 DQA10103-DQB10601 DQA10103-DQB10609
FPISPIETVPVKLKPGMDGPKVK

SEQ ID NO: 3416 - protein, 24 aa, Human immunodeficiency virus 1
  source 1..24: note = HLAs: DRB1_0101 DRB1_0102 DRB1_0404 DRB1_0405 DRB1_0408 DRB1_0410 DRB1_0701 DRB1_0804 DRB1_0806 DRB1_0813 DRB1_0901 DRB1_1001 DRB1_1102 DRB1_1103 DRB1_1114 DRB1_1301 DRB1_1302 DRB1_1304 DRB1_1404 DRB1_1406 DRB1_1501 DRB1_1602 DPA10301-DPB11801 DQA10102-DQB10501 DQA10103-DQB10601 DQA10103-DQB10609
FPISPIETVPVKLKPGMDGPKVKQ

SEQ ID NO: 3417 - protein, 25 aa, Human immunodeficiency virus 1
  source 1..25: note = HLAs: DRB1_0101 DRB1_0102 DRB1_0404 DRB1_0405 DRB1_0408 DRB1_0410 DRB1_0701 DRB1_0804 DRB1_0806 DRB1_0813 DRB1_0901 DRB1_1001 DRB1_1102 DRB1_1103 DRB1_1114 DRB1_1301 DRB1_1302 DRB1_1304 DRB1_1404 DRB1_1406 DRB1_1501 DRB1_1602 DPA10301-DPB11801 DQA10102-DQB10501 DQA10103-DQB10501 DQA10103-DQB10601 DQA10103-DQB10609
FPISPIETVPVKLKPGMDGPKVKQW

SEQ ID NO: 3418 - protein, 13 aa, Human immunodeficiency virus 1
  source 1..13: note = HLAs: DRB1_1102 DRB1_1103 DRB1_1104 DRB1_1301 DRB1_1304 DRB1_1501 DQA10102-DQB10501
FPQITLWQRPLVT

SEQ ID NO: 3419 - protein, 15 aa, Human immunodeficiency virus 1
  source 1..15: note = HLAs: DPA10103-DPB11501 DPA10104-DPB11501 DPA10301-DPB10201 DPA10301-DPB10202 DPA10401-DPB10101
FRELNKRTQDFWEVQ

SEQ ID NO: 3420 - protein, 16 aa, Human immunodeficiency virus 1
  source 1..16: note = HLAs: DPA10103-DPB10101 DPA10103-DPB11501 DPA10104-DPB10101 DPA10104-DPB11501 DPA10105-DPB10101 DPA10301-DPB10101 DPA10301-DPB10201 DPA10301-DPB10202 DPA10301-DPB14001 DPA10401-DPB10101
FRELNKRTQDFWEVQL

SEQ ID NO: 3421 - protein, 17 aa, Human immunodeficiency virus 1
  source 1..17: note = HLAs: DPA10103-DPB11501 DPA10104-DPB11501 DPA10301-DPB10101 DPA10301-DPB10201 DPA10301-DPB10202 DPA10401-DPB10101
FRELNKRTQDFWEVQLG

SEQ ID NO: 3422 - protein, 18 aa, Human immunodeficiency virus 1
  source 1..18: note = HLAs: DPA10301-DPB10101 DPA10401-DPB10101
FRELNKRTQDFWEVQLGI

SEQ ID NO: 3423 - protein, 19 aa, Human immunodeficiency virus 1
  source 1..19: note = HLAs: DPA10103-DPB10101 DPA10103-DPB11501 DPA10103-DPB13101 DPA10104-DPB10101 DPA10104-DPB11501 DPA10105-DPB10101 DPA10202-DPB10101 DPA10301-DPB10101 DPA10301-DPB10201 DPA10301-DPB10202 DPA10301-DPB10401 DPA10301-DPB110601 DPA10301-DPB11801 DPA10301-DPB12301 DPA10301-DPB13901 DPA10301-DPB14001 DPA10301-DPB16501 DPA10401-DPB10101 DQA10101-DQB10501 DQA10102-DQB10501 DQA10104-DQB10501 DQA10105-DQB10501
FRELNKRTQDFWEVQLGIP

SEQ ID NO: 3424 - protein, 20 aa, Human immunodeficiency virus 1
  source 1..20: note = HLAs: DRB1_1001 DPA10103-DPB10101 DPA10103-DPB11501 DPA10103-DPB11601 DPA10103-DPB11901 DPA10103-DPB13101 DPA10103-DPB15001 DPA10104-DPB10101 DPA10104-DPB11501 DPA10105-DPB10101 DPA10105-DPB15001 DPA10106-DPB10101 DPA10201-DPB10101 DPA10202-DPB10101 DPA10202-DPB110601 DPA10202-DPB11901 DPA10202-DPB13101 DPA10301-DPB10101 DPA10301-DPB10201 DPA10301-DPB10202 DPA10301-DPB10401 DPA10301-DPB110601 DPA10301-DPB11801 DPA10301-DPB12301 DPA10301-DPB13901 DPA10301-DPB14001 DPA10301-DPB16501 DPA10401-DPB10101 DPA10401-DPB10201 DPA10401-DPB10202 DPA10401-DPB10501 DQA10102-DQB10501 DQA10102-DQB10503 DQA10103-DQB10501
FRELNKRTQDFWEVQLGIPH

SEQ ID NO: 3425 - protein, 21 aa, Human immunodeficiency virus 1
  source 1..21: note = HLAs: DPA10103-DPB10101 DPA10103-DPB11501 DPA10103-DPB13101 DPA10103-DPB15001 DPA10104-DPB10101 DPA10104-DPB11501 DPA10105-DPB10101 DPA10105-DPB15001 DPA10202-DPB10101 DPA10301-DPB10101 DPA10301-DPB10201 DPA10301-DPB10202 DPA10301-DPB10401 DPA10301-DPB110601 DPA10301-DPB11801 DPA10301-DPB12301 DPA10301-DPB13901 DPA10301-DPB14001 DPA10301-DPB16501 DPA10401-DPB10101 DQA10102-DQB10501
FRELNKRTQDFWEVQLGIPHP

SEQ ID NO: 3426 - protein, 22 aa, Human immunodeficiency virus 1
  source 1..22: note = HLAs: DRB1_0101 DRB1_1001 DPA10103-DPB10101 DPA10103-DPB11501 DPA10103-DPB11601 DPA10103-DPB13101 DPA10103-DPB15001 DPA10104-DPB10101 DPA10104-DPB11501 DPA10105-DPB10101 DPA10105-DPB15001 DPA10202-DPB10101 DPA10301-DPB10101 DPA10301-DPB10201 DPA10301-DPB10202 DPA10301-DPB10401 DPA10301-DPB110601 DPA10301-DPB11801 DPA10301-DPB12301 DPA10301-DPB13901 DPA10301-DPB14001 DPA10301-DPB16501 DPA10401-DPB10101 DPA10401-DPB10201 DPA10401-DPB10202 DPA10401-DPB10501 DQA10102-DQB10501 DQA10102-DQB10503 DQA10102-DQB10601 DQA10103-DQB10501 DQA10103-DQB10601 DQA10201-DQB10301 DQA10501-DQB10301 DQA10501-DQB10319 DQA10503-DQB10301 DQA10505-DQB10301 DQA10505-DQB10309 DQA10505-DQB10319 DQA10508-DQB10301 DQA10509-DQB10301 DQA10601-DQB10301
FRELNKRTQDFWEVQLGIPHPA

SEQ ID NO: 3427 - protein, 23 aa, Human immunodeficiency virus 1
  source 1..23: note = HLAs: DRB1_0101 DRB1_1001 DPA10103-DPB10101 DPA10103-DPB11501 DPA10103-DPB11601 DPA10103-DPB13101 DPA10103-DPB15001 DPA10104-DPB10101 DPA10104-DPB11501 DPA10105-DPB10101 DPA10105-DPB15001 DPA10202-DPB10101 DPA10301-DPB10101 DPA10301-DPB10201 DPA10301-DPB10202 DPA10301-DPB10401 DPA10301-DPB110601 DPA10301-DPB11801 DPA10301-DPB12301 DPA10301-DPB13901 DPA10301-DPB14001 DPA10301-DPB16501 DPA10401-DPB10101 DPA10401-DPB10201 DPA10401-DPB10202 DPA10401-DPB10501 DQA10102-DQB10501 DQA10102-DQB10503 DQA10102-DQB10601 DQA10103-DQB10501 DQA10103-DQB10601 DQA10201-DQB10301 DQA10301-DQB10301 DQA10302-DQB10301 DQA10303-DQB10301 DQA10501-DQB10301 DQA10501-DQB10319 DQA10503-DQB10301 DQA10505-DQB10301 DQA10505-DQB10309 DQA10505-DQB10319 DQA10506-DQB10303 DQA10508-DQB10301 DQA10509-DQB10301 DQA10601-DQB10301
FRELNKRTQDFWEVQLGIPHPAG

SEQ ID NO: 3428 - protein, 24 aa, Human immunodeficiency virus 1
  source 1..24: note = HLAs: DRB1_0101 DRB1_0102 DRB1_0901 DRB1_1001 DPA10103-DPB10101 DPA10103-DPB11501 DPA10103-DPB11601 DPA10103-DPB13101 DPA10103-DPB15001 DPA10104-DPB10101 DPA10104-DPB11501 DPA10105-DPB10101 DPA10105-DPB15001 DPA10202-DPB10101 DPA10301-DPB10101 DPA10301-DPB10201 DPA10301-DPB10202 DPA10301-DPB10401 DPA10301-DPB110601 DPA10301-DPB11801 DPA10301-DPB12301 DPA10301-DPB13901 DPA10301-DPB14001 DPA10301-DPB16501 DPA10401-DPB10101 DPA10401-DPB10201 DPA10401-DPB10202 DPA10401-DPB10501 DQA10102-DQB10501 DQA10102-DQB10503 DQA10102-DQB10601 DQA10102-DQB10609 DQA10103-DQB10501 DQA10103-DQB10601 DQA10103-DQB10609 DQA10201-DQB10301 DQA10201-DQB10303 DQA10301-DQB10301 DQA10302-DQB10301 DQA10303-DQB10301 DQA10501-DQB10301 DQA10501-DQB10319 DQA10503-DQB10301 DQA10505-DQB10301 DQA10505-DQB10309 DQA10505-DQB10319 DQA10505-DQB10402 DQA10506-DQB10303 DQA10508-DQB10301 DQA10509-DQB10301 DQA10601-DQB10301
FRELNKRTQDFWEVQLGIPHPAGL

SEQ ID NO: 3429 - protein, 25 aa, Human immunodeficiency virus 1
  source 1..25: note = HLAs: DRB1_0101 DRB1_0102 DRB1_0901 DRB1_1001 DPA10103-DPB10101 DPA10103-DPB11501 DPA10103-DPB11601 DPA10103-DPB13101 DPA10103-DPB15001 DPA10104-DPB10101 DPA10104-DPB11501 DPA10105-DPB10101 DPA10105-DPB15001 DPA10202-DPB10101 DPA10301-DPB10101 DPA10301-DPB10201 DPA10301-DPB10202 DPA10301-DPB10401 DPA10301-DPB110601 DPA10301-DPB11801 DPA10301-DPB12301 DPA10301-DPB13901 DPA10301-DPB14001 DPA10301-DPB16501 DPA10401-DPB10101 DPA10401-DPB10201 DPA10401-DPB10202 DPA10401-DPB10501 DQA10102-DQB10501 DQA10102-DQB10503 DQA10102-DQB10601 DQA10102-DQB10609 DQA10103-DQB10501 DQA10103-DQB10601 DQA10103-DQB10602 DQA10103-DQB10609 DQA10201-DQB10301 DQA10201-DQB10303 DQA10301-DQB10301 DQA10302-DQB10301 DQA10303-DQB10301 DQA10401-DQB10301 DQA10401-DQB10319 DQA10501-DQB10301 DQA10501-DQB10319 DQA10503-DQB10301 DQA10505-DQB10301 DQA10505-DQB10309 DQA10505-DQB10319 DQA10505-DQB10402 DQA10506-DQB10303 DQA10508-DQB10301 DQA10509-DQB10301 DQA10601-DQB10301
FRELNKRTQDFWEVQLGIPHPAGLK

SEQ ID NO: 3430 - protein, 13 aa, Human immunodeficiency virus 1
  source 1..13: note = HLAs: DRB1_0101 DRB1_0405 DRB1_0408 DRB1_0701 DRB1_0901 DRB1_1001 DRB1_1501 DRB1_1502 DRB1_1503 DRB1_1601 DRB1_1602 DPA10103-DPB10101 DPA10103-DPB11501 DPA10103-DPB13101 DPA10103-DPB15001 DPA10104-DPB10101 DPA10104-DPB11501 DPA10105-DPB10101 DPA10105-DPB15001 DPA10201-DPB11501 DPA10202-DPB10101 DPA10202-DPB15501 DPA10301-DPB10101 DPA10301-DPB10201 DPA10301-DPB10202 DPA10301-DPB10401 DPA10301-DPB110601 DPA10301-DPB12301 DPA10301-DPB13901 DPA10301-DPB14001 DPA10301-DPB16501 DPA10401-DPB10101 DPA10401-DPB10201 DPA10401-DPB10202 DQA10102-DQB10501 DQA10102-DQB10503 DQA10102-DQB10609 DQA10103-DQB10501 DQA10103-DQB10609 DQA10505-DQB10402
FRKYTAFTIPSIN

SEQ ID NO: 3431 - protein, 14 aa, Human immunodeficiency virus 1
  source 1..14: note = HLAs: DRB1_0101 DRB1_0401 DRB1_0405 DRB1_0408 DRB1_0410 DRB1_0701 DRB1_0801 DRB1_0813 DRB1_0901 DRB1_1001 DRB1_1501 DRB1_1502 DRB1_1503 DRB1_1601 DRB1_1602 DPA10103-DPB10101 DPA10103-DPB10201 DPA10103-DPB10202 DPA10103-DPB10301 DPA10103-DPB10601 DPA10103-DPB11101 DPA10103-DPB112401 DPA10103-DPB11501 DPA10103-DPB11601 DPA10103-DPB11901 DPA10103-DPB12001 DPA10103-DPB13101 DPA10103-DPB13401 DPA10103-DPB14101 DPA10103-DPB14801 DPA10103-DPB15001 DPA10103-DPB15501 DPA10104-DPB10101 DPA10104-DPB10301 DPA10104-DPB11501 DPA10105-DPB10101 DPA10105-DPB10301 DPA10105-DPB15001 DPA10106-DPB10101 DPA10201-DPB10101 DPA10201-DPB110601 DPA10201-DPB11501 DPA10201-DPB11901 DPA10201-DPB15501 DPA10202-DPB10101 DPA10202-DPB10201 DPA10202-DPB10202 DPA10202-DPB110601 DPA10202-DPB11101 DPA10202-DPB11301 DPA10202-DPB11901 DPA10202-DPB13101 DPA10202-DPB15501 DPA10202-DPB16501 DPA10301-DPB10101 DPA10301-DPB10201 DPA10301-DPB10202 DPA10301-DPB10401 DPA10301-DPB10402 DPA10301-DPB110501 DPA10301-DPB110601; note = HLAs: DPA10301-DPB11101 DPA10301-DPB11801 DPA10301-DPB12301 DPA10301-DPB13901 DPA10301-DPB14001 DPA10301-DPB14901 DPA10301-DPB15501 DPA10301-DPB16501 DPA10301-DPB18001 DPA10401-DPB10101 DPA10401-DPB10201 DPA10401-DPB10202 DPA10401-DPB10301 DPA10401-DPB10501 DPA10401-DPB11301 DPA10401-DPB113301 DPA10401-DPB11401 DQA10102-DQB10501 DQA10102-DQB10503 DQA10102-DQB10601 DQA10102-DQB10609 DQA10103-DQB10501 DQA10103-DQB10503 DQA10103-DQB10601 DQA10103-DQB10604 DQA10103-DQB10609 DQA10201-DQB10301 DQA10201-DQB10303 DQA10505-DQB10402 DQA10506-DQB10303
FRKYTAFTIPSINN

SEQ ID NO: 3432 - protein, 15 aa, Human immunodeficiency virus 1
  source 1..15: note = HLAs: DRB1_0101 DRB1_0102 DRB1_0103 DRB1_0401 DRB1_0404 DRB1_0405 DRB1_0408 DRB1_0410 DRB1_0701 DRB1_0801 DRB1_0802 DRB1_0803 DRB1_0806 DRB1_0809 DRB1_0813 DRB1_0901 DRB1_1001 DRB1_1102 DRB1_1103 DRB1_1301 DRB1_1304 DRB1_1501 DRB1_1502 DRB1_1503 DRB1_1601 DRB1_1602 DPA10103-DPB10101 DPA10103-DPB10201 DPA10103-DPB10202 DPA10103-DPB10301 DPA10103-DPB10401 DPA10103-DPB10501 DPA10103-DPB10601 DPA10103-DPB11101 DPA10103-DPB112401 DPA10103-DPB112601 DPA10103-DPB11401 DPA10103-DPB11501 DPA10103-DPB11601 DPA10103-DPB11901 DPA10103-DPB12001 DPA10103-DPB12301 DPA10103-DPB12901 DPA10103-DPB13101 DPA10103-DPB13401 DPA10103-DPB13901 DPA10103-DPB14001 DPA10103-DPB14101 DPA10103-DPB14801 DPA10103-DPB15001 DPA10103-DPB15501 DPA10103-DPB15901 DPA10104-DPB10101 DPA10104-DPB10301 DPA10104-DPB11501 DPA10105-DPB10101 DPA10105-DPB10301 DPA10105-DPB10401 DPA10105-DPB15001 DPA10106-DPB10101 DPA10106-DPB11101 DPA10201-DPB10101 DPA10201-DPB10202 DPA10201-DPB10601 DPA10201-DPB110601 DPA10201-DPB11101; note = HLAs: DPA10201-DPB11501 DPA10201-DPB11601 DPA10201-DPB11901 DPA10201-DPB13401 DPA10201-DPB15501 DPA10202-DPB10101 DPA10202-DPB10201 DPA10202-DPB10202 DPA10202-DPB10401 DPA10202-DPB10501 DPA10202-DPB110601 DPA10202-DPB11101 DPA10202-DPB11301 DPA10202-DPB11801 DPA10202-DPB11901 DPA10202-DPB12101 DPA10202-DPB12901 DPA10202-DPB13001 DPA10202-DPB13101 DPA10202-DPB13801 DPA10202-DPB15501 DPA10202-DPB16501 DPA10202-DPB18501 DPA10301-DPB10101 DPA10301-DPB10201 DPA10301-DPB10202 DPA10301-DPB10301 DPA10301-DPB10401 DPA10301-DPB10402 DPA10301-DPB110501 DPA10301-DPB110601 DPA10301-DPB11101 DPA10301-DPB11301 DPA10301-DPB11701 DPA10301-DPB11801 DPA10301-DPB12301 DPA10301-DPB13901 DPA10301-DPB14001 DPA10301-DPB14901 DPA10301-DPB15501 DPA10301-DPB16501 DPA10301-DPB17501 DPA10301-DPB18001 DPA10401-DPB10101 DPA10401-DPB10201 DPA10401-DPB10202 DPA10401-DPB10301 DPA10401-DPB10501 DPA10401-DPB11301 DPA10401-DPB113301 DPA10401-DPB11401 DQA10102-DQB10501 DQA10102-DQB10503 DQA10102-DQB10601 DQA10102-DQB10604; note = HLAs: DQA10102-DQB10609 DQA10103-DQB10501 DQA10103-DQB10503 DQA10103-DQB10601 DQA10103-DQB10602 DQA10103-DQB10604 DQA10103-DQB10609 DQA10201-DQB10301 DQA10201-DQB10303 DQA10301-DQB10301 DQA10302-DQB10301 DQA10303-DQB10301 DQA10501-DQB10301 DQA10501-DQB10319 DQA10501-DQB10501 DQA10503-DQB10301 DQA10505-DQB10301 DQA10505-DQB10302 DQA10505-DQB10309 DQA10505-DQB10319 DQA10505-DQB10402 DQA10505-DQB10501 DQA10506-DQB10303 DQA10508-DQB10301 DQA10509-DQB10301 DQA10601-DQB10301
FRKYTAFTIPSINNE

SEQ ID NO: 3433 - protein, 16 aa, Human immunodeficiency virus 1
  source 1..16: note = HLAs: DRB1_0101 DRB1_0401 DRB1_0405 DRB1_0408 DRB1_0410 DRB1_0701 DRB1_0801 DRB1_0813 DRB1_0901 DRB1_1001 DRB1_1501 DRB1_1502 DRB1_1503 DRB1_1601 DRB1_1602 DPA10103-DPB10101 DPA10103-DPB10201 DPA10103-DPB10202 DPA10103-DPB10301 DPA10103-DPB10501 DPA10103-DPB10601 DPA10103-DPB11101 DPA10103-DPB112401 DPA10103-DPB11401 DPA10103-DPB11501 DPA10103-DPB11601 DPA10103-DPB11901 DPA10103-DPB12001 DPA10103-DPB13101 DPA10103-DPB13401 DPA10103-DPB14101 DPA10103-DPB14801 DPA10103-DPB15001 DPA10103-DPB15501 DPA10104-DPB10101 DPA10104-DPB10301 DPA10104-DPB11501 DPA10105-DPB10101 DPA10105-DPB10301 DPA10105-DPB15001 DPA10106-DPB10101 DPA10201-DPB10101 DPA10201-DPB110601 DPA10201-DPB11501 DPA10201-DPB11901 DPA10201-DPB15501 DPA10202-DPB10101 DPA10202-DPB10201 DPA10202-DPB10202 DPA10202-DPB10501 DPA10202-DPB110601 DPA10202-DPB11101 DPA10202-DPB11301 DPA10202-DPB11901 DPA10202-DPB12901 DPA10202-DPB13101 DPA10202-DPB13801 DPA10202-DPB15501 DPA10202-DPB16501 DPA10202-DPB18501 DPA10301-DPB10101; note = HLAs: DPA10301-DPB10201 DPA10301-DPB10202 DPA10301-DPB10301 DPA10301-DPB10401 DPA10301-DPB10402 DPA10301-DPB110501 DPA10301-DPB110601 DPA10301-DPB11101 DPA10301-DPB11301 DPA10301-DPB11701 DPA10301-DPB11801 DPA10301-DPB12301 DPA10301-DPB13901 DPA10301-DPB14001 DPA10301-DPB14901 DPA10301-DPB15501 DPA10301-DPB16501 DPA10301-DPB17501 DPA10301-DPB18001 DPA10401-DPB10101 DPA10401-DPB10201 DPA10401-DPB10202 DPA10401-DPB10301 DPA10401-DPB10501 DPA10401-DPB11301 DPA10401-DPB113301 DPA10401-DPB11401 DQA10101-DQB10501 DQA10102-DQB10501 DQA10102-DQB10503 DQA10102-DQB10601 DQA10102-DQB10604 DQA10102-DQB10609 DQA10103-DQB10501 DQA10103-DQB10503 DQA10103-DQB10601 DQA10103-DQB10602 DQA10103-DQB10604 DQA10103-DQB10609 DQA10104-DQB10501 DQA10105-DQB10501 DQA10201-DQB10301 DQA10201-DQB10303 DQA10301-DQB10301 DQA10302-DQB10301 DQA10303-DQB10301 DQA10501-DQB10301 DQA10501-DQB10319 DQA10501-DQB10501 DQA10503-DQB10301 DQA10505-DQB10301 DQA10505-DQB10302 DQA10505-DQB10309 DQA10505-DQB10319 DQA10505-DQB10402; note = HLAs: DQA10505-DQB10501 DQA10506-DQB10303 DQA10508-DQB10301 DQA10509-DQB10301 DQA10601-DQB10301
FRKYTAFTIPSINNET

SEQ ID NO: 3434 - protein, 17 aa, Human immunodeficiency virus 1
  source 1..17: note = HLAs: DRB1_0101 DRB1_0401 DRB1_0404 DRB1_0405 DRB1_0408 DRB1_0410 DRB1_0701 DRB1_0801 DRB1_0813 DRB1_0901 DRB1_1001 DRB1_1501 DRB1_1502 DRB1_1503 DRB1_1601 DRB1_1602 DPA10103-DPB10101 DPA10103-DPB10201 DPA10103-DPB10202 DPA10103-DPB10301 DPA10103-DPB10501 DPA10103-DPB10601 DPA10103-DPB11101 DPA10103-DPB112401 DPA10103-DPB11401 DPA10103-DPB11501 DPA10103-DPB11601 DPA10103-DPB11901 DPA10103-DPB12001 DPA10103-DPB13101 DPA10103-DPB13401 DPA10103-DPB14101 DPA10103-DPB14801 DPA10103-DPB15001 DPA10103-DPB15501 DPA10104-DPB10101 DPA10104-DPB10301 DPA10104-DPB11501 DPA10105-DPB10101 DPA10105-DPB10301 DPA10105-DPB15001 DPA10106-DPB10101 DPA10201-DPB10101 DPA10201-DPB110601 DPA10201-DPB11501 DPA10201-DPB11901 DPA10202-DPB10101 DPA10202-DPB10201 DPA10202-DPB10202 DPA10202-DPB10501 DPA10202-DPB110601 DPA10202-DPB11101 DPA10202-DPB11301 DPA10202-DPB11901 DPA10202-DPB13101 DPA10202-DPB13801 DPA10202-DPB15501 DPA10202-DPB16501 DPA10301-DPB10101 DPA10301-DPB10201 DPA10301-DPB10202 DPA10301-DPB10301; note = HLAs: DPA10301-DPB10401 DPA10301-DPB10402 DPA10301-DPB110501 DPA10301-DPB110601 DPA10301-DPB11101 DPA10301-DPB11801 DPA10301-DPB12301 DPA10301-DPB13901 DPA10301-DPB14001 DPA10301-DPB14901 DPA10301-DPB15501 DPA10301-DPB16501 DPA10301-DPB17501 DPA10301-DPB18001 DPA10401-DPB10101 DPA10401-DPB10201 DPA10401-DPB10202 DPA10401-DPB10301 DPA10401-DPB10501 DPA10401-DPB11301 DPA10401-DPB113301 DPA10401-DPB11401 DQA10102-DQB10501 DQA10102-DQB10503 DQA10102-DQB10601 DQA10102-DQB10604 DQA10102-DQB10609 DQA10103-DQB10501 DQA10103-DQB10503 DQA10103-DQB10601 DQA10103-DQB10602 DQA10103-DQB10604 DQA10103-DQB10609 DQA10201-DQB10301 DQA10201-DQB10303 DQA10505-DQB10402 DQA10506-DQB10303
FRKYTAFTIPSINNETP

SEQ ID NO: 3435 - protein, 18 aa, Human immunodeficiency virus 1
  source 1..18: note = HLAs: DRB1_0701 DRB1_0901 DRB1_1001 DRB1_1602 DPA10103-DPB10101 DPA10103-DPB11501 DPA10103-DPB13101 DPA10103-DPB15001 DPA10104-DPB10101 DPA10104-DPB11501 DPA10105-DPB10101 DPA10105-DPB15001 DPA10202-DPB10101 DPA10301-DPB10101 DPA10301-DPB10201 DPA10301-DPB10202 DPA10301-DPB10401 DPA10301-DPB110601 DPA10301-DPB12301 DPA10301-DPB13901 DPA10301-DPB14001 DPA10301-DPB16501 DPA10401-DPB10101 DPA10401-DPB10202 DPA10401-DPB10301 DPA10401-DPB10501 DQA10102-DQB10501 DQA10102-DQB10503 DQA10102-DQB10601 DQA10102-DQB10609 DQA10103-DQB10501 DQA10103-DQB10609 DQA10201-DQB10301 DQA10505-DQB10402
FRKYTAFTIPSINNETPG

SEQ ID NO: 3436 - protein, 19 aa, Human immunodeficiency virus 1
  source 1..19: note = HLAs: DRB1_0101 DRB1_0401 DRB1_0405 DRB1_0408 DRB1_0410 DRB1_0701 DRB1_0901 DRB1_1001 DRB1_1501 DRB1_1502 DRB1_1503 DRB1_1601 DRB1_1602 DPA10103-DPB10101 DPA10103-DPB10201 DPA10103-DPB10202 DPA10103-DPB10601 DPA10103-DPB11101 DPA10103-DPB11501 DPA10103-DPB11601 DPA10103-DPB11901 DPA10103-DPB12001 DPA10103-DPB13101 DPA10103-DPB13401 DPA10103-DPB14801 DPA10103-DPB15001 DPA10103-DPB15501 DPA10104-DPB10101 DPA10104-DPB11501 DPA10105-DPB10101 DPA10105-DPB15001 DPA10106-DPB10101 DPA10201-DPB10101 DPA10201-DPB11501 DPA10202-DPB10101 DPA10202-DPB10201 DPA10202-DPB10202 DPA10202-DPB110601 DPA10202-DPB11101 DPA10202-DPB11301 DPA10202-DPB11901 DPA10202-DPB13101 DPA10202-DPB15501 DPA10301-DPB10101 DPA10301-DPB10201 DPA10301-DPB10202 DPA10301-DPB10401 DPA10301-DPB10402 DPA10301-DPB110501 DPA10301-DPB110601 DPA10301-DPB11101 DPA10301-DPB11801 DPA10301-DPB12301 DPA10301-DPB13901 DPA10301-DPB14001 DPA10301-DPB14901 DPA10301-DPB15501 DPA10301-DPB16501 DPA10301-DPB18001 DPA10401-DPB10101; note = HLAs: DPA10401-DPB10201 DPA10401-DPB10202 DPA10401-DPB10301 DPA10401-DPB10501 DPA10401-DPB11301 DPA10401-DPB113301 DPA10401-DPB11401 DQA10102-DQB10501 DQA10102-DQB10503 DQA10102-DQB10601 DQA10102-DQB10604 DQA10102-DQB10609 DQA10103-DQB10501 DQA10103-DQB10503 DQA10103-DQB10601 DQA10103-DQB10604 DQA10103-DQB10609 DQA10201-DQB10301 DQA10201-DQB10303 DQA10505-DQB10402 DQA10506-DQB10303
FRKYTAFTIPSINNETPGI

SEQ ID NO: 3437 - protein, 20 aa, Human immunodeficiency virus 1
  source 1..20: note = HLAs: DRB1_0101 DRB1_0401 DRB1_0404 DRB1_0405 DRB1_0408 DRB1_0410 DRB1_0701 DRB1_0801 DRB1_0803 DRB1_0813 DRB1_0901 DRB1_1001 DRB1_1501 DRB1_1502 DRB1_1503 DRB1_1601 DRB1_1602 DPA10103-DPB10101 DPA10103-DPB10201 DPA10103-DPB10202 DPA10103-DPB10301 DPA10103-DPB10401 DPA10103-DPB10501 DPA10103-DPB10601 DPA10103-DPB11101 DPA10103-DPB112401 DPA10103-DPB112601 DPA10103-DPB11401 DPA10103-DPB11501 DPA10103-DPB11601 DPA10103-DPB11901 DPA10103-DPB12001 DPA10103-DPB12301 DPA10103-DPB12901 DPA10103-DPB13101 DPA10103-DPB13401 DPA10103-DPB13901 DPA10103-DPB14001 DPA10103-DPB14101 DPA10103-DPB14801 DPA10103-DPB15001 DPA10103-DPB15501 DPA10103-DPB15901 DPA10104-DPB10101 DPA10104-DPB10301 DPA10104-DPB11501 DPA10105-DPB10101 DPA10105-DPB10301 DPA10105-DPB10401 DPA10105-DPB15001 DPA10106-DPB10101 DPA10106-DPB11101 DPA10201-DPB10101 DPA10201-DPB110601 DPA10201-DPB11101 DPA10201-DPB11501 DPA10201-DPB11601 DPA10201-DPB11901 DPA10201-DPB15501 DPA10202-DPB10101 DPA10202-DPB10201 DPA10202-DPB10202; note = HLAs: DPA10202-DPB10501 DPA10202-DPB110601 DPA10202-DPB11101 DPA10202-DPB11301 DPA10202-DPB113101 DPA10202-DPB11701 DPA10202-DPB11901 DPA10202-DPB12101 DPA10202-DPB12901 DPA10202-DPB13001 DPA10202-DPB13101 DPA10202-DPB13801 DPA10202-DPB15501 DPA10202-DPB16501 DPA10202-DPB18501 DPA10301-DPB10101 DPA10301-DPB10201 DPA10301-DPB10202 DPA10301-DPB10301 DPA10301-DPB10401 DPA10301-DPB10402 DPA10301-DPB110501 DPA10301-DPB110601 DPA10301-DPB11101 DPA10301-DPB11301 DPA10301-DPB11701 DPA10301-DPB11801 DPA10301-DPB12301 DPA10301-DPB13901 DPA10301-DPB14001 DPA10301-DPB14901 DPA10301-DPB15501 DPA10301-DPB16501 DPA10301-DPB17501 DPA10301-DPB18001 DPA10401-DPB10101 DPA10401-DPB10201 DPA10401-DPB10202 DPA10401-DPB10301 DPA10401-DPB10402 DPA10401-DPB10501 DPA10401-DPB110501 DPA10401-DPB11301 DPA10401-DPB113301 DPA10401-DPB11401 DPA10401-DPB14901 DQA10102-DQB10501 DQA10102-DQB10503 DQA10102-DQB10601 DQA10102-DQB10604 DQA10102-DQB10609 DQA10103-DQB10501 DQA10103-DQB10503 DQA10103-DQB10601; note = HLAs: DQA10103-DQB10602 DQA10103-DQB10604 DQA10103-DQB10609 DQA10201-DQB10301 DQA10201-DQB10303 DQA10505-DQB10402 DQA10506-DQB10303
FRKYTAFTIPSINNETPGIR

SEQ ID NO: 3438 - protein, 21 aa, Human immunodeficiency virus 1
  source 1..21: note = HLAs: DRB1_0101 DRB1_0405 DRB1_0408 DRB1_0410 DRB1_0701 DRB1_0901 DRB1_1001 DRB1_1501 DRB1_1502 DRB1_1503 DRB1_1601 DRB1_1602 DPA10103-DPB10101 DPA10103-DPB11501 DPA10103-DPB11601 DPA10103-DPB11901 DPA10103-DPB13101 DPA10103-DPB15001 DPA10104-DPB10101 DPA10104-DPB11501 DPA10105-DPB10101 DPA10105-DPB15001 DPA10202-DPB10101 DPA10202-DPB10202 DPA10202-DPB13101 DPA10202-DPB15501 DPA10301-DPB10101 DPA10301-DPB10201 DPA10301-DPB10202 DPA10301-DPB10401 DPA10301-DPB10402 DPA10301-DPB110501 DPA10301-DPB110601 DPA10301-DPB11801 DPA10301-DPB12301 DPA10301-DPB13901 DPA10301-DPB14001 DPA10301-DPB14901 DPA10301-DPB15501 DPA10301-DPB16501 DPA10301-DPB18001 DPA10401-DPB10101 DPA10401-DPB10201 DPA10401-DPB10202 DPA10401-DPB10301 DPA10401-DPB10501 DPA10401-DPB11401 DQA10102-DQB10501 DQA10102-DQB10503 DQA10102-DQB10601 DQA10102-DQB10609 DQA10103-DQB10501 DQA10103-DQB10503 DQA10103-DQB10601 DQA10103-DQB10609 DQA10201-DQB10301 DQA10201-DQB10303 DQA10505-DQB10402
FRKYTAFTIPSINNETPGIRY

SEQ ID NO: 3439 - protein, 22 aa, Human immunodeficiency virus 1
  source 1..22: note = HLAs: DRB1_0101 DRB1_0401 DRB1_0405 DRB1_0408 DRB1_0410 DRB1_0701 DRB1_0901 DRB1_1001 DRB1_1501 DRB1_1502 DRB1_1503 DRB1_1601 DRB1_1602 DPA10103-DPB10101 DPA10103-DPB10201 DPA10103-DPB11501 DPA10103-DPB11601 DPA10103-DPB11901 DPA10103-DPB13101 DPA10103-DPB14801 DPA10103-DPB15001 DPA10104-DPB10101 DPA10104-DPB11501 DPA10105-DPB10101 DPA10105-DPB15001 DPA10202-DPB10101 DPA10202-DPB10202 DPA10202-DPB13101 DPA10202-DPB15501 DPA10301-DPB10101 DPA10301-DPB10201 DPA10301-DPB10202 DPA10301-DPB10401 DPA10301-DPB10402 DPA10301-DPB110501 DPA10301-DPB110601 DPA10301-DPB11101 DPA10301-DPB11801 DPA10301-DPB12301 DPA10301-DPB13901 DPA10301-DPB14001 DPA10301-DPB14901 DPA10301-DPB15501 DPA10301-DPB16501 DPA10301-DPB18001 DPA10401-DPB10101 DPA10401-DPB10201 DPA10401-DPB10202 DPA10401-DPB10301 DPA10401-DPB10501 DPA10401-DPB11401 DQA10102-DQB10501 DQA10102-DQB10503 DQA10102-DQB10601 DQA10102-DQB10609 DQA10103-DQB10501 DQA10103-DQB10503 DQA10103-DQB10601 DQA10103-DQB10609 DQA10201-DQB10301; note = HLAs: DQA10201-DQB10303 DQA10505-DQB10402
FRKYTAFTIPSINNETPGIRYQ

SEQ ID NO: 3440 - protein, 23 aa, Human immunodeficiency virus 1
  source 1..23: note = HLAs: DRB1_0101 DRB1_0401 DRB1_0405 DRB1_0408 DRB1_0410 DRB1_0701 DRB1_0901 DRB1_1001 DRB1_1501 DRB1_1502 DRB1_1503 DRB1_1601 DRB1_1602 DPA10103-DPB10101 DPA10103-DPB10201 DPA10103-DPB11501 DPA10103-DPB11601 DPA10103-DPB11901 DPA10103-DPB13101 DPA10103-DPB14801 DPA10103-DPB15001 DPA10104-DPB10101 DPA10104-DPB11501 DPA10105-DPB10101 DPA10105-DPB15001 DPA10201-DPB11501 DPA10202-DPB10101 DPA10202-DPB10202 DPA10202-DPB110601 DPA10202-DPB11901 DPA10202-DPB13101 DPA10202-DPB15501 DPA10301-DPB10101 DPA10301-DPB10201 DPA10301-DPB10202 DPA10301-DPB10401 DPA10301-DPB10402 DPA10301-DPB110501 DPA10301-DPB110601 DPA10301-DPB11101 DPA10301-DPB11801 DPA10301-DPB12301 DPA10301-DPB13901 DPA10301-DPB14001 DPA10301-DPB14901 DPA10301-DPB15501 DPA10301-DPB16501 DPA10301-DPB18001 DPA10401-DPB10101 DPA10401-DPB10201 DPA10401-DPB10202 DPA10401-DPB10301 DPA10401-DPB10501 DPA10401-DPB11401 DQA10102-DQB10501 DQA10102-DQB10503 DQA10102-DQB10601 DQA10102-DQB10609 DQA10103-DQB10501 DQA10103-DQB10503; note = HLAs: DQA10103-DQB10601 DQA10103-DQB10609 DQA10201-DQB10301 DQA10201-DQB10303 DQA10505-DQB10402
FRKYTAFTIPSINNETPGIRYQY

SEQ ID NO: 3441 - protein, 24 aa, Human immunodeficiency virus 1
  source 1..24: note = HLAs: DRB1_0101 DRB1_0401 DRB1_0405 DRB1_0408 DRB1_0410 DRB1_0701 DRB1_0901 DRB1_1001 DRB1_1501 DRB1_1502 DRB1_1503 DRB1_1601 DRB1_1602 DPA10103-DPB10101 DPA10103-DPB10201 DPA10103-DPB11501 DPA10103-DPB11601 DPA10103-DPB11901 DPA10103-DPB12001 DPA10103-DPB13101 DPA10103-DPB14801 DPA10103-DPB15001 DPA10104-DPB10101 DPA10104-DPB11501 DPA10105-DPB10101 DPA10105-DPB15001 DPA10201-DPB11501 DPA10202-DPB10101 DPA10202-DPB10202 DPA10202-DPB110601 DPA10202-DPB11901 DPA10202-DPB13101 DPA10202-DPB15501 DPA10301-DPB10101 DPA10301-DPB10201 DPA10301-DPB10202 DPA10301-DPB10401 DPA10301-DPB10402 DPA10301-DPB110501 DPA10301-DPB110601 DPA10301-DPB11101 DPA10301-DPB11801 DPA10301-DPB12301 DPA10301-DPB13901 DPA10301-DPB14001 DPA10301-DPB14901 DPA10301-DPB15501 DPA10301-DPB16501 DPA10301-DPB18001 DPA10401-DPB10101 DPA10401-DPB10201 DPA10401-DPB10202 DPA10401-DPB10301 DPA10401-DPB10501 DPA10401-DPB11401 DQA10102-DQB10501 DQA10102-DQB10503 DQA10102-DQB10601 DQA10102-DQB10609 DQA10103-DQB10501; note = HLAs: DQA10103-DQB10503 DQA10103-DQB10601 DQA10103-DQB10609 DQA10201-DQB10301 DQA10201-DQB10303 DQA10505-DQB10402
FRKYTAFTIPSINNETPGIRYQYN

SEQ ID NO: 3442 - protein, 25 aa, Human immunodeficiency virus 1
  source 1..25: note = HLAs: DRB1_0101 DRB1_0401 DRB1_0405 DRB1_0408 DRB1_0410 DRB1_0701 DRB1_0901 DRB1_1001 DRB1_1501 DRB1_1502 DRB1_1503 DRB1_1601 DRB1_1602 DPA10103-DPB10101 DPA10103-DPB10201 DPA10103-DPB11501 DPA10103-DPB11601 DPA10103-DPB11901 DPA10103-DPB12001 DPA10103-DPB13101 DPA10103-DPB14801 DPA10103-DPB15001 DPA10104-DPB10101 DPA10104-DPB11501 DPA10105-DPB10101 DPA10105-DPB15001 DPA10201-DPB11501 DPA10202-DPB10101 DPA10202-DPB10202 DPA10202-DPB110601 DPA10202-DPB11901 DPA10202-DPB13101 DPA10202-DPB15501 DPA10301-DPB10101 DPA10301-DPB10201 DPA10301-DPB10202 DPA10301-DPB10401 DPA10301-DPB10402 DPA10301-DPB110501 DPA10301-DPB110601 DPA10301-DPB11101 DPA10301-DPB11801 DPA10301-DPB12301 DPA10301-DPB13901 DPA10301-DPB14001 DPA10301-DPB14901 DPA10301-DPB15501 DPA10301-DPB16501 DPA10301-DPB18001 DPA10401-DPB10101 DPA10401-DPB10201 DPA10401-DPB10202 DPA10401-DPB10301 DPA10401-DPB10501 DPA10401-DPB11401 DQA10102-DQB10501 DQA10102-DQB10503 DQA10102-DQB10601 DQA10102-DQB10609 DQA10103-DQB10501; note = HLAs: DQA10103-DQB10503 DQA10103-DQB10601 DQA10103-DQB10609 DQA10201-DQB10301 DQA10201-DQB10303 DQA10505-DQB10402
FRKYTAFTIPSINNETPGIRYQYNV

SEQ ID NO: 3443 - protein, 14 aa, Human immunodeficiency virus 1
  source 1..14: note = HLAs: DQA10201-DQB10301
FSALSEGATPQDLN

SEQ ID NO: 3444 - protein, 15 aa, Human immunodeficiency virus 1
  source 1..15: note = HLAs: DQA10102-DQB10601 DQA10201-DQB10301 DQA10501-DQB10301 DQA10501-DQB10319 DQA10503-DQB10301 DQA10505-DQB10301 DQA10505-DQB10309 DQA10505-DQB10319 DQA10508-DQB10301 DQA10509-DQB10301
FSALSEGATPQDLNT

SEQ ID NO: 3445 - protein, 16 aa, Human immunodeficiency virus 1
  source 1..16: note = HLAs: DQA10102-DQB10601 DQA10201-DQB10301 DQA10401-DQB10301 DQA10401-DQB10319
FSALSEGATPQDLNTM

SEQ ID NO: 3446 - protein, 17 aa, Human immunodeficiency virus 1
  source 1..17: note = HLAs: DQA10201-DQB10301
FSALSEGATPQDLNTML

SEQ ID NO: 3447 - protein, 19 aa, Human immunodeficiency virus 1
  source 1..19: note = HLAs: DQA10201-DQB10301
FSALSEGATPQDLNTMLNT

SEQ ID NO: 3448 - protein, 20 aa, Human immunodeficiency virus 1
  source 1..20: note = HLAs: DQA10102-DQB10601 DQA10201-DQB10301
FSALSEGATPQDLNTMLNTV

SEQ ID NO: 3449 - protein, 23 aa, Human immunodeficiency virus 1
  source 1..23: note = HLAs: DRB1_0404
FSALSEGATPQDLNTMLNTVGGH

SEQ ID NO: 3450 - protein, 24 aa, Human immunodeficiency virus 1
  source 1..24: note = HLAs: DRB1_0404 DRB1_0408 DRB1_1001 DQA10102-DQB10501
FSALSEGATPQDLNTMLNTVGGHQ

SEQ ID NO: 3451 - protein, 25 aa, Human immunodeficiency virus 1
  source 1..25: note = HLAs: DRB1_0404 DRB1_0408 DRB1_1001 DQA10102-DQB10501 DQA10102-DQB10601 DQA10201-DQB10301
FSALSEGATPQDLNTMLNTVGGHQA

SEQ ID NO: 3452 - protein, 13 aa, Human immunodeficiency virus 1
  source 1..13: note = HLAs: DRB1_0404 DRB1_1001 DQA10102-DQB10501
FSPEVIPMFSALS

SEQ ID NO: 3453 - protein, 14 aa, Human immunodeficiency virus 1
  source 1..14: note = HLAs: DRB1_0101 DRB1_0102 DRB1_0401 DRB1_0404 DRB1_0405 DRB1_0408 DRB1_0410 DRB1_1001 DRB1_1501 DRB1_1602 DPA10103-DPB11501 DPA10104-DPB11501 DPA10301-DPB10101 DPA10301-DPB10201 DPA10401-DPB10101 DQA10102-DQB10501 DQA10102-DQB10503 DQA10103-DQB10501
FSPEVIPMFSALSE

SEQ ID NO: 3454 - protein, 15 aa, Human immunodeficiency virus 1
  source 1..15: note = HLAs: DRB1_0101 DRB1_0102 DRB1_0401 DRB1_0402 DRB1_0404 DRB1_0405 DRB1_0408 DRB1_0410 DRB1_0801 DRB1_0802 DRB1_0804 DRB1_0806 DRB1_0809 DRB1_0813 DRB1_0901 DRB1_1001 DRB1_1101 DRB1_1104 DRB1_1304 DRB1_1305 DRB1_1406 DRB1_1501 DRB1_1503 DRB1_1601 DRB1_1602 DPA10103-DPB11501 DPA10104-DPB11501 DPA10301-DPB10101 DPA10301-DPB10201 DPA10301-DPB10202 DPA10301-DPB11801 DPA10301-DPB14001 DPA10401-DPB10101 DQA10102-DQB10501 DQA10102-DQB10503 DQA10103-DQB10501 DQA10201-DQB10301 DQA10201-DQB10303 DQA10505-DQB10402 DQA10506-DQB10303
FSPEVIPMFSALSEG

SEQ ID NO: 3455 - protein, 16 aa, Human immunodeficiency virus 1
  source 1..16: note = HLAs: DRB1_0101 DRB1_0102 DRB1_0401 DRB1_0404 DRB1_0405 DRB1_0408 DRB1_0410 DRB1_0802 DRB1_0804 DRB1_0806 DRB1_0809 DRB1_0813 DRB1_0901 DRB1_1001 DRB1_1104 DRB1_1406 DRB1_1501 DRB1_1601 DRB1_1602 DPA10103-DPB11501 DPA10104-DPB11501 DPA10301-DPB10101 DPA10301-DPB10201 DPA10301-DPB10202 DPA10301-DPB11801 DPA10301-DPB16501 DPA10401-DPB10101 DQA10102-DQB10501 DQA10102-DQB10503 DQA10102-DQB10601 DQA10102-DQB10602 DQA10102-DQB10609 DQA10102-DQB10611 DQA10103-DQB10501 DQA10103-DQB10601 DQA10103-DQB10609 DQA10201-DQB10301 DQA10201-DQB10302 DQA10201-DQB10303 DQA10301-DQB10301 DQA10302-DQB10301 DQA10303-DQB10301 DQA10401-DQB10301 DQA10401-DQB10319 DQA10501-DQB10301 DQA10501-DQB10319 DQA10503-DQB10301 DQA10505-DQB10301 DQA10505-DQB10302 DQA10505-DQB10309 DQA10505-DQB10319 DQA10505-DQB10402 DQA10506-DQB10303 DQA10508-DQB10301 DQA10509-DQB10301 DQA10601-DQB10301
FSPEVIPMFSALSEGA

SEQ ID NO: 3456 - protein, 17 aa, Human immunodeficiency virus 1
  source 1..17: note = HLAs: DRB1_0101 DRB1_0102 DRB1_0401 DRB1_0404 DRB1_0405 DRB1_0408 DRB1_0410 DRB1_0802 DRB1_0804 DRB1_0806 DRB1_0809 DRB1_0813 DRB1_0901 DRB1_1001 DRB1_1101 DRB1_1104 DRB1_1305 DRB1_1406 DRB1_1501 DRB1_1503 DRB1_1601 DRB1_1602 DPA10103-DPB11501 DPA10104-DPB11501 DPA10202-DPB10101 DPA10301-DPB10101 DPA10301-DPB10201 DPA10301-DPB10202 DPA10301-DPB11801 DPA10301-DPB14001 DPA10301-DPB16501 DPA10401-DPB10101 DQA10102-DQB10501 DQA10102-DQB10503 DQA10102-DQB10601 DQA10102-DQB10602 DQA10102-DQB10609 DQA10102-DQB10611 DQA10103-DQB10501 DQA10103-DQB10601 DQA10103-DQB10602 DQA10103-DQB10609 DQA10201-DQB10301 DQA10201-DQB10302 DQA10201-DQB10303 DQA10301-DQB10301 DQA10302-DQB10301 DQA10303-DQB10301 DQA10501-DQB10301 DQA10501-DQB10319 DQA10503-DQB10301 DQA10505-DQB10301 DQA10505-DQB10302 DQA10505-DQB10309 DQA10505-DQB10319 DQA10505-DQB10402 DQA10506-DQB10303 DQA10508-DQB10301 DQA10509-DQB10301 DQA10601-DQB10301
FSPEVIPMFSALSEGAT

SEQ ID NO: 3457 - protein, 18 aa, Human immunodeficiency virus 1
  source 1..18: note = HLAs: DRB1_0101 DRB1_0102 DRB1_0404 DRB1_0408 DRB1_1001 DPA10301-DPB10101 DQA10102-DQB10501 DQA10102-DQB10503 DQA10102-DQB10601 DQA10102-DQB10611 DQA10103-DQB10501 DQA10201-DQB10301 DQA10201-DQB10303 DQA10506-DQB10303
FSPEVIPMFSALSEGATP

SEQ ID NO: 3458 - protein, 19 aa, Human immunodeficiency virus 1
  source 1..19: note = HLAs: DRB1_0101 DRB1_0102 DRB1_0401 DRB1_0404 DRB1_0405 DRB1_0408 DRB1_0410 DRB1_0802 DRB1_0804 DRB1_0809 DRB1_0901 DRB1_1001 DRB1_1104 DRB1_1501 DRB1_1601 DRB1_1602 DPA10103-DPB11501 DPA10104-DPB11501 DPA10301-DPB10101 DPA10301-DPB10201 DPA10301-DPB10202 DPA10301-DPB11801 DPA10401-DPB10101 DQA10102-DQB10501 DQA10102-DQB10503 DQA10102-DQB10601 DQA10102-DQB10602 DQA10102-DQB10609 DQA10102-DQB10611 DQA10103-DQB10501 DQA10103-DQB10601 DQA10103-DQB10602 DQA10103-DQB10609 DQA10201-DQB10301 DQA10201-DQB10302 DQA10201-DQB10303 DQA10501-DQB10301 DQA10501-DQB10319 DQA10503-DQB10301 DQA10505-DQB10301 DQA10505-DQB10302 DQA10505-DQB10309 DQA10505-DQB10319 DQA10505-DQB10402 DQA10506-DQB10303 DQA10508-DQB10301 DQA10509-DQB10301 DQA10601-DQB10301
FSPEVIPMFSALSEGATPQ

SEQ ID NO: 3459 - protein, 20 aa, Human immunodeficiency virus 1
  source 1..20: note = HLAs: DRB1_0101 DRB1_0102 DRB1_0401 DRB1_0404 DRB1_0405 DRB1_0408 DRB1_0410 DRB1_0801 DRB1_0802 DRB1_0804 DRB1_0806 DRB1_0809 DRB1_0813 DRB1_0901 DRB1_1001 DRB1_1101 DRB1_1104 DRB1_1305 DRB1_1406 DRB1_1501 DRB1_1503 DRB1_1601 DRB1_1602 DPA10103-DPB11501 DPA10103-DPB15001 DPA10104-DPB11501 DPA10105-DPB15001 DPA10202-DPB10101 DPA10301-DPB10101 DPA10301-DPB10201 DPA10301-DPB10202 DPA10301-DPB110601 DPA10301-DPB11801 DPA10301-DPB14001 DPA10301-DPB16501 DPA10401-DPB10101 DPA10401-DPB10501 DQA10102-DQB10501 DQA10102-DQB10503 DQA10102-DQB10601 DQA10102-DQB10602 DQA10102-DQB10609 DQA10102-DQB10611 DQA10103-DQB10501 DQA10103-DQB10503 DQA10103-DQB10601 DQA10103-DQB10602 DQA10103-DQB10608 DQA10103-DQB10609 DQA10201-DQB10301 DQA10201-DQB10302 DQA10201-DQB10303 DQA10301-DQB10301 DQA10302-DQB10301 DQA10303-DQB10301 DQA10401-DQB10301 DQA10401-DQB10319 DQA10501-DQB10301 DQA10501-DQB10319 DQA10503-DQB10301 DQA10505-DQB10301 DQA10505-DQB10302 DQA10505-DQB10309 DQA10505-DQB10319 DQA10505-DQB10402; note = HLAs: DQA10506-DQB10303 DQA10508-DQB10301 DQA10509-DQB10301 DQA10601-DQB10301
FSPEVIPMFSALSEGATPQD

SEQ ID NO: 3460 - protein, 21 aa, Human immunodeficiency virus 1
  source 1..21: note = HLAs: DRB1_0101 DRB1_0102 DRB1_0401 DRB1_0404 DRB1_0405 DRB1_0408 DRB1_0410 DRB1_0802 DRB1_0804 DRB1_0809 DRB1_0901 DRB1_1001 DRB1_1104 DRB1_1406 DRB1_1501 DRB1_1601 DRB1_1602 DPA10301-DPB10101 DPA10401-DPB10101 DQA10102-DQB10501 DQA10102-DQB10503 DQA10102-DQB10601 DQA10102-DQB10609 DQA10103-DQB10501 DQA10103-DQB10601 DQA10103-DQB10609 DQA10201-DQB10301 DQA10201-DQB10303 DQA10501-DQB10301 DQA10501-DQB10319 DQA10503-DQB10301 DQA10505-DQB10301 DQA10505-DQB10309 DQA10505-DQB10319 DQA10506-DQB10303 DQA10508-DQB10301 DQA10509-DQB10301 DQA10601-DQB10301
FSPEVIPMFSALSEGATPQDL

SEQ ID NO: 3461 - protein, 22 aa, Human immunodeficiency virus 1
  source 1..22: note = HLAs: DRB1_0101 DRB1_0102 DRB1_0401 DRB1_0404 DRB1_0405 DRB1_0408 DRB1_0410 DRB1_0802 DRB1_0804 DRB1_0809 DRB1_0901 DRB1_1001 DRB1_1104 DRB1_1406 DRB1_1501 DRB1_1601 DRB1_1602 DPA10301-DPB10101 DPA10401-DPB10101 DQA10102-DQB10501 DQA10102-DQB10503 DQA10102-DQB10601 DQA10102-DQB10609 DQA10103-DQB10501 DQA10103-DQB10601 DQA10103-DQB10609 DQA10201-DQB10301 DQA10201-DQB10303 DQA10501-DQB10301 DQA10501-DQB10319 DQA10503-DQB10301 DQA10505-DQB10301 DQA10505-DQB10309 DQA10505-DQB10319 DQA10506-DQB10303 DQA10508-DQB10301 DQA10509-DQB10301 DQA10601-DQB10301
FSPEVIPMFSALSEGATPQDLN

SEQ ID NO: 3462 - protein, 23 aa, Human immunodeficiency virus 1
  source 1..23: note = HLAs: DRB1_0101 DRB1_0102 DRB1_0401 DRB1_0404 DRB1_0405 DRB1_0408 DRB1_0410 DRB1_0802 DRB1_0804 DRB1_0809 DRB1_0901 DRB1_1001 DRB1_1104 DRB1_1406 DRB1_1501 DRB1_1601 DRB1_1602 DPA10301-DPB10101 DPA10401-DPB10101 DQA10102-DQB10501 DQA10102-DQB10503 DQA10102-DQB10601 DQA10102-DQB10609 DQA10102-DQB10611 DQA10103-DQB10501 DQA10103-DQB10601 DQA10103-DQB10609 DQA10201-DQB10301 DQA10201-DQB10303 DQA10401-DQB10301 DQA10401-DQB10319 DQA10501-DQB10301 DQA10501-DQB10319 DQA10503-DQB10301 DQA10505-DQB10301 DQA10505-DQB10309 DQA10505-DQB10319 DQA10506-DQB10303 DQA10508-DQB10301 DQA10509-DQB10301 DQA10601-DQB10301
FSPEVIPMFSALSEGATPQDLNT

SEQ ID NO: 3463 - protein, 24 aa, Human immunodeficiency virus 1
  source 1..24: note = HLAs: DRB1_0101 DRB1_0102 DRB1_0401 DRB1_0404 DRB1_0405 DRB1_0408 DRB1_0410 DRB1_0802 DRB1_0804 DRB1_0809 DRB1_0901 DRB1_1001 DRB1_1104 DRB1_1406 DRB1_1501 DRB1_1601 DRB1_1602 DPA10301-DPB10101 DPA10401-DPB10101 DQA10102-DQB10501 DQA10102-DQB10503 DQA10102-DQB10601 DQA10102-DQB10609 DQA10102-DQB10611 DQA10103-DQB10501 DQA10103-DQB10601 DQA10103-DQB10609 DQA10201-DQB10301 DQA10201-DQB10303 DQA10401-DQB10301 DQA10401-DQB10319 DQA10501-DQB10301 DQA10501-DQB10319 DQA10503-DQB10301 DQA10505-DQB10301 DQA10505-DQB10309 DQA10505-DQB10319 DQA10506-DQB10303 DQA10508-DQB10301 DQA10509-DQB10301 DQA10601-DQB10301
FSPEVIPMFSALSEGATPQDLNTM

SEQ ID NO: 3464 - protein, 25 aa, Human immunodeficiency virus 1
  source 1..25: note = HLAs: DRB1_0101 DRB1_0102 DRB1_0401 DRB1_0404 DRB1_0405 DRB1_0408 DRB1_0410 DRB1_0802 DRB1_0804 DRB1_0809 DRB1_0901 DRB1_1001 DRB1_1104 DRB1_1406 DRB1_1501 DRB1_1601 DRB1_1602 DPA10301-DPB10101 DPA10401-DPB10101 DQA10102-DQB10501 DQA10102-DQB10503 DQA10102-DQB10601 DQA10102-DQB10609 DQA10102-DQB10611 DQA10103-DQB10501 DQA10103-DQB10601 DQA10103-DQB10609 DQA10201-DQB10301 DQA10201-DQB10303 DQA10401-DQB10301 DQA10401-DQB10319 DQA10501-DQB10301 DQA10501-DQB10319 DQA10503-DQB10301 DQA10505-DQB10301 DQA10505-DQB10309 DQA10505-DQB10319 DQA10506-DQB10303 DQA10508-DQB10301 DQA10509-DQB10301 DQA10601-DQB10301
FSPEVIPMFSALSEGATPQDLNTML

SEQ ID NO: 3465 - protein, 22 aa, Human immunodeficiency virus 1
  source 1..22: note = HLAs: DRB1_0404 DRB1_0408 DRB1_0410 DRB1_1001 DQA10102-DQB10501
FTIPSINNETPGIRYQYNVLPQ

SEQ ID NO: 3466 - protein, 23 aa, Human immunodeficiency virus 1
  source 1..23: note = HLAs: DRB1_0101 DRB1_0401 DRB1_0404 DRB1_0405 DRB1_0408 DRB1_0410 DRB1_1001 DRB1_1114 DRB1_1302 DRB1_1406 DQA10102-DQB10501
FTIPSINNETPGIRYQYNVLPQG

SEQ ID NO: 3467 - protein, 24 aa, Human immunodeficiency virus 1
  source 1..24: note = HLAs: DRB1_0101 DRB1_0401 DRB1_0404 DRB1_0405 DRB1_0408 DRB1_0410 DRB1_0813 DRB1_1001 DRB1_1114 DRB1_1302 DRB1_1304 DRB1_1406 DRB1_1501 DRB1_1602 DPA10301-DPB10101 DPA10401-DPB10101 DQA10102-DQB10501 DQA10103-DQB10501
FTIPSINNETPGIRYQYNVLPQGW

SEQ ID NO: 3468 - protein, 25 aa, Human immunodeficiency virus 1
  source 1..25: note = HLAs: DRB1_0101 DRB1_0102 DRB1_0401 DRB1_0404 DRB1_0405 DRB1_0408 DRB1_0410 DRB1_0802 DRB1_0809 DRB1_0813 DRB1_1001 DRB1_1102 DRB1_1114 DRB1_1301 DRB1_1302 DRB1_1304 DRB1_1402 DRB1_1406 DRB1_1501 DRB1_1502 DRB1_1602 DPA10301-DPB10101 DPA10301-DPB10201 DPA10301-DPB10202 DPA10301-DPB110601 DPA10301-DPB11801 DPA10401-DPB10101 DQA10102-DQB10501 DQA10102-DQB10503 DQA10103-DQB10501
FTIPSINNETPGIRYQYNVLPQGWK

SEQ ID NO: 3469 - protein, 22 aa, Human immunodeficiency virus 1
  source 1..22: note = HLAs: DPA10103-DPB10101 DPA10103-DPB10201 DPA10103-DPB10202 DPA10103-DPB10401 DPA10103-DPB112601 DPA10103-DPB11501 DPA10103-DPB11601 DPA10103-DPB12301 DPA10103-DPB13101 DPA10103-DPB13401 DPA10103-DPB13901 DPA10103-DPB14801 DPA10104-DPB10101 DPA10104-DPB11501 DPA10105-DPB10101 DPA10105-DPB10401 DPA10106-DPB10101 DPA10201-DPB10101 DPA10202-DPB10101 DPA10301-DPB10101 DPA10301-DPB10201 DPA10301-DPB10202 DPA10301-DPB10401 DPA10301-DPB10402 DPA10301-DPB110501 DPA10301-DPB110601 DPA10301-DPB11801 DPA10301-DPB12301 DPA10301-DPB13901 DPA10301-DPB14001 DPA10301-DPB14901 DPA10301-DPB16501 DPA10301-DPB18001 DPA10401-DPB10101 DPA10401-DPB10201 DPA10401-DPB10202
FTTPDKKHQKEPPFLWMGYELH

SEQ ID NO: 3470 - protein, 23 aa, Human immunodeficiency virus 1
  source 1..23: note = HLAs: DRB1_1001 DPA10103-DPB10101 DPA10103-DPB10201 DPA10103-DPB10202 DPA10103-DPB10401 DPA10103-DPB112601 DPA10103-DPB11501 DPA10103-DPB11601 DPA10103-DPB11901 DPA10103-DPB12301 DPA10103-DPB13101 DPA10103-DPB13401 DPA10103-DPB13901 DPA10103-DPB14001 DPA10103-DPB14101 DPA10103-DPB14801 DPA10103-DPB15001 DPA10104-DPB10101 DPA10104-DPB11501 DPA10105-DPB10101 DPA10105-DPB10401 DPA10105-DPB15001 DPA10106-DPB10101 DPA10201-DPB10101 DPA10201-DPB11501 DPA10202-DPB10101 DPA10202-DPB13101 DPA10301-DPB10101 DPA10301-DPB10201 DPA10301-DPB10202 DPA10301-DPB10401 DPA10301-DPB10402 DPA10301-DPB110501 DPA10301-DPB110601 DPA10301-DPB11801 DPA10301-DPB12301 DPA10301-DPB13901 DPA10301-DPB14001 DPA10301-DPB14901 DPA10301-DPB16501 DPA10301-DPB18001 DPA10401-DPB10101 DPA10401-DPB10201 DPA10401-DPB10202 DPA10401-DPB10501 DQA10102-DQB10501
FTTPDKKHQKEPPFLWMGYELHP

SEQ ID NO: 3471 - protein, 24 aa, Human immunodeficiency virus 1
  source 1..24: note = HLAs: DRB1_1001 DPA10103-DPB10101 DPA10103-DPB10201 DPA10103-DPB10202 DPA10103-DPB10401 DPA10103-DPB112601 DPA10103-DPB11501 DPA10103-DPB11601 DPA10103-DPB11801 DPA10103-DPB11901 DPA10103-DPB12301 DPA10103-DPB13101 DPA10103-DPB13401 DPA10103-DPB13901 DPA10103-DPB14001 DPA10103-DPB14101 DPA10103-DPB14801 DPA10103-DPB15001 DPA10103-DPB15901 DPA10104-DPB10101 DPA10104-DPB11501 DPA10105-DPB10101 DPA10105-DPB10401 DPA10105-DPB11801 DPA10105-DPB15001 DPA10106-DPB10101 DPA10201-DPB10101 DPA10201-DPB11501 DPA10201-DPB11601 DPA10202-DPB10101 DPA10202-DPB10202 DPA10202-DPB110601 DPA10202-DPB11901 DPA10202-DPB13101 DPA10202-DPB16501 DPA10301-DPB10101 DPA10301-DPB10201 DPA10301-DPB10202 DPA10301-DPB10401 DPA10301-DPB10402 DPA10301-DPB110501 DPA10301-DPB110601 DPA10301-DPB11801 DPA10301-DPB12301 DPA10301-DPB13901 DPA10301-DPB14001 DPA10301-DPB14901 DPA10301-DPB15501 DPA10301-DPB16501 DPA10301-DPB17501 DPA10301-DPB18001 DPA10401-DPB10101 DPA10401-DPB10201 DPA10401-DPB10202 DPA10401-DPB10501; note = HLAs: DQA10101-DQB10501 DQA10102-DQB10501 DQA10102-DQB10502 DQA10104-DQB10501 DQA10105-DQB10501
FTTPDKKHQKEPPFLWMGYELHPD

SEQ ID NO: 3472 - protein, 25 aa, Human immunodeficiency virus 1
  source 1..25: note = HLAs: DRB1_1001 DPA10103-DPB10101 DPA10103-DPB10201 DPA10103-DPB10202 DPA10103-DPB10401 DPA10103-DPB10501 DPA10103-DPB112601 DPA10103-DPB11501 DPA10103-DPB11601 DPA10103-DPB11801 DPA10103-DPB11901 DPA10103-DPB12301 DPA10103-DPB13101 DPA10103-DPB13401 DPA10103-DPB13901 DPA10103-DPB14001 DPA10103-DPB14101 DPA10103-DPB14801 DPA10103-DPB15001 DPA10103-DPB15901 DPA10104-DPB10101 DPA10104-DPB11501 DPA10105-DPB10101 DPA10105-DPB10401 DPA10105-DPB11801 DPA10105-DPB15001 DPA10106-DPB10101 DPA10201-DPB10101 DPA10201-DPB10202 DPA10201-DPB110601 DPA10201-DPB11501 DPA10201-DPB11601 DPA10201-DPB11901 DPA10201-DPB13401 DPA10202-DPB10101 DPA10202-DPB10201 DPA10202-DPB10202 DPA10202-DPB10401 DPA10202-DPB110601 DPA10202-DPB11901 DPA10202-DPB13101 DPA10202-DPB16501 DPA10301-DPB10101 DPA10301-DPB10201 DPA10301-DPB10202 DPA10301-DPB10401 DPA10301-DPB10402 DPA10301-DPB110501 DPA10301-DPB110601 DPA10301-DPB11801 DPA10301-DPB12301 DPA10301-DPB13901 DPA10301-DPB14001 DPA10301-DPB14901 DPA10301-DPB15501; note = HLAs: DPA10301-DPB16501 DPA10301-DPB17501 DPA10301-DPB18001 DPA10401-DPB10101 DPA10401-DPB10201 DPA10401-DPB10202 DPA10401-DPB10402 DPA10401-DPB10501 DPA10401-DPB110501 DPA10401-DPB14901 DQA10101-DQB10501 DQA10102-DQB10501 DQA10102-DQB10502 DQA10102-DQB10503 DQA10103-DQB10501 DQA10104-DQB10501 DQA10105-DQB10501
FTTPDKKHQKEPPFLWMGYELHPDK

SEQ ID NO: 3473 - protein, 15 aa, Human immunodeficiency virus 1
  source 1..15: note = HLAs: DRB1_0101 DRB1_1001 DRB1_1304 DPA10103-DPB10101 DPA10103-DPB10201 DPA10103-DPB10202 DPA10103-DPB11501 DPA10103-DPB13401 DPA10103-DPB14001 DPA10103-DPB14801 DPA10104-DPB10101 DPA10104-DPB11501 DPA10105-DPB10101 DPA10201-DPB11501 DPA10202-DPB10101 DPA10202-DPB10202 DPA10202-DPB110601 DPA10202-DPB11901 DPA10202-DPB13101 DPA10301-DPB10101 DPA10301-DPB10201 DPA10301-DPB10202 DPA10301-DPB10401 DPA10301-DPB10402 DPA10301-DPB110501 DPA10301-DPB110601 DPA10301-DPB11801 DPA10301-DPB12301 DPA10301-DPB13901 DPA10301-DPB14001 DPA10301-DPB14901 DPA10301-DPB16501 DPA10301-DPB18001 DPA10401-DPB10101 DPA10401-DPB10201 DPA10401-DPB10202
FVNTPPLVKLWYQLE

SEQ ID NO: 3474 - protein, 13 aa, Human immunodeficiency virus 1
  source 1..13: note = HLAs: DQA10102-DQB10601 DQA10103-DQB10601 DQA10201-DQB10301 DQA10301-DQB10301 DQA10302-DQB10301 DQA10303-DQB10301 DQA10401-DQB10301 DQA10401-DQB10319 DQA10501-DQB10301 DQA10501-DQB10319 DQA10503-DQB10301 DQA10505-DQB10301 DQA10505-DQB10309 DQA10505-DQB10319 DQA10506-DQB10303 DQA10508-DQB10301 DQA10509-DQB10301 DQA10601-DQB10301
FWEVQLGIPHPAG

SEQ ID NO: 3475 - protein, 14 aa, Human immunodeficiency virus 1
  source 1..14: note = HLAs: DRB1_0101 DRB1_0102 DRB1_0901 DRB1_1001 DQA10102-DQB10501 DQA10102-DQB10601 DQA10103-DQB10601 DQA10201-DQB10301 DQA10201-DQB10303 DQA10301-DQB10301 DQA10302-DQB10301 DQA10303-DQB10301 DQA10401-DQB10301 DQA10401-DQB10319 DQA10501-DQB10301 DQA10501-DQB10319 DQA10503-DQB10301 DQA10505-DQB10301 DQA10505-DQB10309 DQA10505-DQB10319 DQA10505-DQB10402 DQA10506-DQB10303 DQA10508-DQB10301 DQA10509-DQB10301 DQA10601-DQB10301
FWEVQLGIPHPAGL

SEQ ID NO: 3476 - protein, 15 aa, Human immunodeficiency virus 1
  source 1..15: note = HLAs: DRB1_0101 DRB1_0102 DRB1_0404 DRB1_0901 DRB1_1001 DRB1_1102 DRB1_1103 DRB1_1301 DRB1_1304 DRB1_1406 DQA10101-DQB10601 DQA10102-DQB10501 DQA10102-DQB10503 DQA10102-DQB10601 DQA10102-DQB10602 DQA10102-DQB10611 DQA10103-DQB10501 DQA10103-DQB10601 DQA10103-DQB10602 DQA10201-DQB10301 DQA10201-DQB10303 DQA10301-DQB10301 DQA10301-DQB10304 DQA10302-DQB10301 DQA10302-DQB10304 DQA10303-DQB10301 DQA10303-DQB10304 DQA10401-DQB10301 DQA10401-DQB10319 DQA10501-DQB10301 DQA10501-DQB10319 DQA10503-DQB10301 DQA10505-DQB10301 DQA10505-DQB10309 DQA10505-DQB10319 DQA10505-DQB10402 DQA10506-DQB10303 DQA10508-DQB10301 DQA10509-DQB10301 DQA10601-DQB10301
FWEVQLGIPHPAGLK

SEQ ID NO: 3477 - protein, 16 aa, Human immunodeficiency virus 1
  source 1..16: note = HLAs: DRB1_0101 DRB1_0102 DRB1_0901 DRB1_1001 DQA10101-DQB10601 DQA10102-DQB10501 DQA10102-DQB10503 DQA10102-DQB10601 DQA10102-DQB10602 DQA10102-DQB10611 DQA10103-DQB10501 DQA10103-DQB10601 DQA10103-DQB10602 DQA10201-DQB10301 DQA10201-DQB10303 DQA10301-DQB10301 DQA10301-DQB10304 DQA10302-DQB10301 DQA10302-DQB10304 DQA10303-DQB10301 DQA10303-DQB10304 DQA10401-DQB10301 DQA10401-DQB10319 DQA10501-DQB10301 DQA10501-DQB10319 DQA10503-DQB10301 DQA10505-DQB10301 DQA10505-DQB10309 DQA10505-DQB10319 DQA10505-DQB10402 DQA10506-DQB10303 DQA10508-DQB10301 DQA10509-DQB10301 DQA10601-DQB10301
FWEVQLGIPHPAGLKK

SEQ ID NO: 3478 - protein, 17 aa, Human immunodeficiency virus 1
  source 1..17: note = HLAs: DRB1_0101 DRB1_0102 DRB1_0901 DRB1_1001 DQA10101-DQB10601 DQA10102-DQB10501 DQA10102-DQB10503 DQA10102-DQB10601 DQA10103-DQB10601 DQA10103-DQB10602 DQA10201-DQB10301 DQA10201-DQB10303 DQA10301-DQB10301 DQA10302-DQB10301 DQA10303-DQB10301 DQA10401-DQB10301 DQA10401-DQB10319 DQA10501-DQB10301 DQA10501-DQB10319 DQA10503-DQB10301 DQA10505-DQB10301 DQA10505-DQB10309 DQA10505-DQB10319 DQA10505-DQB10402 DQA10506-DQB10303 DQA10508-DQB10301 DQA10509-DQB10301 DQA10601-DQB10301
FWEVQLGIPHPAGLKKK

SEQ ID NO: 3479 - protein, 18 aa, Human immunodeficiency virus 1
  source 1..18: note = HLAs: DRB1_1001 DQA10102-DQB10601 DQA10103-DQB10601 DQA10201-DQB10301 DQA10201-DQB10303 DQA10301-DQB10301 DQA10302-DQB10301 DQA10303-DQB10301 DQA10401-DQB10301 DQA10401-DQB10319 DQA10501-DQB10301 DQA10501-DQB10319 DQA10503-DQB10301 DQA10505-DQB10301 DQA10505-DQB10309 DQA10505-DQB10319 DQA10506-DQB10303 DQA10508-DQB10301 DQA10509-DQB10301 DQA10601-DQB10301
FWEVQLGIPHPAGLKKKK

SEQ ID NO: 3480 - protein, 19 aa, Human immunodeficiency virus 1
  source 1..19: note = HLAs: DRB1_0101 DRB1_0102 DRB1_1001 DQA10102-DQB10501 DQA10102-DQB10601 DQA10103-DQB10601 DQA10201-DQB10301 DQA10201-DQB10303 DQA10301-DQB10301 DQA10302-DQB10301 DQA10303-DQB10301 DQA10401-DQB10301 DQA10401-DQB10319 DQA10501-DQB10301 DQA10501-DQB10319 DQA10503-DQB10301 DQA10505-DQB10301 DQA10505-DQB10309 DQA10505-DQB10319 DQA10505-DQB10402 DQA10506-DQB10303 DQA10508-DQB10301 DQA10509-DQB10301 DQA10601-DQB10301
FWEVQLGIPHPAGLKKKKS

SEQ ID NO: 3481 - protein, 20 aa, Human immunodeficiency virus 1
  source 1..20: note = HLAs: DRB1_0101 DRB1_0102 DRB1_0901 DRB1_1001 DQA10101-DQB10601 DQA10102-DQB10501 DQA10102-DQB10503 DQA10102-DQB10601 DQA10103-DQB10501 DQA10103-DQB10601 DQA10103-DQB10602 DQA10201-DQB10301 DQA10201-DQB10303 DQA10301-DQB10301 DQA10302-DQB10301 DQA10303-DQB10301 DQA10401-DQB10301 DQA10401-DQB10319 DQA10501-DQB10301 DQA10501-DQB10319 DQA10503-DQB10301 DQA10505-DQB10301 DQA10505-DQB10309 DQA10505-DQB10319 DQA10505-DQB10402 DQA10506-DQB10303 DQA10508-DQB10301 DQA10509-DQB10301 DQA10601-DQB10301
FWEVQLGIPHPAGLKKKKSV

SEQ ID NO: 3482 - protein, 21 aa, Human immunodeficiency virus 1
  source 1..21: note = HLAs: DRB1_0101 DRB1_0102 DRB1_1001 DQA10102-DQB10501 DQA10102-DQB10601 DQA10103-DQB10601 DQA10201-DQB10301 DQA10301-DQB10301 DQA10302-DQB10301 DQA10303-DQB10301 DQA10501-DQB10301 DQA10501-DQB10319 DQA10503-DQB10301 DQA10505-DQB10301 DQA10505-DQB10309 DQA10505-DQB10319 DQA10505-DQB10402 DQA10506-DQB10303 DQA10508-DQB10301 DQA10509-DQB10301 DQA10601-DQB10301
FWEVQLGIPHPAGLKKKKSVT

SEQ ID NO: 3483 - protein, 22 aa, Human immunodeficiency virus 1
  source 1..22: note = HLAs: DRB1_0101 DRB1_0102 DRB1_1001 DRB1_1102 DRB1_1103 DRB1_1301 DRB1_1304 DQA10102-DQB10501 DQA10102-DQB10601 DQA10103-DQB10601 DQA10201-DQB10301 DQA10301-DQB10301 DQA10302-DQB10301 DQA10303-DQB10301 DQA10501-DQB10301 DQA10501-DQB10319 DQA10503-DQB10301 DQA10505-DQB10301 DQA10505-DQB10309 DQA10505-DQB10319 DQA10505-DQB10402 DQA10506-DQB10303 DQA10508-DQB10301 DQA10509-DQB10301 DQA10601-DQB10301
FWEVQLGIPHPAGLKKKKSVTV

SEQ ID NO: 3484 - protein, 23 aa, Human immunodeficiency virus 1
  source 1..23: note = HLAs: DRB1_0101 DRB1_0102 DRB1_1001 DRB1_1102 DRB1_1103 DRB1_1104 DRB1_1301 DRB1_1304 DQA10102-DQB10501 DQA10102-DQB10601 DQA10103-DQB10601 DQA10201-DQB10301 DQA10301-DQB10301 DQA10302-DQB10301 DQA10303-DQB10301 DQA10501-DQB10301 DQA10501-DQB10319 DQA10503-DQB10301 DQA10505-DQB10301 DQA10505-DQB10309 DQA10505-DQB10319 DQA10505-DQB10402 DQA10506-DQB10303 DQA10508-DQB10301 DQA10509-DQB10301 DQA10601-DQB10301
FWEVQLGIPHPAGLKKKKSVTVL

SEQ ID NO: 3485 - protein, 24 aa, Human immunodeficiency virus 1
  source 1..24: note = HLAs: DRB1_0101 DRB1_0102 DRB1_1001 DRB1_1102 DRB1_1103 DRB1_1104 DRB1_1301 DRB1_1304 DRB1_1406 DQA10102-DQB10501 DQA10102-DQB10601 DQA10103-DQB10601 DQA10201-DQB10301 DQA10301-DQB10301 DQA10302-DQB10301 DQA10303-DQB10301 DQA10501-DQB10301 DQA10501-DQB10319 DQA10503-DQB10301 DQA10505-DQB10301 DQA10505-DQB10309 DQA10505-DQB10319 DQA10505-DQB10402 DQA10506-DQB10303 DQA10508-DQB10301 DQA10509-DQB10301 DQA10601-DQB10301
FWEVQLGIPHPAGLKKKKSVTVLD

SEQ ID NO: 3486 - protein, 25 aa, Human immunodeficiency virus 1
  source 1..25: note = HLAs: DRB1_0101 DRB1_0102 DRB1_0701 DRB1_0804 DRB1_0806 DRB1_0901 DRB1_1001 DRB1_1102 DRB1_1103 DRB1_1104 DRB1_1114 DRB1_1301 DRB1_1302 DRB1_1304 DRB1_1406 DPA10103-DPB10101 DPA10103-DPB15001 DPA10104-DPB10101 DPA10105-DPB10101 DPA10105-DPB15001 DPA10202-DPB10101 DPA10301-DPB10101 DPA10301-DPB10201 DPA10301-DPB10202 DPA10301-DPB110601 DPA10301-DPB11801 DPA10301-DPB16501 DPA10401-DPB10101 DPA10401-DPB10501 DQA10102-DQB10501 DQA10102-DQB10601 DQA10103-DQB10601 DQA10201-DQB10301 DQA10201-DQB10303 DQA10301-DQB10301 DQA10302-DQB10301 DQA10303-DQB10301 DQA10501-DQB10301 DQA10501-DQB10319 DQA10503-DQB10301 DQA10505-DQB10301 DQA10505-DQB10309 DQA10505-DQB10319 DQA10505-DQB10402 DQA10506-DQB10303 DQA10508-DQB10301 DQA10509-DQB10301 DQA10601-DQB10301
FWEVQLGIPHPAGLKKKKSVTVLDV

SEQ ID NO: 3487 - protein, 15 aa, Human immunodeficiency virus 1
  source 1..15: note = HLAs: DRB1_0101 DRB1_0404 DRB1_0408 DRB1_1001 DQA10201-DQB10301
GATLEEMMTACQGVG

SEQ ID NO: 3488 - protein, 16 aa, Human immunodeficiency virus 1
  source 1..16: note = HLAs: DRB1_1001 DQA10201-DQB10301
GATLEEMMTACQGVGG

SEQ ID NO: 3489 - protein, 17 aa, Human immunodeficiency virus 1
  source 1..17: note = HLAs: DRB1_1001
GATLEEMMTACQGVGGP

SEQ ID NO: 3490 - protein, 15 aa, Human immunodeficiency virus 1
  source 1..15: note = HLAs: DRB1_0404
GATPQDLNTMLNTVG

SEQ ID NO: 3491 - protein, 16 aa, Human immunodeficiency virus 1
  source 1..16: note = HLAs: DRB1_0404
GATPQDLNTMLNTVGG

SEQ ID NO: 3492 - protein, 17 aa, Human immunodeficiency virus 1
  source 1..17: note = HLAs: DRB1_0404
GATPQDLNTMLNTVGGH

SEQ ID NO: 3493 - protein, 19 aa, Human immunodeficiency virus 1
  source 1..19: note = HLAs: DRB1_0404 DQA10102-DQB10501
GATPQDLNTMLNTVGGHQA

SEQ ID NO: 3494 - protein, 20 aa, Human immunodeficiency virus 1
  source 1..20: note = HLAs: DRB1_0101 DRB1_0404 DRB1_0408 DRB1_1001 DQA10102-DQB10501 DQA10103-DQB10601
GATPQDLNTMLNTVGGHQAA

SEQ ID NO: 3495 - protein, 21 aa, Human immunodeficiency virus 1
  source 1..21: note = HLAs: DRB1_0101 DRB1_0404 DRB1_0408 DRB1_1001 DQA10102-DQB10501
GATPQDLNTMLNTVGGHQAAM

SEQ ID NO: 3496 - protein, 22 aa, Human immunodeficiency virus 1
  source 1..22: note = HLAs: DRB1_0101 DRB1_0404 DRB1_0408 DRB1_1001 DQA10102-DQB10501 DQA10103-DQB10601
GATPQDLNTMLNTVGGHQAAMQ

SEQ ID NO: 3497 - protein, 23 aa, Human immunodeficiency virus 1
  source 1..23: note = HLAs: DRB1_0101 DRB1_0404 DRB1_0408 DRB1_1001 DQA10102-DQB10501 DQA10102-DQB10601 DQA10103-DQB10601 DQA10201-DQB10301
GATPQDLNTMLNTVGGHQAAMQM

SEQ ID NO: 3498 - protein, 24 aa, Human immunodeficiency virus 1
  source 1..24: note = HLAs: DRB1_0101 DRB1_0404 DRB1_0408 DRB1_1001 DQA10102-DQB10501 DQA10102-DQB10601 DQA10103-DQB10601 DQA10103-DQB10609 DQA10201-DQB10301 DQA10201-DQB10303
GATPQDLNTMLNTVGGHQAAMQML

SEQ ID NO: 3499 - protein, 25 aa, Human immunodeficiency virus 1
  source 1..25: note = HLAs: DRB1_0101 DRB1_0404 DRB1_0408 DRB1_0410 DRB1_1001 DQA10102-DQB10501 DQA10102-DQB10601 DQA10103-DQB10601 DQA10103-DQB10609 DQA10201-DQB10301 DQA10201-DQB10303 DQA10505-DQB10402
GATPQDLNTMLNTVGGHQAAMQMLK

SEQ ID NO: 3500 - protein, 14 aa, Human immunodeficiency virus 1
  source 1..14: note = HLAs: DPA10301-DPB10101 DQA10102-DQB10501
GCTLNFPISPIETV

SEQ ID NO: 3501 - protein, 15 aa, Human immunodeficiency virus 1
  source 1..15: note = HLAs: DRB1_1001 DPA10301-DPB10101 DPA10301-DPB10201 DPA10401-DPB10101 DQA10102-DQB10501
GCTLNFPISPIETVP

SEQ ID NO: 3502 - protein, 16 aa, Human immunodeficiency virus 1
  source 1..16: note = HLAs: DRB1_0701 DRB1_1001 DPA10202-DPB10101 DPA10301-DPB10101 DPA10301-DPB10201 DPA10301-DPB10202 DPA10301-DPB10401 DPA10301-DPB12301 DPA10301-DPB13901 DPA10401-DPB10101 DQA10102-DQB10501 DQA10102-DQB10601 DQA10102-DQB10609 DQA10103-DQB10501 DQA10103-DQB10601 DQA10103-DQB10609 DQA10201-DQB10301 DQA10201-DQB10303 DQA10505-DQB10402 DQA10506-DQB10303
GCTLNFPISPIETVPV

SEQ ID NO: 3503 - protein, 17 aa, Human immunodeficiency virus 1
  source 1..17: note = HLAs: DRB1_0101 DRB1_0102 DRB1_0404 DRB1_0408 DRB1_0410 DRB1_0701 DRB1_0813 DRB1_0901 DRB1_1001 DRB1_1114 DRB1_1302 DRB1_1404 DRB1_1406 DRB1_1501 DRB1_1602 DPA10103-DPB11501 DPA10104-DPB11501 DPA10202-DPB10101 DPA10301-DPB10101 DPA10301-DPB10201 DPA10301-DPB10202 DPA10301-DPB10401 DPA10301-DPB11801 DPA10301-DPB12301 DPA10301-DPB13901 DPA10301-DPB14001 DPA10301-DPB16501 DPA10401-DPB10101 DQA10102-DQB10501 DQA10102-DQB10601 DQA10102-DQB10609 DQA10103-DQB10501 DQA10103-DQB10601 DQA10103-DQB10609 DQA10201-DQB10301 DQA10505-DQB10402
GCTLNFPISPIETVPVK

SEQ ID NO: 3504 - protein, 18 aa, Human immunodeficiency virus 1
  source 1..18: note = HLAs: DRB1_0701 DRB1_0813 DPA10301-DPB10101 DPA10401-DPB10101 DQA10102-DQB10501 DQA10102-DQB10609 DQA10103-DQB10609
GCTLNFPISPIETVPVKL

SEQ ID NO: 3505 - protein, 19 aa, Human immunodeficiency virus 1
  source 1..19: note = HLAs: DRB1_0101 DRB1_0102 DRB1_0401 DRB1_0404 DRB1_0405 DRB1_0408 DRB1_0410 DRB1_0701 DRB1_0802 DRB1_0809 DRB1_0813 DRB1_0901 DRB1_1001 DRB1_1102 DRB1_1114 DRB1_1201 DRB1_1301 DRB1_1302 DRB1_1304 DRB1_1401 DRB1_1402 DRB1_1404 DRB1_1406 DRB1_1454 DRB1_1501 DRB1_1502 DRB1_1602 DPA10103-DPB10101 DPA10103-DPB11501 DPA10104-DPB10101 DPA10104-DPB11501 DPA10105-DPB10101 DPA10202-DPB10101 DPA10202-DPB13101 DPA10301-DPB10101 DPA10301-DPB10201 DPA10301-DPB10202 DPA10301-DPB10401 DPA10301-DPB110601 DPA10301-DPB11801 DPA10301-DPB12301 DPA10301-DPB13901 DPA10301-DPB14001 DPA10301-DPB16501 DPA10401-DPB10101 DPA10401-DPB10202 DQA10102-DQB10501 DQA10102-DQB10503 DQA10102-DQB10601 DQA10102-DQB10609 DQA10103-DQB10501 DQA10103-DQB10601 DQA10103-DQB10604 DQA10103-DQB10609 DQA10201-DQB10301 DQA10201-DQB10303 DQA10505-DQB10402 DQA10506-DQB10303
GCTLNFPISPIETVPVKLK

SEQ ID NO: 3506 - protein, 20 aa, Human immunodeficiency virus 1
  source 1..20: note = HLAs: DRB1_0101 DRB1_0102 DRB1_0401 DRB1_0404 DRB1_0405 DRB1_0408 DRB1_0410 DRB1_0701 DRB1_0801 DRB1_0802 DRB1_0803 DRB1_0804 DRB1_0806 DRB1_0809 DRB1_0813 DRB1_0901 DRB1_1001 DRB1_1102 DRB1_1103 DRB1_1114 DRB1_1201 DRB1_1301 DRB1_1302 DRB1_1304 DRB1_1401 DRB1_1402 DRB1_1403 DRB1_1404 DRB1_1406 DRB1_1454 DRB1_1501 DRB1_1502 DRB1_1503 DRB1_1601 DRB1_1602 DPA10103-DPB10101 DPA10103-DPB11501 DPA10103-DPB13101 DPA10103-DPB15001 DPA10104-DPB10101 DPA10104-DPB11501 DPA10105-DPB10101 DPA10105-DPB15001 DPA10106-DPB10101 DPA10201-DPB10101 DPA10201-DPB11501 DPA10202-DPB10101 DPA10202-DPB10201 DPA10202-DPB10202 DPA10202-DPB10501 DPA10202-DPB110601 DPA10202-DPB11801 DPA10202-DPB11901 DPA10202-DPB13101 DPA10202-DPB13801 DPA10202-DPB15501 DPA10202-DPB16501 DPA10301-DPB10101 DPA10301-DPB10201 DPA10301-DPB10202 DPA10301-DPB10401 DPA10301-DPB10402 DPA10301-DPB110501 DPA10301-DPB110601 DPA10301-DPB11801 DPA10301-DPB12301 DPA10301-DPB13901 DPA10301-DPB14001 DPA10301-DPB14901 DPA10301-DPB15501; note = HLAs: DPA10301-DPB16501 DPA10301-DPB17501 DPA10301-DPB18001 DPA10401-DPB10101 DPA10401-DPB10201 DPA10401-DPB10202 DPA10401-DPB10501 DPA10401-DPB11401 DQA10102-DQB10501 DQA10102-DQB10503 DQA10102-DQB10601 DQA10102-DQB10609 DQA10103-DQB10501 DQA10103-DQB10601 DQA10103-DQB10602 DQA10103-DQB10604 DQA10103-DQB10608 DQA10103-DQB10609 DQA10201-DQB10301 DQA10201-DQB10303 DQA10505-DQB10402 DQA10506-DQB10303
GCTLNFPISPIETVPVKLKP

SEQ ID NO: 3507 - protein, 21 aa, Human immunodeficiency virus 1
  source 1..21: note = HLAs: DRB1_0101 DRB1_0102 DRB1_0401 DRB1_0404 DRB1_0405 DRB1_0408 DRB1_0410 DRB1_0701 DRB1_0802 DRB1_0803 DRB1_0804 DRB1_0806 DRB1_0809 DRB1_0813 DRB1_0901 DRB1_1001 DRB1_1102 DRB1_1114 DRB1_1201 DRB1_1301 DRB1_1302 DRB1_1304 DRB1_1401 DRB1_1402 DRB1_1404 DRB1_1406 DRB1_1454 DRB1_1501 DRB1_1502 DRB1_1602 DPA10103-DPB10101 DPA10103-DPB11501 DPA10104-DPB10101 DPA10104-DPB11501 DPA10105-DPB10101 DPA10202-DPB10101 DPA10301-DPB10101 DPA10301-DPB10201 DPA10301-DPB10202 DPA10301-DPB10401 DPA10301-DPB110601 DPA10301-DPB11801 DPA10301-DPB12301 DPA10301-DPB13901 DPA10301-DPB14001 DPA10301-DPB16501 DPA10401-DPB10101 DQA10102-DQB10501 DQA10102-DQB10601 DQA10102-DQB10609 DQA10103-DQB10501 DQA10103-DQB10601 DQA10103-DQB10609 DQA10505-DQB10402
GCTLNFPISPIETVPVKLKPG

SEQ ID NO: 3508 - protein, 22 aa, Human immunodeficiency virus 1
  source 1..22: note = HLAs: DRB1_0101 DRB1_0102 DRB1_0401 DRB1_0404 DRB1_0405 DRB1_0408 DRB1_0410 DRB1_0701 DRB1_0801 DRB1_0802 DRB1_0803 DRB1_0804 DRB1_0806 DRB1_0809 DRB1_0813 DRB1_0901 DRB1_1001 DRB1_1102 DRB1_1103 DRB1_1114 DRB1_1201 DRB1_1301 DRB1_1302 DRB1_1304 DRB1_1401 DRB1_1402 DRB1_1404 DRB1_1406 DRB1_1454 DRB1_1501 DRB1_1502 DRB1_1602 DPA10103-DPB10101 DPA10103-DPB11501 DPA10104-DPB10101 DPA10104-DPB11501 DPA10105-DPB10101 DPA10202-DPB10101 DPA10202-DPB13101 DPA10301-DPB10101 DPA10301-DPB10201 DPA10301-DPB10202 DPA10301-DPB10401 DPA10301-DPB110601 DPA10301-DPB11801 DPA10301-DPB12301 DPA10301-DPB13901 DPA10301-DPB14001 DPA10301-DPB16501 DPA10401-DPB10101 DQA10102-DQB10501 DQA10102-DQB10601 DQA10102-DQB10609 DQA10103-DQB10501 DQA10103-DQB10601 DQA10103-DQB10609 DQA10505-DQB10402
GCTLNFPISPIETVPVKLKPGM

SEQ ID NO: 3509 - protein, 23 aa, Human immunodeficiency virus 1
  source 1..23: note = HLAs: DRB1_0101 DRB1_0102 DRB1_0401 DRB1_0404 DRB1_0405 DRB1_0408 DRB1_0410 DRB1_0701 DRB1_0801 DRB1_0802 DRB1_0803 DRB1_0804 DRB1_0806 DRB1_0809 DRB1_0813 DRB1_0901 DRB1_1001 DRB1_1102 DRB1_1103 DRB1_1104 DRB1_1114 DRB1_1201 DRB1_1301 DRB1_1302 DRB1_1304 DRB1_1401 DRB1_1402 DRB1_1404 DRB1_1406 DRB1_1454 DRB1_1501 DRB1_1502 DRB1_1602 DPA10103-DPB10101 DPA10103-DPB11501 DPA10104-DPB10101 DPA10104-DPB11501 DPA10105-DPB10101 DPA10202-DPB10101 DPA10202-DPB13101 DPA10301-DPB10101 DPA10301-DPB10201 DPA10301-DPB10202 DPA10301-DPB10401 DPA10301-DPB110601 DPA10301-DPB11801 DPA10301-DPB12301 DPA10301-DPB13901 DPA10301-DPB14001 DPA10301-DPB16501 DPA10401-DPB10101 DQA10102-DQB10501 DQA10102-DQB10601 DQA10102-DQB10609 DQA10103-DQB10501 DQA10103-DQB10601 DQA10103-DQB10609 DQA10505-DQB10402
GCTLNFPISPIETVPVKLKPGMD

SEQ ID NO: 3510 - protein, 24 aa, Human immunodeficiency virus 1
  source 1..24: note = HLAs: DRB1_0101 DRB1_0102 DRB1_0401 DRB1_0404 DRB1_0405 DRB1_0408 DRB1_0410 DRB1_0701 DRB1_0801 DRB1_0802 DRB1_0803 DRB1_0804 DRB1_0806 DRB1_0809 DRB1_0813 DRB1_0901 DRB1_1001 DRB1_1102 DRB1_1103 DRB1_1104 DRB1_1114 DRB1_1201 DRB1_1301 DRB1_1302 DRB1_1304 DRB1_1401 DRB1_1402 DRB1_1404 DRB1_1406 DRB1_1454 DRB1_1501 DRB1_1502 DRB1_1602 DPA10103-DPB10101 DPA10103-DPB11501 DPA10104-DPB10101 DPA10104-DPB11501 DPA10105-DPB10101 DPA10202-DPB10101 DPA10202-DPB13101 DPA10301-DPB10101 DPA10301-DPB10201 DPA10301-DPB10202 DPA10301-DPB10401 DPA10301-DPB110601 DPA10301-DPB11801 DPA10301-DPB12301 DPA10301-DPB13901 DPA10301-DPB14001 DPA10301-DPB16501 DPA10401-DPB10101 DQA10102-DQB10501 DQA10102-DQB10601 DQA10102-DQB10609 DQA10103-DQB10501 DQA10103-DQB10601 DQA10103-DQB10609 DQA10505-DQB10402
GCTLNFPISPIETVPVKLKPGMDG

SEQ ID NO: 3511 - protein, 25 aa, Human immunodeficiency virus 1
  source 1..25: note = HLAs: DRB1_0101 DRB1_0102 DRB1_0401 DRB1_0404 DRB1_0405 DRB1_0408 DRB1_0410 DRB1_0701 DRB1_0801 DRB1_0802 DRB1_0803 DRB1_0804 DRB1_0806 DRB1_0809 DRB1_0813 DRB1_0901 DRB1_1001 DRB1_1102 DRB1_1103 DRB1_1104 DRB1_1114 DRB1_1201 DRB1_1301 DRB1_1302 DRB1_1304 DRB1_1401 DRB1_1402 DRB1_1404 DRB1_1406 DRB1_1454 DRB1_1501 DRB1_1502 DRB1_1602 DPA10103-DPB10101 DPA10103-DPB11501 DPA10104-DPB10101 DPA10104-DPB11501 DPA10105-DPB10101 DPA10202-DPB10101 DPA10202-DPB13101 DPA10301-DPB10101 DPA10301-DPB10201 DPA10301-DPB10202 DPA10301-DPB10401 DPA10301-DPB110601 DPA10301-DPB11801 DPA10301-DPB12301 DPA10301-DPB13901 DPA10301-DPB14001 DPA10301-DPB16501 DPA10401-DPB10101 DQA10102-DQB10501 DQA10102-DQB10601 DQA10102-DQB10609 DQA10103-DQB10501 DQA10103-DQB10601 DQA10103-DQB10609 DQA10505-DQB10402
GCTLNFPISPIETVPVKLKPGMDGP

SEQ ID NO: 3512 - protein, 13 aa, Human immunodeficiency virus 1
  source 1..13: note = HLAs: DPA10103-DPB11501 DPA10104-DPB11501 DPA10301-DPB10101 DPA10301-DPB10201 DPA10301-DPB10202 DPA10301-DPB110601 DPA10301-DPB16501 DPA10401-DPB10101
GEIYKRWIILGLN

SEQ ID NO: 3513 - protein, 14 aa, Human immunodeficiency virus 1
  source 1..14: note = HLAs: DRB1_0804 DRB1_0806 DRB1_1001 DRB1_1501 DPA10103-DPB10101 DPA10103-DPB10201 DPA10103-DPB10202 DPA10103-DPB10301 DPA10103-DPB10501 DPA10103-DPB10601 DPA10103-DPB11101 DPA10103-DPB112401 DPA10103-DPB11401 DPA10103-DPB11501 DPA10103-DPB11601 DPA10103-DPB11901 DPA10103-DPB12001 DPA10103-DPB12901 DPA10103-DPB13101 DPA10103-DPB13401 DPA10103-DPB14101 DPA10103-DPB14801 DPA10103-DPB15001 DPA10103-DPB15501 DPA10104-DPB10101 DPA10104-DPB10301 DPA10104-DPB11501 DPA10105-DPB10101 DPA10105-DPB10301 DPA10105-DPB15001 DPA10201-DPB110601 DPA10201-DPB11501 DPA10201-DPB11601 DPA10201-DPB11901 DPA10202-DPB10101 DPA10202-DPB10501 DPA10202-DPB110601 DPA10202-DPB11101 DPA10202-DPB11901 DPA10202-DPB13801 DPA10202-DPB15501 DPA10301-DPB10101 DPA10301-DPB10201 DPA10301-DPB10202 DPA10301-DPB10301 DPA10301-DPB10401 DPA10301-DPB110601 DPA10301-DPB11101 DPA10301-DPB11701 DPA10301-DPB11801 DPA10301-DPB12301 DPA10301-DPB13901 DPA10301-DPB14001 DPA10301-DPB15501 DPA10301-DPB16501 DPA10401-DPB10101; note = HLAs: DPA10401-DPB10201 DPA10401-DPB10202 DPA10401-DPB10301 DPA10401-DPB10501 DPA10401-DPB11301 DPA10401-DPB113301 DPA10401-DPB11401 DQA10102-DQB10501 DQA10103-DQB10501
GEIYKRWIILGLNK

SEQ ID NO: 3514 - protein, 15 aa, Human immunodeficiency virus 1
  source 1..15: note = HLAs: DRB1_0101 DRB1_0102 DRB1_0401 DRB1_0404 DRB1_0405 DRB1_0408 DRB1_0410 DRB1_0701 DRB1_0801 DRB1_0802 DRB1_0803 DRB1_0804 DRB1_0806 DRB1_0809 DRB1_0813 DRB1_0901 DRB1_1001 DRB1_1101 DRB1_1102 DRB1_1103 DRB1_1104 DRB1_1114 DRB1_1201 DRB1_1202 DRB1_1301 DRB1_1302 DRB1_1304 DRB1_1305 DRB1_1312 DRB1_1401 DRB1_1402 DRB1_1404 DRB1_1406 DRB1_1454 DRB1_1501 DRB1_1502 DRB1_1503 DRB1_1601 DRB1_1602 DPA10103-DPB10101 DPA10103-DPB10201 DPA10103-DPB10202 DPA10103-DPB10301 DPA10103-DPB10401 DPA10103-DPB10402 DPA10103-DPB10501 DPA10103-DPB10601 DPA10103-DPB10901 DPA10103-DPB11001 DPA10103-DPB110501 DPA10103-DPB11101 DPA10103-DPB112401 DPA10103-DPB112601 DPA10103-DPB11301 DPA10103-DPB113101 DPA10103-DPB113301 DPA10103-DPB11401 DPA10103-DPB11501 DPA10103-DPB11601 DPA10103-DPB11701 DPA10103-DPB11801 DPA10103-DPB11901 DPA10103-DPB12001 DPA10103-DPB12101 DPA10103-DPB12301 DPA10103-DPB12901 DPA10103-DPB13001 DPA10103-DPB13101 DPA10103-DPB13401 DPA10103-DPB13901 DPA10103-DPB14001 DPA10103-DPB14101; note = HLAs: DPA10103-DPB14801 DPA10103-DPB14901 DPA10103-DPB15001 DPA10103-DPB15101 DPA10103-DPB15501 DPA10103-DPB15901 DPA10103-DPB18001 DPA10104-DPB10101 DPA10104-DPB10301 DPA10104-DPB11001 DPA10104-DPB11301 DPA10104-DPB11501 DPA10105-DPB10101 DPA10105-DPB10301 DPA10105-DPB10401 DPA10105-DPB11801 DPA10105-DPB15001 DPA10106-DPB10101 DPA10106-DPB11101 DPA10201-DPB10101 DPA10201-DPB10201 DPA10201-DPB10202 DPA10201-DPB10301 DPA10201-DPB10501 DPA10201-DPB10601 DPA10201-DPB110601 DPA10201-DPB11101 DPA10201-DPB11301 DPA10201-DPB113101 DPA10201-DPB113301 DPA10201-DPB11501 DPA10201-DPB11601 DPA10201-DPB11701 DPA10201-DPB11801 DPA10201-DPB11901 DPA10201-DPB13001 DPA10201-DPB13401 DPA10201-DPB14501 DPA10201-DPB15501 DPA10201-DPB19101 DPA10202-DPB10101 DPA10202-DPB10201 DPA10202-DPB10202 DPA10202-DPB10301 DPA10202-DPB10401 DPA10202-DPB10501 DPA10202-DPB10901 DPA10202-DPB110001 DPA10202-DPB110601 DPA10202-DPB11101 DPA10202-DPB11301 DPA10202-DPB113101 DPA10202-DPB11701 DPA10202-DPB11801; note = HLAs: DPA10202-DPB11901 DPA10202-DPB12101 DPA10202-DPB12901 DPA10202-DPB13001 DPA10202-DPB13101 DPA10202-DPB13801 DPA10202-DPB14501 DPA10202-DPB15501 DPA10202-DPB16501 DPA10202-DPB18501 DPA10301-DPB10101 DPA10301-DPB10201 DPA10301-DPB10202 DPA10301-DPB10301 DPA10301-DPB10401 DPA10301-DPB10402 DPA10301-DPB10901 DPA10301-DPB110501 DPA10301-DPB110601 DPA10301-DPB11101 DPA10301-DPB11301 DPA10301-DPB11701 DPA10301-DPB11801 DPA10301-DPB12301 DPA10301-DPB13901 DPA10301-DPB14001 DPA10301-DPB14901 DPA10301-DPB15501 DPA10301-DPB16501 DPA10301-DPB17501 DPA10301-DPB18001 DPA10401-DPB10101 DPA10401-DPB10201 DPA10401-DPB10202 DPA10401-DPB10301 DPA10401-DPB10402 DPA10401-DPB10501 DPA10401-DPB110501 DPA10401-DPB11301 DPA10401-DPB113301 DPA10401-DPB11401 DPA10401-DPB14901 DQA10102-DQB10501 DQA10103-DQB10501 DQA10505-DQB10402
GEIYKRWIILGLNKI

SEQ ID NO: 3515 - protein, 16 aa, Human immunodeficiency virus 1
  source 1..16: note = HLAs: DRB1_0101 DRB1_0102 DRB1_0401 DRB1_0404 DRB1_0405 DRB1_0408 DRB1_0410 DRB1_0701 DRB1_0801 DRB1_0802 DRB1_0803 DRB1_0804 DRB1_0806 DRB1_0809 DRB1_0813 DRB1_0901 DRB1_1001 DRB1_1101 DRB1_1102 DRB1_1103 DRB1_1104 DRB1_1114 DRB1_1201 DRB1_1301 DRB1_1302 DRB1_1304 DRB1_1305 DRB1_1312 DRB1_1401 DRB1_1402 DRB1_1403 DRB1_1404 DRB1_1406 DRB1_1407 DRB1_1454 DRB1_1501 DRB1_1502 DRB1_1503 DRB1_1601 DRB1_1602 DPA10103-DPB10101 DPA10103-DPB10201 DPA10103-DPB10202 DPA10103-DPB10301 DPA10103-DPB10401 DPA10103-DPB10501 DPA10103-DPB10601 DPA10103-DPB10901 DPA10103-DPB11001 DPA10103-DPB11101 DPA10103-DPB112401 DPA10103-DPB112601 DPA10103-DPB11301 DPA10103-DPB113101 DPA10103-DPB113301 DPA10103-DPB11401 DPA10103-DPB11501 DPA10103-DPB11601 DPA10103-DPB11701 DPA10103-DPB11801 DPA10103-DPB11901 DPA10103-DPB12001 DPA10103-DPB12101 DPA10103-DPB12301 DPA10103-DPB12901 DPA10103-DPB13001 DPA10103-DPB13101 DPA10103-DPB13401 DPA10103-DPB13901 DPA10103-DPB14001 DPA10103-DPB14101 DPA10103-DPB14801; note = HLAs: DPA10103-DPB15001 DPA10103-DPB15501 DPA10103-DPB15901 DPA10104-DPB10101 DPA10104-DPB10301 DPA10104-DPB11001 DPA10104-DPB11301 DPA10104-DPB11501 DPA10105-DPB10101 DPA10105-DPB10301 DPA10105-DPB10401 DPA10105-DPB11801 DPA10105-DPB15001 DPA10106-DPB10101 DPA10106-DPB11101 DPA10201-DPB10101 DPA10201-DPB10201 DPA10201-DPB10202 DPA10201-DPB10301 DPA10201-DPB10501 DPA10201-DPB10601 DPA10201-DPB110601 DPA10201-DPB11101 DPA10201-DPB11301 DPA10201-DPB113101 DPA10201-DPB113301 DPA10201-DPB11501 DPA10201-DPB11601 DPA10201-DPB11701 DPA10201-DPB11801 DPA10201-DPB11901 DPA10201-DPB13001 DPA10201-DPB14501 DPA10201-DPB15501 DPA10201-DPB19101 DPA10202-DPB10101 DPA10202-DPB10201 DPA10202-DPB10202 DPA10202-DPB10301 DPA10202-DPB10401 DPA10202-DPB10501 DPA10202-DPB10901 DPA10202-DPB110001 DPA10202-DPB110601 DPA10202-DPB11101 DPA10202-DPB11301 DPA10202-DPB113101 DPA10202-DPB11701 DPA10202-DPB11801 DPA10202-DPB11901 DPA10202-DPB12101 DPA10202-DPB12901 DPA10202-DPB13001 DPA10202-DPB13101; note = HLAs: DPA10202-DPB13801 DPA10202-DPB14501 DPA10202-DPB15501 DPA10202-DPB16501 DPA10202-DPB18501 DPA10301-DPB10101 DPA10301-DPB10201 DPA10301-DPB10202 DPA10301-DPB10301 DPA10301-DPB10401 DPA10301-DPB10402 DPA10301-DPB10901 DPA10301-DPB110501 DPA10301-DPB110601 DPA10301-DPB11101 DPA10301-DPB11301 DPA10301-DPB11701 DPA10301-DPB11801 DPA10301-DPB12301 DPA10301-DPB13901 DPA10301-DPB14001 DPA10301-DPB14901 DPA10301-DPB15501 DPA10301-DPB16501 DPA10301-DPB17501 DPA10301-DPB18001 DPA10401-DPB10101 DPA10401-DPB10201 DPA10401-DPB10202 DPA10401-DPB10301 DPA10401-DPB10402 DPA10401-DPB10501 DPA10401-DPB110501 DPA10401-DPB11301 DPA10401-DPB113301 DPA10401-DPB11401 DPA10401-DPB14901 DQA10102-DQB10501 DQA10102-DQB10503 DQA10102-DQB10609 DQA10103-DQB10501 DQA10103-DQB10503 DQA10103-DQB10609
GEIYKRWIILGLNKIV

SEQ ID NO: 3516 - protein, 17 aa, Human immunodeficiency virus 1
  source 1..17: note = HLAs: DRB1_0101 DRB1_0102 DRB1_0103 DRB1_0401 DRB1_0402 DRB1_0404 DRB1_0405 DRB1_0408 DRB1_0410 DRB1_0701 DRB1_0801 DRB1_0802 DRB1_0803 DRB1_0804 DRB1_0806 DRB1_0809 DRB1_0813 DRB1_0901 DRB1_1001 DRB1_1101 DRB1_1102 DRB1_1103 DRB1_1104 DRB1_1114 DRB1_1201 DRB1_1202 DRB1_1301 DRB1_1302 DRB1_1303 DRB1_1304 DRB1_1305 DRB1_1312 DRB1_1401 DRB1_1402 DRB1_1403 DRB1_1404 DRB1_1405 DRB1_1406 DRB1_1407 DRB1_1418 DRB1_1454 DRB1_1501 DRB1_1502 DRB1_1503 DRB1_1601 DRB1_1602 DPA10103-DPB10101 DPA10103-DPB10201 DPA10103-DPB10202 DPA10103-DPB10301 DPA10103-DPB10401 DPA10103-DPB10402 DPA10103-DPB10501 DPA10103-DPB10601 DPA10103-DPB10901 DPA10103-DPB11001 DPA10103-DPB110501 DPA10103-DPB11101 DPA10103-DPB112401 DPA10103-DPB112601 DPA10103-DPB11301 DPA10103-DPB113101 DPA10103-DPB113301 DPA10103-DPB11401 DPA10103-DPB11501 DPA10103-DPB11601 DPA10103-DPB11701 DPA10103-DPB11801 DPA10103-DPB11901 DPA10103-DPB12001 DPA10103-DPB12101 DPA10103-DPB12301 DPA10103-DPB12901 DPA10103-DPB13001 DPA10103-DPB13101; note = HLAs: DPA10103-DPB13401 DPA10103-DPB13901 DPA10103-DPB14001 DPA10103-DPB14101 DPA10103-DPB14801 DPA10103-DPB14901 DPA10103-DPB15001 DPA10103-DPB15101 DPA10103-DPB15501 DPA10103-DPB15901 DPA10103-DPB18001 DPA10104-DPB10101 DPA10104-DPB10301 DPA10104-DPB11001 DPA10104-DPB11301 DPA10104-DPB11501 DPA10105-DPB10101 DPA10105-DPB10301 DPA10105-DPB10401 DPA10105-DPB11801 DPA10105-DPB15001 DPA10106-DPB10101 DPA10106-DPB11101 DPA10201-DPB10101 DPA10201-DPB10201 DPA10201-DPB10202 DPA10201-DPB10301 DPA10201-DPB10401 DPA10201-DPB10501 DPA10201-DPB10601 DPA10201-DPB110601 DPA10201-DPB11101 DPA10201-DPB11301 DPA10201-DPB113101 DPA10201-DPB113301 DPA10201-DPB11401 DPA10201-DPB11501 DPA10201-DPB11601 DPA10201-DPB11701 DPA10201-DPB11801 DPA10201-DPB11901 DPA10201-DPB13001 DPA10201-DPB13401 DPA10201-DPB14501 DPA10201-DPB15501 DPA10201-DPB19101 DPA10202-DPB10101 DPA10202-DPB10201 DPA10202-DPB10202 DPA10202-DPB10301 DPA10202-DPB10401 DPA10202-DPB10402 DPA10202-DPB10501 DPA10202-DPB10901 DPA10202-DPB110001; note = HLAs: DPA10202-DPB110501 DPA10202-DPB110601 DPA10202-DPB11101 DPA10202-DPB11301 DPA10202-DPB113101 DPA10202-DPB11401 DPA10202-DPB11701 DPA10202-DPB11801 DPA10202-DPB11901 DPA10202-DPB12101 DPA10202-DPB12901 DPA10202-DPB13001 DPA10202-DPB13101 DPA10202-DPB13801 DPA10202-DPB14501 DPA10202-DPB15501 DPA10202-DPB16501 DPA10202-DPB18501 DPA10301-DPB10101 DPA10301-DPB10201 DPA10301-DPB10202 DPA10301-DPB10301 DPA10301-DPB10401 DPA10301-DPB10402 DPA10301-DPB10901 DPA10301-DPB110501 DPA10301-DPB110601 DPA10301-DPB11101 DPA10301-DPB11301 DPA10301-DPB11701 DPA10301-DPB11801 DPA10301-DPB12301 DPA10301-DPB13901 DPA10301-DPB14001 DPA10301-DPB14901 DPA10301-DPB15501 DPA10301-DPB16501 DPA10301-DPB17501 DPA10301-DPB18001 DPA10401-DPB10101 DPA10401-DPB10201 DPA10401-DPB10202 DPA10401-DPB10301 DPA10401-DPB10402 DPA10401-DPB10501 DPA10401-DPB110501 DPA10401-DPB11301 DPA10401-DPB113301 DPA10401-DPB11401 DPA10401-DPB14901 DQA10102-DQB10501 DQA10102-DQB10503 DQA10102-DQB10609 DQA10103-DQB10501; note = HLAs: DQA10103-DQB10503 DQA10103-DQB10609
GEIYKRWIILGLNKIVR

SEQ ID NO: 3517 - protein, 18 aa, Human immunodeficiency virus 1
  source 1..18: note = HLAs: DRB1_0101 DRB1_0102 DRB1_0404 DRB1_0405 DRB1_0408 DRB1_0410 DRB1_0701 DRB1_0801 DRB1_0802 DRB1_0803 DRB1_0804 DRB1_0806 DRB1_0809 DRB1_0813 DRB1_0901 DRB1_1001 DRB1_1101 DRB1_1102 DRB1_1103 DRB1_1104 DRB1_1114 DRB1_1201 DRB1_1301 DRB1_1302 DRB1_1304 DRB1_1305 DRB1_1312 DRB1_1401 DRB1_1402 DRB1_1403 DRB1_1404 DRB1_1406 DRB1_1454 DRB1_1501 DRB1_1502 DRB1_1503 DRB1_1601 DRB1_1602 DPA10103-DPB10101 DPA10103-DPB10201 DPA10103-DPB10202 DPA10103-DPB10301 DPA10103-DPB10401 DPA10103-DPB10501 DPA10103-DPB10601 DPA10103-DPB11101 DPA10103-DPB112401 DPA10103-DPB112601 DPA10103-DPB11301 DPA10103-DPB113301 DPA10103-DPB11501 DPA10103-DPB11601 DPA10103-DPB11801 DPA10103-DPB11901 DPA10103-DPB12001 DPA10103-DPB12101 DPA10103-DPB12301 DPA10103-DPB12901 DPA10103-DPB13001 DPA10103-DPB13101 DPA10103-DPB13401 DPA10103-DPB13901 DPA10103-DPB14001 DPA10103-DPB14101 DPA10103-DPB14801 DPA10103-DPB15001 DPA10103-DPB15501 DPA10104-DPB10101 DPA10104-DPB10301 DPA10104-DPB11301 DPA10104-DPB11501; note = HLAs: DPA10105-DPB10101 DPA10105-DPB10301 DPA10105-DPB10401 DPA10105-DPB11801 DPA10105-DPB15001 DPA10106-DPB10101 DPA10106-DPB11101 DPA10201-DPB10101 DPA10201-DPB10201 DPA10201-DPB10202 DPA10201-DPB10501 DPA10201-DPB110601 DPA10201-DPB11101 DPA10201-DPB11501 DPA10201-DPB11601 DPA10201-DPB11901 DPA10201-DPB15501 DPA10202-DPB10101 DPA10202-DPB10201 DPA10202-DPB10202 DPA10202-DPB10401 DPA10202-DPB10501 DPA10202-DPB110001 DPA10202-DPB110601 DPA10202-DPB11101 DPA10202-DPB11301 DPA10202-DPB113101 DPA10202-DPB11701 DPA10202-DPB11801 DPA10202-DPB11901 DPA10202-DPB12101 DPA10202-DPB13001 DPA10202-DPB13101 DPA10202-DPB13801 DPA10202-DPB15501 DPA10202-DPB16501 DPA10301-DPB10101 DPA10301-DPB10201 DPA10301-DPB10202 DPA10301-DPB10301 DPA10301-DPB10401 DPA10301-DPB10402 DPA10301-DPB10901 DPA10301-DPB110501 DPA10301-DPB110601 DPA10301-DPB11101 DPA10301-DPB11301 DPA10301-DPB11701 DPA10301-DPB11801 DPA10301-DPB12301 DPA10301-DPB13901 DPA10301-DPB14001 DPA10301-DPB14901 DPA10301-DPB15501; note = HLAs: DPA10301-DPB16501 DPA10301-DPB17501 DPA10301-DPB18001 DPA10401-DPB10101 DPA10401-DPB10201 DPA10401-DPB10202 DPA10401-DPB10301 DPA10401-DPB10402 DPA10401-DPB10501 DPA10401-DPB110501 DPA10401-DPB11301 DPA10401-DPB113301 DPA10401-DPB11401 DPA10401-DPB14901 DQA10102-DQB10501 DQA10102-DQB10503 DQA10102-DQB10609 DQA10103-DQB10501 DQA10103-DQB10609
GEIYKRWIILGLNKIVRM

SEQ ID NO: 3518 - protein, 19 aa, Human immunodeficiency virus 1
  source 1..19: note = HLAs: DRB1_0101 DRB1_0102 DRB1_0103 DRB1_0401 DRB1_0402 DRB1_0404 DRB1_0405 DRB1_0408 DRB1_0410 DRB1_0701 DRB1_0801 DRB1_0802 DRB1_0803 DRB1_0804 DRB1_0806 DRB1_0809 DRB1_0813 DRB1_0901 DRB1_1001 DRB1_1101 DRB1_1102 DRB1_1103 DRB1_1104 DRB1_1114 DRB1_1201 DRB1_1202 DRB1_1301 DRB1_1302 DRB1_1303 DRB1_1304 DRB1_1305 DRB1_1312 DRB1_1401 DRB1_1402 DRB1_1403 DRB1_1404 DRB1_1405 DRB1_1406 DRB1_1407 DRB1_1418 DRB1_1454 DRB1_1501 DRB1_1502 DRB1_1503 DRB1_1601 DRB1_1602 DPA10103-DPB10101 DPA10103-DPB10201 DPA10103-DPB10202 DPA10103-DPB10301 DPA10103-DPB10401 DPA10103-DPB10402 DPA10103-DPB10501 DPA10103-DPB10601 DPA10103-DPB10901 DPA10103-DPB11001 DPA10103-DPB110501 DPA10103-DPB11101 DPA10103-DPB112401 DPA10103-DPB112601 DPA10103-DPB11301 DPA10103-DPB113101 DPA10103-DPB113301 DPA10103-DPB11401 DPA10103-DPB11501 DPA10103-DPB11601 DPA10103-DPB11701 DPA10103-DPB11801 DPA10103-DPB11901 DPA10103-DPB12001 DPA10103-DPB12101 DPA10103-DPB12301 DPA10103-DPB12901 DPA10103-DPB13001 DPA10103-DPB13101; note = HLAs: DPA10103-DPB13401 DPA10103-DPB13901 DPA10103-DPB14001 DPA10103-DPB14101 DPA10103-DPB14801 DPA10103-DPB14901 DPA10103-DPB15001 DPA10103-DPB15101 DPA10103-DPB15501 DPA10103-DPB15901 DPA10103-DPB18001 DPA10104-DPB10101 DPA10104-DPB10301 DPA10104-DPB11001 DPA10104-DPB11301 DPA10104-DPB11501 DPA10105-DPB10101 DPA10105-DPB10301 DPA10105-DPB10401 DPA10105-DPB11801 DPA10105-DPB15001 DPA10106-DPB10101 DPA10106-DPB11101 DPA10201-DPB10101 DPA10201-DPB10201 DPA10201-DPB10202 DPA10201-DPB10501 DPA10201-DPB10601 DPA10201-DPB110601 DPA10201-DPB11101 DPA10201-DPB11301 DPA10201-DPB113101 DPA10201-DPB113301 DPA10201-DPB11501 DPA10201-DPB11601 DPA10201-DPB11701 DPA10201-DPB11801 DPA10201-DPB11901 DPA10201-DPB13001 DPA10201-DPB15501 DPA10201-DPB19101 DPA10202-DPB10101 DPA10202-DPB10201 DPA10202-DPB10202 DPA10202-DPB10401 DPA10202-DPB10402 DPA10202-DPB10501 DPA10202-DPB10901 DPA10202-DPB110001 DPA10202-DPB110501 DPA10202-DPB110601 DPA10202-DPB11101 DPA10202-DPB11301 DPA10202-DPB113101; note = HLAs: DPA10202-DPB11701 DPA10202-DPB11801 DPA10202-DPB11901 DPA10202-DPB12101 DPA10202-DPB12901 DPA10202-DPB13001 DPA10202-DPB13101 DPA10202-DPB13801 DPA10202-DPB15501 DPA10202-DPB16501 DPA10202-DPB18501 DPA10301-DPB10101 DPA10301-DPB10201 DPA10301-DPB10202 DPA10301-DPB10301 DPA10301-DPB10401 DPA10301-DPB10402 DPA10301-DPB10901 DPA10301-DPB110501 DPA10301-DPB110601 DPA10301-DPB11101 DPA10301-DPB11301 DPA10301-DPB11701 DPA10301-DPB11801 DPA10301-DPB12301 DPA10301-DPB13901 DPA10301-DPB14001 DPA10301-DPB14901 DPA10301-DPB15501 DPA10301-DPB16501 DPA10301-DPB17501 DPA10301-DPB18001 DPA10401-DPB10101 DPA10401-DPB10201 DPA10401-DPB10202 DPA10401-DPB10301 DPA10401-DPB10402 DPA10401-DPB10501 DPA10401-DPB110501 DPA10401-DPB11301 DPA10401-DPB113301 DPA10401-DPB11401 DPA10401-DPB14901 DQA10102-DQB10501 DQA10102-DQB10503 DQA10102-DQB10609 DQA10103-DQB10501 DQA10103-DQB10503 DQA10103-DQB10601 DQA10103-DQB10602 DQA10103-DQB10603 DQA10103-DQB10608 DQA10103-DQB10609
GEIYKRWIILGLNKIVRMY

SEQ ID NO: 3519 - protein, 20 aa, Human immunodeficiency virus 1
  source 1..20: note = HLAs: DRB1_0101 DRB1_0102 DRB1_0103 DRB1_0301 DRB1_0401 DRB1_0402 DRB1_0404 DRB1_0405 DRB1_0408 DRB1_0410 DRB1_0701 DRB1_0801 DRB1_0802 DRB1_0803 DRB1_0804 DRB1_0806 DRB1_0809 DRB1_0813 DRB1_0901 DRB1_1001 DRB1_1101 DRB1_1102 DRB1_1103 DRB1_1104 DRB1_1114 DRB1_1201 DRB1_1202 DRB1_1301 DRB1_1302 DRB1_1303 DRB1_1304 DRB1_1305 DRB1_1312 DRB1_1401 DRB1_1402 DRB1_1403 DRB1_1404 DRB1_1405 DRB1_1406 DRB1_1407 DRB1_1418 DRB1_1454 DRB1_1501 DRB1_1502 DRB1_1503 DRB1_1601 DRB1_1602 DPA10103-DPB10101 DPA10103-DPB10201 DPA10103-DPB10202 DPA10103-DPB10301 DPA10103-DPB10401 DPA10103-DPB10402 DPA10103-DPB10501 DPA10103-DPB10601 DPA10103-DPB10901 DPA10103-DPB11001 DPA10103-DPB110501 DPA10103-DPB11101 DPA10103-DPB112401 DPA10103-DPB112601 DPA10103-DPB11301 DPA10103-DPB113101 DPA10103-DPB113301 DPA10103-DPB11401 DPA10103-DPB11501 DPA10103-DPB11601 DPA10103-DPB11701 DPA10103-DPB11801 DPA10103-DPB11901 DPA10103-DPB12001 DPA10103-DPB12101 DPA10103-DPB12301 DPA10103-DPB12901 DPA10103-DPB13001; note = HLAs: DPA10103-DPB13101 DPA10103-DPB13401 DPA10103-DPB13901 DPA10103-DPB14001 DPA10103-DPB14101 DPA10103-DPB14801 DPA10103-DPB14901 DPA10103-DPB15001 DPA10103-DPB15101 DPA10103-DPB15501 DPA10103-DPB15901 DPA10103-DPB18001 DPA10104-DPB10101 DPA10104-DPB10301 DPA10104-DPB11001 DPA10104-DPB11301 DPA10104-DPB11501 DPA10105-DPB10101 DPA10105-DPB10301 DPA10105-DPB10401 DPA10105-DPB11801 DPA10105-DPB15001 DPA10106-DPB10101 DPA10106-DPB11101 DPA10201-DPB10101 DPA10201-DPB10201 DPA10201-DPB10202 DPA10201-DPB10501 DPA10201-DPB10601 DPA10201-DPB10901 DPA10201-DPB110601 DPA10201-DPB11101 DPA10201-DPB11301 DPA10201-DPB113101 DPA10201-DPB113301 DPA10201-DPB11501 DPA10201-DPB11601 DPA10201-DPB11701 DPA10201-DPB11801 DPA10201-DPB11901 DPA10201-DPB13001 DPA10201-DPB13401 DPA10201-DPB15501 DPA10201-DPB19101 DPA10202-DPB10101 DPA10202-DPB10201 DPA10202-DPB10202 DPA10202-DPB10301 DPA10202-DPB10401 DPA10202-DPB10402 DPA10202-DPB10501 DPA10202-DPB10901 DPA10202-DPB110001 DPA10202-DPB110501; note = HLAs: DPA10202-DPB110601 DPA10202-DPB11101 DPA10202-DPB11301 DPA10202-DPB113101 DPA10202-DPB11401 DPA10202-DPB11701 DPA10202-DPB11801 DPA10202-DPB11901 DPA10202-DPB12101 DPA10202-DPB12901 DPA10202-DPB13001 DPA10202-DPB13101 DPA10202-DPB13801 DPA10202-DPB14501 DPA10202-DPB15501 DPA10202-DPB16501 DPA10202-DPB18501 DPA10301-DPB10101 DPA10301-DPB10201 DPA10301-DPB10202 DPA10301-DPB10301 DPA10301-DPB10401 DPA10301-DPB10402 DPA10301-DPB10901 DPA10301-DPB110501 DPA10301-DPB110601 DPA10301-DPB11101 DPA10301-DPB11301 DPA10301-DPB11701 DPA10301-DPB11801 DPA10301-DPB12301 DPA10301-DPB13901 DPA10301-DPB14001 DPA10301-DPB14901 DPA10301-DPB15501 DPA10301-DPB16501 DPA10301-DPB17501 DPA10301-DPB18001 DPA10401-DPB10101 DPA10401-DPB10201 DPA10401-DPB10202 DPA10401-DPB10301 DPA10401-DPB10402 DPA10401-DPB10501 DPA10401-DPB110501 DPA10401-DPB11301 DPA10401-DPB113301 DPA10401-DPB11401 DPA10401-DPB14901 DQA10102-DQB10501 DQA10102-DQB10503 DQA10102-DQB10601 DQA10102-DQB10609 DQA10103-DQB10501; note = HLAs: DQA10103-DQB10503 DQA10103-DQB10601 DQA10103-DQB10602 DQA10103-DQB10603 DQA10103-DQB10608 DQA10103-DQB10609
GEIYKRWIILGLNKIVRMYS

SEQ ID NO: 3520 - protein, 21 aa, Human immunodeficiency virus 1
  source 1..21: note = HLAs: DRB1_0101 DRB1_0102 DRB1_0301 DRB1_0401 DRB1_0404 DRB1_0405 DRB1_0408 DRB1_0410 DRB1_0701 DRB1_0801 DRB1_0802 DRB1_0803 DRB1_0804 DRB1_0806 DRB1_0809 DRB1_0813 DRB1_0901 DRB1_1001 DRB1_1101 DRB1_1102 DRB1_1103 DRB1_1104 DRB1_1114 DRB1_1201 DRB1_1202 DRB1_1301 DRB1_1302 DRB1_1303 DRB1_1304 DRB1_1305 DRB1_1312 DRB1_1401 DRB1_1402 DRB1_1403 DRB1_1404 DRB1_1405 DRB1_1406 DRB1_1407 DRB1_1418 DRB1_1454 DRB1_1501 DRB1_1502 DRB1_1503 DRB1_1601 DRB1_1602 DPA10103-DPB10101 DPA10103-DPB10201 DPA10103-DPB10202 DPA10103-DPB10301 DPA10103-DPB10501 DPA10103-DPB10601 DPA10103-DPB11101 DPA10103-DPB112401 DPA10103-DPB11301 DPA10103-DPB113101 DPA10103-DPB113301 DPA10103-DPB11401 DPA10103-DPB11501 DPA10103-DPB11601 DPA10103-DPB11701 DPA10103-DPB11801 DPA10103-DPB11901 DPA10103-DPB12001 DPA10103-DPB12101 DPA10103-DPB13001 DPA10103-DPB13101 DPA10103-DPB13401 DPA10103-DPB14001 DPA10103-DPB14101 DPA10103-DPB14801 DPA10103-DPB15001 DPA10103-DPB15501 DPA10104-DPB10101 DPA10104-DPB10301 DPA10104-DPB11301; note = HLAs: DPA10104-DPB11501 DPA10105-DPB10101 DPA10105-DPB10301 DPA10105-DPB11801 DPA10105-DPB15001 DPA10106-DPB10101 DPA10201-DPB10101 DPA10201-DPB10501 DPA10201-DPB110601 DPA10201-DPB11501 DPA10201-DPB11601 DPA10201-DPB11901 DPA10202-DPB10101 DPA10202-DPB10201 DPA10202-DPB10202 DPA10202-DPB10501 DPA10202-DPB110601 DPA10202-DPB11101 DPA10202-DPB11301 DPA10202-DPB11801 DPA10202-DPB11901 DPA10202-DPB12101 DPA10202-DPB13001 DPA10202-DPB13101 DPA10202-DPB13801 DPA10202-DPB15501 DPA10202-DPB16501 DPA10301-DPB10101 DPA10301-DPB10201 DPA10301-DPB10202 DPA10301-DPB10401 DPA10301-DPB10402 DPA10301-DPB10901 DPA10301-DPB110501 DPA10301-DPB110601 DPA10301-DPB11101 DPA10301-DPB11301 DPA10301-DPB11701 DPA10301-DPB11801 DPA10301-DPB12301 DPA10301-DPB13901 DPA10301-DPB14001 DPA10301-DPB14901 DPA10301-DPB15501 DPA10301-DPB16501 DPA10301-DPB17501 DPA10301-DPB18001 DPA10401-DPB10101 DPA10401-DPB10201 DPA10401-DPB10202 DPA10401-DPB10301 DPA10401-DPB10402 DPA10401-DPB10501 DPA10401-DPB110501; note = HLAs: DPA10401-DPB11301 DPA10401-DPB113301 DPA10401-DPB11401 DPA10401-DPB14901 DQA10102-DQB10501 DQA10102-DQB10503 DQA10102-DQB10609 DQA10103-DQB10501 DQA10103-DQB10601 DQA10103-DQB10608 DQA10103-DQB10609
GEIYKRWIILGLNKIVRMYSP

SEQ ID NO: 3521 - protein, 23 aa, Human immunodeficiency virus 1
  source 1..23: note = HLAs: DPA10103-DPB10101 DPA10103-DPB10201 DPA10103-DPB10202 DPA10103-DPB10401 DPA10103-DPB112601 DPA10103-DPB11501 DPA10103-DPB11601 DPA10103-DPB12301 DPA10103-DPB13101 DPA10103-DPB13401 DPA10103-DPB13901 DPA10103-DPB14801 DPA10104-DPB10101 DPA10104-DPB11501 DPA10105-DPB10101 DPA10105-DPB10401 DPA10106-DPB10101 DPA10201-DPB10101 DPA10202-DPB10101 DPA10301-DPB10101 DPA10301-DPB10201 DPA10301-DPB10202 DPA10301-DPB10401 DPA10301-DPB10402 DPA10301-DPB110501 DPA10301-DPB110601 DPA10301-DPB11801 DPA10301-DPB12301 DPA10301-DPB13901 DPA10301-DPB14001 DPA10301-DPB14901 DPA10301-DPB16501 DPA10301-DPB18001 DPA10401-DPB10101 DPA10401-DPB10201 DPA10401-DPB10202
GFTTPDKKHQKEPPFLWMGYELH

SEQ ID NO: 3522 - protein, 24 aa, Human immunodeficiency virus 1
  source 1..24: note = HLAs: DRB1_1001 DPA10103-DPB10101 DPA10103-DPB10201 DPA10103-DPB10202 DPA10103-DPB10401 DPA10103-DPB112601 DPA10103-DPB11501 DPA10103-DPB11601 DPA10103-DPB11901 DPA10103-DPB12301 DPA10103-DPB13101 DPA10103-DPB13401 DPA10103-DPB13901 DPA10103-DPB14001 DPA10103-DPB14101 DPA10103-DPB14801 DPA10103-DPB15001 DPA10104-DPB10101 DPA10104-DPB11501 DPA10105-DPB10101 DPA10105-DPB10401 DPA10105-DPB15001 DPA10106-DPB10101 DPA10201-DPB10101 DPA10201-DPB11501 DPA10202-DPB10101 DPA10202-DPB13101 DPA10301-DPB10101 DPA10301-DPB10201 DPA10301-DPB10202 DPA10301-DPB10401 DPA10301-DPB10402 DPA10301-DPB110501 DPA10301-DPB110601 DPA10301-DPB11801 DPA10301-DPB12301 DPA10301-DPB13901 DPA10301-DPB14001 DPA10301-DPB14901 DPA10301-DPB16501 DPA10301-DPB18001 DPA10401-DPB10101 DPA10401-DPB10201 DPA10401-DPB10202 DPA10401-DPB10501 DQA10102-DQB10501
GFTTPDKKHQKEPPFLWMGYELHP

SEQ ID NO: 3523 - protein, 25 aa, Human immunodeficiency virus 1
  source 1..25: note = HLAs: DRB1_1001 DPA10103-DPB10101 DPA10103-DPB10201 DPA10103-DPB10202 DPA10103-DPB10401 DPA10103-DPB112601 DPA10103-DPB11501 DPA10103-DPB11601 DPA10103-DPB11801 DPA10103-DPB11901 DPA10103-DPB12301 DPA10103-DPB13101 DPA10103-DPB13401 DPA10103-DPB13901 DPA10103-DPB14001 DPA10103-DPB14101 DPA10103-DPB14801 DPA10103-DPB15001 DPA10103-DPB15901 DPA10104-DPB10101 DPA10104-DPB11501 DPA10105-DPB10101 DPA10105-DPB10401 DPA10105-DPB11801 DPA10105-DPB15001 DPA10106-DPB10101 DPA10201-DPB10101 DPA10201-DPB11501 DPA10201-DPB11601 DPA10202-DPB10101 DPA10202-DPB10202 DPA10202-DPB110601 DPA10202-DPB11901 DPA10202-DPB13101 DPA10202-DPB16501 DPA10301-DPB10101 DPA10301-DPB10201 DPA10301-DPB10202 DPA10301-DPB10401 DPA10301-DPB10402 DPA10301-DPB110501 DPA10301-DPB110601 DPA10301-DPB11801 DPA10301-DPB12301 DPA10301-DPB13901 DPA10301-DPB14001 DPA10301-DPB14901 DPA10301-DPB15501 DPA10301-DPB16501 DPA10301-DPB17501 DPA10301-DPB18001 DPA10401-DPB10101 DPA10401-DPB10201 DPA10401-DPB10202 DPA10401-DPB10501; note = HLAs: DQA10101-DQB10501 DQA10102-DQB10501 DQA10102-DQB10502 DQA10103-DQB10501 DQA10104-DQB10501 DQA10105-DQB10501
GFTTPDKKHQKEPPFLWMGYELHPD

SEQ ID NO: 3524 - protein, 15 aa, Human immunodeficiency virus 1
  source 1..15: note = HLAs: DRB1_1001 DQA10102-DQB10501 DQA10102-DQB10601
GGHQAAMQMLKDTIN

SEQ ID NO: 3525 - protein, 16 aa, Human immunodeficiency virus 1
  source 1..16: note = HLAs: DQA10102-DQB10501 DQA10102-DQB10609
GGHQAAMQMLKDTINE

SEQ ID NO: 3526 - protein, 17 aa, Human immunodeficiency virus 1
  source 1..17: note = HLAs: DRB1_1001 DQA10102-DQB10501 DQA10102-DQB10609
GGHQAAMQMLKDTINEE

SEQ ID NO: 3527 - protein, 18 aa, Human immunodeficiency virus 1
  source 1..18: note = HLAs: DQA10102-DQB10501
GGHQAAMQMLKDTINEEA

SEQ ID NO: 3528 - protein, 19 aa, Human immunodeficiency virus 1
  source 1..19: note = HLAs: DPA10301-DPB10101 DPA10401-DPB10101 DQA10102-DQB10501 DQA10102-DQB10609
GGHQAAMQMLKDTINEEAA

SEQ ID NO: 3529 - protein, 20 aa, Human immunodeficiency virus 1
  source 1..20: note = HLAs: DRB1_1001 DPA10301-DPB10101 DPA10401-DPB10101 DQA10102-DQB10501 DQA10102-DQB10503 DQA10102-DQB10609 DQA10103-DQB10501 DQA10103-DQB10609
GGHQAAMQMLKDTINEEAAE

SEQ ID NO: 3530 - protein, 21 aa, Human immunodeficiency virus 1
  source 1..21: note = HLAs: DRB1_1001 DPA10301-DPB10101 DPA10401-DPB10101 DQA10102-DQB10501 DQA10102-DQB10609
GGHQAAMQMLKDTINEEAAEW

SEQ ID NO: 3531 - protein, 22 aa, Human immunodeficiency virus 1
  source 1..22: note = HLAs: DRB1_1001 DPA10301-DPB10101 DPA10401-DPB10101 DQA10102-DQB10501 DQA10102-DQB10609
GGHQAAMQMLKDTINEEAAEWD

SEQ ID NO: 3532 - protein, 23 aa, Human immunodeficiency virus 1
  source 1..23: note = HLAs: DRB1_1001 DPA10301-DPB10101 DPA10401-DPB10101 DQA10102-DQB10501 DQA10102-DQB10609
GGHQAAMQMLKDTINEEAAEWDR

SEQ ID NO: 3533 - protein, 14 aa, Human immunodeficiency virus 1
  source 1..14: note = HLAs: DRB1_0806 DRB1_1103 DRB1_1104
GGIGGFIKVRQYDQ

SEQ ID NO: 3534 - protein, 15 aa, Human immunodeficiency virus 1
  source 1..15: note = HLAs: DQA10201-DQB10301
GGIGGYSAGERIIDI

SEQ ID NO: 3535 - protein, 16 aa, Human immunodeficiency virus 1
  source 1..16: note = HLAs: DQA10201-DQB10301
GGIGGYSAGERIIDII

SEQ ID NO: 3536 - protein, 17 aa, Human immunodeficiency virus 1
  source 1..17: note = HLAs: DQA10102-DQB10609
GGIGGYSAGERIIDIIA

SEQ ID NO: 3537 - protein, 15 aa, Human immunodeficiency virus 1
  source 1..15: note = HLAs: DRB1_0101 DRB1_0102
GGNEQVDKLVSSGIR

SEQ ID NO: 3538 - protein, 16 aa, Human immunodeficiency virus 1
  source 1..16: note = HLAs: DRB1_0101 DRB1_0102
GGNEQVDKLVSSGIRK

SEQ ID NO: 3539 - protein, 17 aa, Human immunodeficiency virus 1
  source 1..17: note = HLAs: DRB1_0101 DRB1_0102 DRB1_0701 DRB1_0806 DRB1_0901 DRB1_1001 DRB1_1102 DRB1_1103 DRB1_1104 DRB1_1114 DRB1_1301 DRB1_1302 DRB1_1304 DRB1_1406 DRB1_1501 DPA10103-DPB11501 DPA10104-DPB11501 DPA10202-DPB10101 DPA10202-DPB10202 DPA10202-DPB110601 DPA10202-DPB11901 DPA10202-DPB13101 DPA10301-DPB10101 DPA10301-DPB10201 DPA10301-DPB10202 DPA10301-DPB10401 DPA10301-DPB110601 DPA10301-DPB11801 DPA10301-DPB12301 DPA10301-DPB13901 DPA10301-DPB14001 DPA10401-DPB10101 DPA10401-DPB10201 DPA10401-DPB10202 DQA10102-DQB10501 DQA10102-DQB10601 DQA10103-DQB10601 DQA10103-DQB10609 DQA10201-DQB10301
GGNEQVDKLVSSGIRKV

SEQ ID NO: 3540 - protein, 18 aa, Human immunodeficiency virus 1
  source 1..18: note = HLAs: DRB1_0101 DRB1_0701 DRB1_0901 DRB1_1114 DRB1_1302 DRB1_1304 DPA10103-DPB11501 DPA10104-DPB11501 DPA10202-DPB10101 DPA10202-DPB110601 DPA10202-DPB11901 DPA10301-DPB10101 DPA10301-DPB10201 DPA10301-DPB10202 DPA10301-DPB10401 DPA10301-DPB110601 DPA10301-DPB11801 DPA10301-DPB12301 DPA10301-DPB13901 DPA10301-DPB14001 DPA10401-DPB10101 DPA10401-DPB10201 DPA10401-DPB10202 DQA10102-DQB10501 DQA10102-DQB10601 DQA10103-DQB10601 DQA10103-DQB10609 DQA10201-DQB10301
GGNEQVDKLVSSGIRKVL

SEQ ID NO: 3541 - protein, 19 aa, Human immunodeficiency virus 1
  source 1..19: note = HLAs: DRB1_0101 DRB1_0102 DRB1_0410 DRB1_0701 DRB1_0801 DRB1_0804 DRB1_0806 DRB1_0813 DRB1_0901 DRB1_1001 DRB1_1102 DRB1_1103 DRB1_1104 DRB1_1114 DRB1_1301 DRB1_1302 DRB1_1304 DRB1_1401 DRB1_1402 DRB1_1404 DRB1_1406 DRB1_1454 DRB1_1501 DRB1_1602 DPA10103-DPB10101 DPA10103-DPB10201 DPA10103-DPB10202 DPA10103-DPB11501 DPA10103-DPB11601 DPA10103-DPB11801 DPA10103-DPB11901 DPA10103-DPB13101 DPA10103-DPB13401 DPA10103-DPB14001 DPA10103-DPB14101 DPA10103-DPB14801 DPA10103-DPB15001 DPA10104-DPB10101 DPA10104-DPB11501 DPA10105-DPB10101 DPA10105-DPB11801 DPA10105-DPB15001 DPA10106-DPB10101 DPA10201-DPB10101 DPA10201-DPB110601 DPA10201-DPB11501 DPA10201-DPB11601 DPA10201-DPB11901 DPA10202-DPB10101 DPA10202-DPB10201 DPA10202-DPB10202 DPA10202-DPB10501 DPA10202-DPB110601 DPA10202-DPB11801 DPA10202-DPB11901 DPA10202-DPB13101 DPA10202-DPB13801 DPA10202-DPB15501 DPA10202-DPB16501 DPA10301-DPB10101 DPA10301-DPB10201 DPA10301-DPB10202 DPA10301-DPB10401 DPA10301-DPB10402 DPA10301-DPB110501; note = HLAs: DPA10301-DPB110601 DPA10301-DPB11801 DPA10301-DPB12301 DPA10301-DPB13901 DPA10301-DPB14001 DPA10301-DPB14901 DPA10301-DPB15501 DPA10301-DPB16501 DPA10301-DPB17501 DPA10301-DPB18001 DPA10401-DPB10101 DPA10401-DPB10201 DPA10401-DPB10202 DPA10401-DPB10501 DQA10102-DQB10501 DQA10102-DQB10601 DQA10102-DQB10602 DQA10102-DQB10609 DQA10102-DQB10611 DQA10103-DQB10501 DQA10103-DQB10601 DQA10103-DQB10602 DQA10103-DQB10608 DQA10103-DQB10609 DQA10201-DQB10301 DQA10201-DQB10303 DQA10505-DQB10402
GGNEQVDKLVSSGIRKVLF

SEQ ID NO: 3542 - protein, 20 aa, Human immunodeficiency virus 1
  source 1..20: note = HLAs: DRB1_0101 DRB1_0102 DRB1_0404 DRB1_0410 DRB1_0701 DRB1_0801 DRB1_0802 DRB1_0803 DRB1_0804 DRB1_0806 DRB1_0809 DRB1_0813 DRB1_0901 DRB1_1001 DRB1_1101 DRB1_1102 DRB1_1103 DRB1_1104 DRB1_1114 DRB1_1201 DRB1_1301 DRB1_1302 DRB1_1303 DRB1_1304 DRB1_1305 DRB1_1312 DRB1_1401 DRB1_1402 DRB1_1403 DRB1_1404 DRB1_1405 DRB1_1406 DRB1_1454 DRB1_1501 DRB1_1502 DRB1_1503 DRB1_1601 DRB1_1602 DPA10103-DPB10101 DPA10103-DPB10201 DPA10103-DPB10202 DPA10103-DPB10401 DPA10103-DPB10501 DPA10103-DPB112601 DPA10103-DPB11501 DPA10103-DPB11601 DPA10103-DPB11801 DPA10103-DPB11901 DPA10103-DPB12301 DPA10103-DPB13101 DPA10103-DPB13401 DPA10103-DPB13901 DPA10103-DPB14001 DPA10103-DPB14101 DPA10103-DPB14801 DPA10103-DPB15001 DPA10103-DPB15501 DPA10103-DPB15901 DPA10104-DPB10101 DPA10104-DPB11501 DPA10105-DPB10101 DPA10105-DPB10401 DPA10105-DPB11801 DPA10105-DPB15001 DPA10106-DPB10101 DPA10201-DPB10101 DPA10201-DPB10201 DPA10201-DPB10202 DPA10201-DPB10501 DPA10201-DPB110601 DPA10201-DPB11501 DPA10201-DPB11601; note = HLAs: DPA10201-DPB11901 DPA10202-DPB10101 DPA10202-DPB10201 DPA10202-DPB10202 DPA10202-DPB10401 DPA10202-DPB10402 DPA10202-DPB10501 DPA10202-DPB10901 DPA10202-DPB110001 DPA10202-DPB110501 DPA10202-DPB110601 DPA10202-DPB11301 DPA10202-DPB113101 DPA10202-DPB11401 DPA10202-DPB11701 DPA10202-DPB11801 DPA10202-DPB11901 DPA10202-DPB12101 DPA10202-DPB12901 DPA10202-DPB13001 DPA10202-DPB13101 DPA10202-DPB13801 DPA10202-DPB15501 DPA10202-DPB16501 DPA10301-DPB10101 DPA10301-DPB10201 DPA10301-DPB10202 DPA10301-DPB10401 DPA10301-DPB10402 DPA10301-DPB10901 DPA10301-DPB110501 DPA10301-DPB110601 DPA10301-DPB11101 DPA10301-DPB11301 DPA10301-DPB11701 DPA10301-DPB11801 DPA10301-DPB12301 DPA10301-DPB13901 DPA10301-DPB14001 DPA10301-DPB14901 DPA10301-DPB15501 DPA10301-DPB16501 DPA10301-DPB17501 DPA10301-DPB18001 DPA10401-DPB10101 DPA10401-DPB10201 DPA10401-DPB10202 DPA10401-DPB10301 DPA10401-DPB10402 DPA10401-DPB10501 DPA10401-DPB110501 DPA10401-DPB11301 DPA10401-DPB113301 DPA10401-DPB11401; note = HLAs: DPA10401-DPB14901 DQA10102-DQB10501 DQA10102-DQB10503 DQA10102-DQB10601 DQA10102-DQB10602 DQA10102-DQB10609 DQA10102-DQB10611 DQA10103-DQB10501 DQA10103-DQB10503 DQA10103-DQB10601 DQA10103-DQB10602 DQA10103-DQB10604 DQA10103-DQB10608 DQA10103-DQB10609 DQA10201-DQB10301 DQA10201-DQB10303 DQA10505-DQB10402 DQA10506-DQB10303
GGNEQVDKLVSSGIRKVLFL

SEQ ID NO: 3543 - protein, 21 aa, Human immunodeficiency virus 1
  source 1..21: note = HLAs: DRB1_0101 DRB1_0102 DRB1_0404 DRB1_0410 DRB1_0701 DRB1_0801 DRB1_0804 DRB1_0806 DRB1_0813 DRB1_0901 DRB1_1001 DRB1_1101 DRB1_1102 DRB1_1103 DRB1_1104 DRB1_1114 DRB1_1201 DRB1_1301 DRB1_1302 DRB1_1303 DRB1_1304 DRB1_1305 DRB1_1312 DRB1_1401 DRB1_1402 DRB1_1404 DRB1_1405 DRB1_1406 DRB1_1454 DRB1_1501 DRB1_1502 DRB1_1602 DPA10103-DPB10101 DPA10103-DPB10201 DPA10103-DPB10202 DPA10103-DPB11501 DPA10103-DPB11601 DPA10103-DPB11801 DPA10103-DPB11901 DPA10103-DPB13101 DPA10103-DPB13401 DPA10103-DPB14001 DPA10103-DPB14801 DPA10103-DPB15001 DPA10104-DPB10101 DPA10104-DPB11501 DPA10105-DPB10101 DPA10105-DPB11801 DPA10105-DPB15001 DPA10106-DPB10101 DPA10201-DPB10101 DPA10201-DPB110601 DPA10201-DPB11501 DPA10201-DPB11901 DPA10202-DPB10101 DPA10202-DPB10201 DPA10202-DPB10202 DPA10202-DPB10501 DPA10202-DPB110601 DPA10202-DPB11801 DPA10202-DPB11901 DPA10202-DPB13101 DPA10202-DPB13801 DPA10202-DPB16501 DPA10301-DPB10101 DPA10301-DPB10201 DPA10301-DPB10202 DPA10301-DPB10401 DPA10301-DPB10402; note = HLAs: DPA10301-DPB110501 DPA10301-DPB110601 DPA10301-DPB11801 DPA10301-DPB12301 DPA10301-DPB13901 DPA10301-DPB14001 DPA10301-DPB14901 DPA10301-DPB15501 DPA10301-DPB16501 DPA10301-DPB17501 DPA10301-DPB18001 DPA10401-DPB10101 DPA10401-DPB10201 DPA10401-DPB10202 DPA10401-DPB10402 DPA10401-DPB10501 DPA10401-DPB110501 DPA10401-DPB14901 DQA10102-DQB10501 DQA10102-DQB10601 DQA10102-DQB10602 DQA10102-DQB10609 DQA10103-DQB10501 DQA10103-DQB10601 DQA10103-DQB10602 DQA10103-DQB10609 DQA10201-DQB10301 DQA10505-DQB10402
GGNEQVDKLVSSGIRKVLFLD

SEQ ID NO: 3544 - protein, 22 aa, Human immunodeficiency virus 1
  source 1..22: note = HLAs: DRB1_0101 DRB1_0102 DRB1_0404 DRB1_0410 DRB1_0701 DRB1_0801 DRB1_0804 DRB1_0806 DRB1_0813 DRB1_0901 DRB1_1001 DRB1_1101 DRB1_1102 DRB1_1103 DRB1_1104 DRB1_1114 DRB1_1201 DRB1_1301 DRB1_1302 DRB1_1303 DRB1_1304 DRB1_1305 DRB1_1312 DRB1_1401 DRB1_1402 DRB1_1404 DRB1_1405 DRB1_1406 DRB1_1454 DRB1_1501 DRB1_1502 DRB1_1503 DRB1_1601 DRB1_1602 DPA10103-DPB10101 DPA10103-DPB10201 DPA10103-DPB10202 DPA10103-DPB10501 DPA10103-DPB11501 DPA10103-DPB11601 DPA10103-DPB11801 DPA10103-DPB11901 DPA10103-DPB13101 DPA10103-DPB13401 DPA10103-DPB14001 DPA10103-DPB14101 DPA10103-DPB14801 DPA10103-DPB15001 DPA10104-DPB10101 DPA10104-DPB11501 DPA10105-DPB10101 DPA10105-DPB11801 DPA10105-DPB15001 DPA10106-DPB10101 DPA10201-DPB10101 DPA10201-DPB110601 DPA10201-DPB11501 DPA10201-DPB11601 DPA10201-DPB11901 DPA10202-DPB10101 DPA10202-DPB10201 DPA10202-DPB10202 DPA10202-DPB10501 DPA10202-DPB110601 DPA10202-DPB11801 DPA10202-DPB11901 DPA10202-DPB13101 DPA10202-DPB13801 DPA10202-DPB16501 DPA10301-DPB10101; note = HLAs: DPA10301-DPB10201 DPA10301-DPB10202 DPA10301-DPB10401 DPA10301-DPB10402 DPA10301-DPB110501 DPA10301-DPB110601 DPA10301-DPB11801 DPA10301-DPB12301 DPA10301-DPB13901 DPA10301-DPB14001 DPA10301-DPB14901 DPA10301-DPB15501 DPA10301-DPB16501 DPA10301-DPB17501 DPA10301-DPB18001 DPA10401-DPB10101 DPA10401-DPB10201 DPA10401-DPB10202 DPA10401-DPB10402 DPA10401-DPB10501 DPA10401-DPB110501 DPA10401-DPB14901 DQA10102-DQB10501 DQA10102-DQB10601 DQA10102-DQB10602 DQA10102-DQB10609 DQA10103-DQB10501 DQA10103-DQB10601 DQA10103-DQB10602 DQA10103-DQB10609 DQA10201-DQB10301 DQA10505-DQB10402
GGNEQVDKLVSSGIRKVLFLDG

SEQ ID NO: 3545 - protein, 23 aa, Human immunodeficiency virus 1
  source 1..23: note = HLAs: DRB1_0101 DRB1_0102 DRB1_0404 DRB1_0410 DRB1_0701 DRB1_0801 DRB1_0804 DRB1_0806 DRB1_0813 DRB1_0901 DRB1_1001 DRB1_1101 DRB1_1102 DRB1_1103 DRB1_1104 DRB1_1114 DRB1_1201 DRB1_1301 DRB1_1302 DRB1_1303 DRB1_1304 DRB1_1305 DRB1_1312 DRB1_1401 DRB1_1402 DRB1_1404 DRB1_1405 DRB1_1406 DRB1_1454 DRB1_1501 DRB1_1502 DRB1_1503 DRB1_1601 DRB1_1602 DPA10103-DPB10101 DPA10103-DPB10201 DPA10103-DPB10202 DPA10103-DPB10501 DPA10103-DPB11501 DPA10103-DPB11601 DPA10103-DPB11801 DPA10103-DPB11901 DPA10103-DPB13101 DPA10103-DPB13401 DPA10103-DPB14001 DPA10103-DPB14101 DPA10103-DPB14801 DPA10103-DPB15001 DPA10104-DPB10101 DPA10104-DPB11501 DPA10105-DPB10101 DPA10105-DPB11801 DPA10105-DPB15001 DPA10106-DPB10101 DPA10201-DPB10101 DPA10201-DPB110601 DPA10201-DPB11501 DPA10201-DPB11601 DPA10201-DPB11901 DPA10202-DPB10101 DPA10202-DPB10201 DPA10202-DPB10202 DPA10202-DPB10501 DPA10202-DPB110601 DPA10202-DPB11801 DPA10202-DPB11901 DPA10202-DPB13101 DPA10202-DPB13801 DPA10202-DPB15501 DPA10202-DPB16501; note = HLAs: DPA10301-DPB10101 DPA10301-DPB10201 DPA10301-DPB10202 DPA10301-DPB10401 DPA10301-DPB10402 DPA10301-DPB110501 DPA10301-DPB110601 DPA10301-DPB11801 DPA10301-DPB12301 DPA10301-DPB13901 DPA10301-DPB14001 DPA10301-DPB14901 DPA10301-DPB15501 DPA10301-DPB16501 DPA10301-DPB17501 DPA10301-DPB18001 DPA10401-DPB10101 DPA10401-DPB10201 DPA10401-DPB10202 DPA10401-DPB10402 DPA10401-DPB10501 DPA10401-DPB110501 DPA10401-DPB14901 DQA10102-DQB10501 DQA10102-DQB10601 DQA10102-DQB10602 DQA10102-DQB10609 DQA10103-DQB10501 DQA10103-DQB10601 DQA10103-DQB10602 DQA10103-DQB10609 DQA10201-DQB10301 DQA10505-DQB10402
GGNEQVDKLVSSGIRKVLFLDGI

SEQ ID NO: 3546 - protein, 15 aa, Human immunodeficiency virus 1
  source 1..15: note = HLAs: DRB1_1001 DQA10102-DQB10501
GHQAAMQMLKDTINE

SEQ ID NO: 3547 - protein, 16 aa, Human immunodeficiency virus 1
  source 1..16: note = HLAs: DQA10102-DQB10501 DQA10102-DQB10609
GHQAAMQMLKDTINEE

SEQ ID NO: 3548 - protein, 17 aa, Human immunodeficiency virus 1
  source 1..17: note = HLAs: DRB1_1001 DPA10301-DPB10101 DQA10102-DQB10501 DQA10102-DQB10609
GHQAAMQMLKDTINEEA

SEQ ID NO: 3549 - protein, 18 aa, Human immunodeficiency virus 1
  source 1..18: note = HLAs: DQA10102-DQB10501
GHQAAMQMLKDTINEEAA

SEQ ID NO: 3550 - protein, 19 aa, Human immunodeficiency virus 1
  source 1..19: note = HLAs: DPA10301-DPB10101 DQA10102-DQB10501 DQA10102-DQB10609
GHQAAMQMLKDTINEEAAE

SEQ ID NO: 3551 - protein, 20 aa, Human immunodeficiency virus 1
  source 1..20: note = HLAs: DRB1_1001 DPA10301-DPB10101 DPA10401-DPB10101 DQA10102-DQB10501 DQA10102-DQB10503 DQA10102-DQB10609 DQA10103-DQB10501 DQA10103-DQB10609
GHQAAMQMLKDTINEEAAEW

SEQ ID NO: 3552 - protein, 21 aa, Human immunodeficiency virus 1
  source 1..21: note = HLAs: DRB1_1001 DPA10301-DPB10101 DPA10401-DPB10101 DQA10102-DQB10501 DQA10102-DQB10609
GHQAAMQMLKDTINEEAAEWD

SEQ ID NO: 3553 - protein, 22 aa, Human immunodeficiency virus 1
  source 1..22: note = HLAs: DRB1_1001 DPA10301-DPB10101 DPA10401-DPB10101 DQA10102-DQB10501 DQA10102-DQB10609
GHQAAMQMLKDTINEEAAEWDR

SEQ ID NO: 3554 - protein, 17 aa, Human immunodeficiency virus 1
  source 1..17: note = HLAs: DRB1_0101
GIGGNEQVDKLVSSGIR

SEQ ID NO: 3555 - protein, 19 aa, Human immunodeficiency virus 1
  source 1..19: note = HLAs: DRB1_0101 DRB1_0102 DRB1_0701 DRB1_0901 DRB1_1001 DRB1_1102 DRB1_1114 DRB1_1301 DRB1_1302 DRB1_1304 DRB1_1406 DPA10103-DPB11501 DPA10104-DPB11501 DPA10202-DPB10101 DPA10202-DPB110601 DPA10202-DPB11901 DPA10301-DPB10101 DPA10301-DPB10201 DPA10301-DPB10202 DPA10301-DPB10401 DPA10301-DPB110601 DPA10301-DPB11801 DPA10301-DPB12301 DPA10301-DPB13901 DPA10301-DPB14001 DPA10401-DPB10101 DPA10401-DPB10201 DPA10401-DPB10202 DQA10102-DQB10501 DQA10102-DQB10601 DQA10103-DQB10601 DQA10103-DQB10609
GIGGNEQVDKLVSSGIRKV

SEQ ID NO: 3556 - protein, 20 aa, Human immunodeficiency virus 1
  source 1..20: note = HLAs: DRB1_0101 DRB1_0102 DRB1_0410 DRB1_0701 DRB1_0801 DRB1_0804 DRB1_0806 DRB1_0813 DRB1_0901 DRB1_1001 DRB1_1101 DRB1_1102 DRB1_1103 DRB1_1104 DRB1_1114 DRB1_1201 DRB1_1301 DRB1_1302 DRB1_1304 DRB1_1305 DRB1_1401 DRB1_1402 DRB1_1404 DRB1_1406 DRB1_1454 DRB1_1501 DRB1_1502 DRB1_1503 DRB1_1601 DRB1_1602 DPA10103-DPB10101 DPA10103-DPB10201 DPA10103-DPB10202 DPA10103-DPB11501 DPA10103-DPB11601 DPA10103-DPB11801 DPA10103-DPB11901 DPA10103-DPB13101 DPA10103-DPB13401 DPA10103-DPB14801 DPA10103-DPB15001 DPA10104-DPB10101 DPA10104-DPB11501 DPA10105-DPB10101 DPA10105-DPB11801 DPA10105-DPB15001 DPA10106-DPB10101 DPA10201-DPB10101 DPA10201-DPB110601 DPA10201-DPB11601 DPA10201-DPB11901 DPA10202-DPB10101 DPA10202-DPB10201 DPA10202-DPB10202 DPA10202-DPB10501 DPA10202-DPB10901 DPA10202-DPB110601 DPA10202-DPB11801 DPA10202-DPB11901 DPA10202-DPB13101 DPA10202-DPB13801 DPA10202-DPB15501 DPA10202-DPB16501 DPA10301-DPB10101 DPA10301-DPB10201 DPA10301-DPB10202 DPA10301-DPB10401 DPA10301-DPB10402; note = HLAs: DPA10301-DPB110501 DPA10301-DPB110601 DPA10301-DPB11801 DPA10301-DPB12301 DPA10301-DPB13901 DPA10301-DPB14001 DPA10301-DPB14901 DPA10301-DPB15501 DPA10301-DPB16501 DPA10301-DPB17501 DPA10301-DPB18001 DPA10401-DPB10101 DPA10401-DPB10201 DPA10401-DPB10202 DPA10401-DPB10501 DQA10102-DQB10501 DQA10102-DQB10601 DQA10102-DQB10602 DQA10102-DQB10609 DQA10103-DQB10501 DQA10103-DQB10601 DQA10103-DQB10602 DQA10103-DQB10608 DQA10103-DQB10609 DQA10201-DQB10301 DQA10201-DQB10303 DQA10505-DQB10402
GIGGNEQVDKLVSSGIRKVL

SEQ ID NO: 3557 - protein, 21 aa, Human immunodeficiency virus 1
  source 1..21: note = HLAs: DRB1_0101 DRB1_0102 DRB1_0410 DRB1_0701 DRB1_0806 DRB1_0813 DRB1_0901 DRB1_1001 DRB1_1102 DRB1_1103 DRB1_1104 DRB1_1114 DRB1_1301 DRB1_1302 DRB1_1304 DRB1_1401 DRB1_1404 DRB1_1405 DRB1_1406 DRB1_1454 DRB1_1501 DRB1_1602 DPA10103-DPB10201 DPA10103-DPB10202 DPA10103-DPB11501 DPA10103-DPB11601 DPA10103-DPB11801 DPA10103-DPB11901 DPA10103-DPB13401 DPA10103-DPB14801 DPA10103-DPB15001 DPA10104-DPB11501 DPA10105-DPB11801 DPA10105-DPB15001 DPA10202-DPB10101 DPA10202-DPB10201 DPA10202-DPB10202 DPA10202-DPB110601 DPA10202-DPB11801 DPA10202-DPB11901 DPA10202-DPB13101 DPA10202-DPB16501 DPA10301-DPB10101 DPA10301-DPB10201 DPA10301-DPB10202 DPA10301-DPB10401 DPA10301-DPB10402 DPA10301-DPB110501 DPA10301-DPB110601 DPA10301-DPB11801 DPA10301-DPB12301 DPA10301-DPB13901 DPA10301-DPB14001 DPA10301-DPB14901 DPA10301-DPB16501 DPA10301-DPB17501 DPA10301-DPB18001 DPA10401-DPB10101 DPA10401-DPB10201 DPA10401-DPB10202 DPA10401-DPB10501 DQA10102-DQB10501 DQA10102-DQB10601 DQA10102-DQB10609; note = HLAs: DQA10103-DQB10501 DQA10103-DQB10601 DQA10103-DQB10602 DQA10103-DQB10609 DQA10201-DQB10301 DQA10505-DQB10402
GIGGNEQVDKLVSSGIRKVLF

SEQ ID NO: 3558 - protein, 22 aa, Human immunodeficiency virus 1
  source 1..22: note = HLAs: DRB1_0101 DRB1_0102 DRB1_0404 DRB1_0410 DRB1_0701 DRB1_0801 DRB1_0804 DRB1_0806 DRB1_0813 DRB1_0901 DRB1_1001 DRB1_1101 DRB1_1102 DRB1_1103 DRB1_1104 DRB1_1114 DRB1_1201 DRB1_1301 DRB1_1302 DRB1_1303 DRB1_1304 DRB1_1305 DRB1_1312 DRB1_1401 DRB1_1402 DRB1_1404 DRB1_1405 DRB1_1406 DRB1_1454 DRB1_1501 DRB1_1502 DRB1_1601 DRB1_1602 DPA10103-DPB10101 DPA10103-DPB10201 DPA10103-DPB10202 DPA10103-DPB11501 DPA10103-DPB11601 DPA10103-DPB11801 DPA10103-DPB11901 DPA10103-DPB13101 DPA10103-DPB13401 DPA10103-DPB14001 DPA10103-DPB14101 DPA10103-DPB14801 DPA10103-DPB15001 DPA10104-DPB10101 DPA10104-DPB11501 DPA10105-DPB10101 DPA10105-DPB11801 DPA10105-DPB15001 DPA10106-DPB10101 DPA10201-DPB10101 DPA10201-DPB110601 DPA10201-DPB11501 DPA10201-DPB11901 DPA10202-DPB10101 DPA10202-DPB10201 DPA10202-DPB10202 DPA10202-DPB10501 DPA10202-DPB110601 DPA10202-DPB11801 DPA10202-DPB11901 DPA10202-DPB13101 DPA10202-DPB13801 DPA10202-DPB16501 DPA10301-DPB10101 DPA10301-DPB10201 DPA10301-DPB10202; note = HLAs: DPA10301-DPB10401 DPA10301-DPB10402 DPA10301-DPB110501 DPA10301-DPB110601 DPA10301-DPB11801 DPA10301-DPB12301 DPA10301-DPB13901 DPA10301-DPB14001 DPA10301-DPB14901 DPA10301-DPB15501 DPA10301-DPB16501 DPA10301-DPB17501 DPA10301-DPB18001 DPA10401-DPB10101 DPA10401-DPB10201 DPA10401-DPB10202 DPA10401-DPB10402 DPA10401-DPB10501 DPA10401-DPB110501 DPA10401-DPB14901 DQA10102-DQB10501 DQA10102-DQB10601 DQA10102-DQB10602 DQA10102-DQB10609 DQA10103-DQB10501 DQA10103-DQB10601 DQA10103-DQB10602 DQA10103-DQB10609 DQA10201-DQB10301 DQA10505-DQB10402
GIGGNEQVDKLVSSGIRKVLFL

SEQ ID NO: 3559 - protein, 23 aa, Human immunodeficiency virus 1
  source 1..23: note = HLAs: DRB1_0101 DRB1_0102 DRB1_0404 DRB1_0410 DRB1_0701 DRB1_0801 DRB1_0804 DRB1_0806 DRB1_0813 DRB1_0901 DRB1_1001 DRB1_1101 DRB1_1102 DRB1_1103 DRB1_1104 DRB1_1114 DRB1_1201 DRB1_1301 DRB1_1302 DRB1_1303 DRB1_1304 DRB1_1305 DRB1_1312 DRB1_1401 DRB1_1402 DRB1_1404 DRB1_1405 DRB1_1406 DRB1_1454 DRB1_1501 DRB1_1502 DRB1_1503 DRB1_1601 DRB1_1602 DPA10103-DPB10101 DPA10103-DPB10201 DPA10103-DPB10202 DPA10103-DPB11501 DPA10103-DPB11601 DPA10103-DPB11801 DPA10103-DPB11901 DPA10103-DPB13101 DPA10103-DPB13401 DPA10103-DPB14001 DPA10103-DPB14101 DPA10103-DPB14801 DPA10103-DPB15001 DPA10104-DPB10101 DPA10104-DPB11501 DPA10105-DPB10101 DPA10105-DPB11801 DPA10105-DPB15001 DPA10106-DPB10101 DPA10201-DPB10101 DPA10201-DPB110601 DPA10201-DPB11501 DPA10201-DPB11901 DPA10202-DPB10101 DPA10202-DPB10201 DPA10202-DPB10202 DPA10202-DPB10501 DPA10202-DPB110601 DPA10202-DPB11801 DPA10202-DPB11901 DPA10202-DPB13101 DPA10202-DPB13801 DPA10202-DPB16501 DPA10301-DPB10101 DPA10301-DPB10201 DPA10301-DPB10202; note = HLAs: DPA10301-DPB10401 DPA10301-DPB10402 DPA10301-DPB110501 DPA10301-DPB110601 DPA10301-DPB11801 DPA10301-DPB12301 DPA10301-DPB13901 DPA10301-DPB14001 DPA10301-DPB14901 DPA10301-DPB15501 DPA10301-DPB16501 DPA10301-DPB17501 DPA10301-DPB18001 DPA10401-DPB10101 DPA10401-DPB10201 DPA10401-DPB10202 DPA10401-DPB10402 DPA10401-DPB10501 DPA10401-DPB110501 DPA10401-DPB14901 DQA10102-DQB10501 DQA10102-DQB10601 DQA10102-DQB10602 DQA10102-DQB10609 DQA10103-DQB10501 DQA10103-DQB10601 DQA10103-DQB10602 DQA10103-DQB10609 DQA10201-DQB10301 DQA10505-DQB10402
GIGGNEQVDKLVSSGIRKVLFLD

SEQ ID NO: 3560 - protein, 24 aa, Human immunodeficiency virus 1
  source 1..24: note = HLAs: DRB1_0101 DRB1_0102 DRB1_0404 DRB1_0410 DRB1_0701 DRB1_0801 DRB1_0804 DRB1_0806 DRB1_0813 DRB1_0901 DRB1_1001 DRB1_1101 DRB1_1102 DRB1_1103 DRB1_1104 DRB1_1114 DRB1_1201 DRB1_1301 DRB1_1302 DRB1_1303 DRB1_1304 DRB1_1305 DRB1_1312 DRB1_1401 DRB1_1402 DRB1_1404 DRB1_1405 DRB1_1406 DRB1_1454 DRB1_1501 DRB1_1502 DRB1_1503 DRB1_1601 DRB1_1602 DPA10103-DPB10101 DPA10103-DPB10201 DPA10103-DPB10202 DPA10103-DPB10501 DPA10103-DPB11501 DPA10103-DPB11601 DPA10103-DPB11801 DPA10103-DPB11901 DPA10103-DPB13101 DPA10103-DPB13401 DPA10103-DPB14001 DPA10103-DPB14101 DPA10103-DPB14801 DPA10103-DPB15001 DPA10104-DPB10101 DPA10104-DPB11501 DPA10105-DPB10101 DPA10105-DPB11801 DPA10105-DPB15001 DPA10106-DPB10101 DPA10201-DPB10101 DPA10201-DPB110601 DPA10201-DPB11501 DPA10201-DPB11601 DPA10201-DPB11901 DPA10202-DPB10101 DPA10202-DPB10201 DPA10202-DPB10202 DPA10202-DPB10501 DPA10202-DPB110601 DPA10202-DPB11801 DPA10202-DPB11901 DPA10202-DPB13101 DPA10202-DPB13801 DPA10202-DPB15501 DPA10202-DPB16501; note = HLAs: DPA10301-DPB10101 DPA10301-DPB10201 DPA10301-DPB10202 DPA10301-DPB10401 DPA10301-DPB10402 DPA10301-DPB110501 DPA10301-DPB110601 DPA10301-DPB11801 DPA10301-DPB12301 DPA10301-DPB13901 DPA10301-DPB14001 DPA10301-DPB14901 DPA10301-DPB15501 DPA10301-DPB16501 DPA10301-DPB17501 DPA10301-DPB18001 DPA10401-DPB10101 DPA10401-DPB10201 DPA10401-DPB10202 DPA10401-DPB10402 DPA10401-DPB10501 DPA10401-DPB110501 DPA10401-DPB14901 DQA10102-DQB10501 DQA10102-DQB10601 DQA10102-DQB10602 DQA10102-DQB10609 DQA10103-DQB10501 DQA10103-DQB10601 DQA10103-DQB10602 DQA10103-DQB10608 DQA10103-DQB10609 DQA10201-DQB10301 DQA10505-DQB10402
GIGGNEQVDKLVSSGIRKVLFLDG

SEQ ID NO: 3561 - protein, 25 aa, Human immunodeficiency virus 1
  source 1..25: note = HLAs: DRB1_0101 DRB1_0102 DRB1_0404 DRB1_0410 DRB1_0701 DRB1_0801 DRB1_0802 DRB1_0804 DRB1_0806 DRB1_0809 DRB1_0813 DRB1_0901 DRB1_1001 DRB1_1101 DRB1_1102 DRB1_1103 DRB1_1104 DRB1_1114 DRB1_1201 DRB1_1301 DRB1_1302 DRB1_1303 DRB1_1304 DRB1_1305 DRB1_1312 DRB1_1401 DRB1_1402 DRB1_1404 DRB1_1405 DRB1_1406 DRB1_1454 DRB1_1501 DRB1_1502 DRB1_1503 DRB1_1601 DRB1_1602 DPA10103-DPB10101 DPA10103-DPB10201 DPA10103-DPB10202 DPA10103-DPB10401 DPA10103-DPB10501 DPA10103-DPB112601 DPA10103-DPB11501 DPA10103-DPB11601 DPA10103-DPB11801 DPA10103-DPB11901 DPA10103-DPB12301 DPA10103-DPB13101 DPA10103-DPB13401 DPA10103-DPB13901 DPA10103-DPB14001 DPA10103-DPB14101 DPA10103-DPB14801 DPA10103-DPB15001 DPA10104-DPB10101 DPA10104-DPB11501 DPA10105-DPB10101 DPA10105-DPB10401 DPA10105-DPB11801 DPA10105-DPB15001 DPA10106-DPB10101 DPA10201-DPB10101 DPA10201-DPB10202 DPA10201-DPB110601 DPA10201-DPB11501 DPA10201-DPB11601 DPA10201-DPB11901 DPA10202-DPB10101 DPA10202-DPB10201 DPA10202-DPB10202 DPA10202-DPB10501; note = HLAs: DPA10202-DPB110601 DPA10202-DPB11801 DPA10202-DPB11901 DPA10202-DPB13101 DPA10202-DPB13801 DPA10202-DPB15501 DPA10202-DPB16501 DPA10301-DPB10101 DPA10301-DPB10201 DPA10301-DPB10202 DPA10301-DPB10401 DPA10301-DPB10402 DPA10301-DPB110501 DPA10301-DPB110601 DPA10301-DPB11801 DPA10301-DPB12301 DPA10301-DPB13901 DPA10301-DPB14001 DPA10301-DPB14901 DPA10301-DPB15501 DPA10301-DPB16501 DPA10301-DPB17501 DPA10301-DPB18001 DPA10401-DPB10101 DPA10401-DPB10201 DPA10401-DPB10202 DPA10401-DPB10402 DPA10401-DPB10501 DPA10401-DPB110501 DPA10401-DPB14901 DQA10102-DQB10501 DQA10102-DQB10601 DQA10102-DQB10602 DQA10102-DQB10609 DQA10103-DQB10501 DQA10103-DQB10601 DQA10103-DQB10602 DQA10103-DQB10608 DQA10103-DQB10609 DQA10201-DQB10301 DQA10505-DQB10402
GIGGNEQVDKLVSSGIRKVLFLDGI

SEQ ID NO: 3562 - protein, 15 aa, Human immunodeficiency virus 1
  source 1..15: note = HLAs: DRB1_1303 DQA10201-DQB10301
GIGGYSAGERIIDII

SEQ ID NO: 3563 - protein, 16 aa, Human immunodeficiency virus 1
  source 1..16: note = HLAs: DQA10102-DQB10609
GIGGYSAGERIIDIIA

SEQ ID NO: 3564 - protein, 17 aa, Human immunodeficiency virus 1
  source 1..17: note = HLAs: DRB1_1102 DRB1_1103 DRB1_1104 DRB1_1301
GIPHPAGLKKKKSVTVL

SEQ ID NO: 3565 - protein, 19 aa, Human immunodeficiency virus 1
  source 1..19: note = HLAs: DRB1_1102 DRB1_1103 DRB1_1301 DRB1_1304 DPA10202-DPB10101 DPA10301-DPB10101 DPA10301-DPB10201 DPA10301-DPB10202 DPA10301-DPB110601 DPA10301-DPB11801 DPA10301-DPB16501 DPA10401-DPB10101
GIPHPAGLKKKKSVTVLDV

SEQ ID NO: 3566 - protein, 20 aa, Human immunodeficiency virus 1
  source 1..20: note = HLAs: DRB1_0101 DRB1_0701 DRB1_0801 DRB1_0804 DRB1_0806 DRB1_0813 DRB1_1001 DRB1_1102 DRB1_1103 DRB1_1104 DRB1_1114 DRB1_1301 DRB1_1302 DRB1_1304 DRB1_1501 DPA10103-DPB10101 DPA10103-DPB11501 DPA10103-DPB11901 DPA10103-DPB13101 DPA10103-DPB15001 DPA10104-DPB10101 DPA10104-DPB11501 DPA10105-DPB10101 DPA10105-DPB15001 DPA10202-DPB10101 DPA10202-DPB110601 DPA10202-DPB11901 DPA10301-DPB10101 DPA10301-DPB10201 DPA10301-DPB10202 DPA10301-DPB10401 DPA10301-DPB110601 DPA10301-DPB11801 DPA10301-DPB12301 DPA10301-DPB13901 DPA10301-DPB14001 DPA10301-DPB16501 DPA10401-DPB10101 DPA10401-DPB10202 DPA10401-DPB10301 DPA10401-DPB10501 DPA10401-DPB11401
GIPHPAGLKKKKSVTVLDVG

SEQ ID NO: 3567 - protein, 21 aa, Human immunodeficiency virus 1
  source 1..21: note = HLAs: DRB1_1102 DRB1_1103 DRB1_1104 DRB1_1301 DRB1_1304 DPA10301-DPB10101 DPA10301-DPB10201 DPA10301-DPB10202 DPA10301-DPB110601 DPA10301-DPB11801 DPA10301-DPB16501 DPA10401-DPB10101
GIPHPAGLKKKKSVTVLDVGD

SEQ ID NO: 3568 - protein, 22 aa, Human immunodeficiency virus 1
  source 1..22: note = HLAs: DRB1_0101 DRB1_0806 DRB1_1001 DRB1_1102 DRB1_1103 DRB1_1104 DRB1_1301 DRB1_1304 DPA10103-DPB10101 DPA10103-DPB11501 DPA10103-DPB15001 DPA10104-DPB10101 DPA10104-DPB11501 DPA10105-DPB10101 DPA10105-DPB15001 DPA10202-DPB10101 DPA10301-DPB10101 DPA10301-DPB10201 DPA10301-DPB10202 DPA10301-DPB110601 DPA10301-DPB11801 DPA10301-DPB16501 DPA10401-DPB10101
GIPHPAGLKKKKSVTVLDVGDA

SEQ ID NO: 3569 - protein, 23 aa, Human immunodeficiency virus 1
  source 1..23: note = HLAs: DRB1_0101 DRB1_0806 DRB1_1001 DRB1_1102 DRB1_1103 DRB1_1104 DRB1_1301 DRB1_1304 DPA10103-DPB10101 DPA10103-DPB11501 DPA10103-DPB15001 DPA10104-DPB10101 DPA10104-DPB11501 DPA10105-DPB10101 DPA10105-DPB15001 DPA10202-DPB10101 DPA10202-DPB110601 DPA10202-DPB11901 DPA10301-DPB10101 DPA10301-DPB10201 DPA10301-DPB10202 DPA10301-DPB110601 DPA10301-DPB11801 DPA10301-DPB16501 DPA10401-DPB10101 DPA10401-DPB10501 DQA10102-DQB10501
GIPHPAGLKKKKSVTVLDVGDAY

SEQ ID NO: 3570 - protein, 24 aa, Human immunodeficiency virus 1
  source 1..24: note = HLAs: DRB1_0101 DRB1_0410 DRB1_0806 DRB1_1001 DRB1_1102 DRB1_1103 DRB1_1104 DRB1_1114 DRB1_1301 DRB1_1302 DRB1_1304 DRB1_1406 DPA10103-DPB10101 DPA10103-DPB11501 DPA10103-DPB15001 DPA10104-DPB10101 DPA10104-DPB11501 DPA10105-DPB10101 DPA10105-DPB15001 DPA10202-DPB10101 DPA10202-DPB110601 DPA10202-DPB11901 DPA10301-DPB10101 DPA10301-DPB10201 DPA10301-DPB10202 DPA10301-DPB10401 DPA10301-DPB110601 DPA10301-DPB11801 DPA10301-DPB12301 DPA10301-DPB13901 DPA10301-DPB14001 DPA10301-DPB16501 DPA10401-DPB10101 DPA10401-DPB10202 DPA10401-DPB10501 DQA10102-DQB10501 DQA10102-DQB10604 DQA10102-DQB10609
GIPHPAGLKKKKSVTVLDVGDAYF

SEQ ID NO: 3571 - protein, 25 aa, Human immunodeficiency virus 1
  source 1..25: note = HLAs: DRB1_0101 DRB1_0404 DRB1_0410 DRB1_0806 DRB1_1001 DRB1_1102 DRB1_1103 DRB1_1104 DRB1_1114 DRB1_1301 DRB1_1302 DRB1_1304 DRB1_1406 DPA10103-DPB10101 DPA10103-DPB11501 DPA10103-DPB15001 DPA10104-DPB10101 DPA10104-DPB11501 DPA10105-DPB10101 DPA10105-DPB15001 DPA10202-DPB10101 DPA10202-DPB110601 DPA10202-DPB11901 DPA10301-DPB10101 DPA10301-DPB10201 DPA10301-DPB10202 DPA10301-DPB10401 DPA10301-DPB110601 DPA10301-DPB11801 DPA10301-DPB12301 DPA10301-DPB13901 DPA10301-DPB14001 DPA10301-DPB16501 DPA10401-DPB10101 DPA10401-DPB10202 DPA10401-DPB10501 DQA10102-DQB10501 DQA10102-DQB10604 DQA10102-DQB10609 DQA10103-DQB10609
GIPHPAGLKKKKSVTVLDVGDAYFS

SEQ ID NO: 3572 - protein, 15 aa, Human immunodeficiency virus 1
  source 1..15: note = HLAs: DQA10201-DQB10301
GIPYNPQSQGVVESM

SEQ ID NO: 3573 - protein, 16 aa, Human immunodeficiency virus 1
  source 1..16: note = HLAs: DQA10201-DQB10301
GIPYNPQSQGVVESMN

SEQ ID NO: 3574 - protein, 17 aa, Human immunodeficiency virus 1
  source 1..17: note = HLAs: DQA10201-DQB10301
GIPYNPQSQGVVESMNK

SEQ ID NO: 3575 - protein, 20 aa, Human immunodeficiency virus 1
  source 1..20: note = HLAs: DQA10201-DQB10301
GIPYNPQSQGVVESMNKELK

SEQ ID NO: 3576 - protein, 23 aa, Human immunodeficiency virus 1
  source 1..23: note = HLAs: DRB1_1102 DRB1_1103 DRB1_1104 DRB1_1301 DRB1_1304 DRB1_1406
GIPYNPQSQGVVESMNKELKKII

SEQ ID NO: 3577 - protein, 24 aa, Human immunodeficiency virus 1
  source 1..24: note = HLAs: DRB1_1102 DRB1_1103 DRB1_1104 DRB1_1301 DRB1_1304 DRB1_1406
GIPYNPQSQGVVESMNKELKKIIG

SEQ ID NO: 3578 - protein, 25 aa, Human immunodeficiency virus 1
  source 1..25: note = HLAs: DRB1_0806 DRB1_1102 DRB1_1103 DRB1_1104 DRB1_1301 DRB1_1304 DRB1_1406
GIPYNPQSQGVVESMNKELKKIIGQ

SEQ ID NO: 3579 - protein, 13 aa, Human immunodeficiency virus 1
  source 1..13: note = HLAs: DPA10103-DPB11501 DPA10104-DPB11501 DPA10301-DPB10101 DPA10301-DPB10201 DPA10301-DPB10202 DPA10301-DPB11801 DPA10301-DPB14001
GIRKVLFLDGIDK

SEQ ID NO: 3580 - protein, 14 aa, Human immunodeficiency virus 1
  source 1..14: note = HLAs: DRB1_0101 DRB1_0301 DRB1_0401 DRB1_0404 DRB1_0410 DRB1_1001 DPA10103-DPB10101 DPA10103-DPB11501 DPA10103-DPB13401 DPA10103-DPB14001 DPA10103-DPB15001 DPA10104-DPB10101 DPA10104-DPB11501 DPA10105-DPB10101 DPA10105-DPB15001 DPA10201-DPB11501 DPA10202-DPB10101 DPA10202-DPB110601 DPA10202-DPB11901 DPA10301-DPB10101 DPA10301-DPB10201 DPA10301-DPB10202 DPA10301-DPB10401 DPA10301-DPB110601 DPA10301-DPB11801 DPA10301-DPB12301 DPA10301-DPB13901 DPA10301-DPB14001 DPA10301-DPB16501 DPA10401-DPB10101 DPA10401-DPB10201 DPA10401-DPB10202 DPA10401-DPB10501 DQA10102-DQB10501 DQA10102-DQB10503 DQA10103-DQB10501
GIRKVLFLDGIDKA

SEQ ID NO: 3581 - protein, 15 aa, Human immunodeficiency virus 1
  source 1..15: note = HLAs: DRB1_0101 DRB1_0102 DRB1_0301 DRB1_0401 DRB1_0404 DRB1_0405 DRB1_0408 DRB1_0410 DRB1_0804 DRB1_0806 DRB1_1001 DRB1_1102 DRB1_1103 DRB1_1104 DRB1_1114 DRB1_1201 DRB1_1202 DRB1_1301 DRB1_1302 DRB1_1304 DRB1_1402 DRB1_1406 DRB1_1501 DRB1_1503 DRB1_1601 DRB1_1602 DPA10103-DPB10101 DPA10103-DPB10201 DPA10103-DPB10202 DPA10103-DPB11501 DPA10103-DPB11601 DPA10103-DPB11801 DPA10103-DPB11901 DPA10103-DPB13101 DPA10103-DPB13401 DPA10103-DPB14001 DPA10103-DPB14101 DPA10103-DPB14801 DPA10103-DPB15001 DPA10104-DPB10101 DPA10104-DPB11501 DPA10105-DPB10101 DPA10105-DPB11801 DPA10105-DPB15001 DPA10201-DPB11501 DPA10202-DPB10101 DPA10202-DPB10201 DPA10202-DPB10202 DPA10202-DPB10501 DPA10202-DPB110601 DPA10202-DPB11801 DPA10202-DPB11901 DPA10202-DPB13101 DPA10202-DPB13801 DPA10202-DPB16501 DPA10301-DPB10101 DPA10301-DPB10201 DPA10301-DPB10202 DPA10301-DPB10401 DPA10301-DPB10402 DPA10301-DPB110501 DPA10301-DPB110601 DPA10301-DPB11801 DPA10301-DPB12301 DPA10301-DPB13901 DPA10301-DPB14001; note = HLAs: DPA10301-DPB14901 DPA10301-DPB15501 DPA10301-DPB16501 DPA10301-DPB17501 DPA10301-DPB18001 DPA10401-DPB10101 DPA10401-DPB10201 DPA10401-DPB10202 DPA10401-DPB10501 DQA10102-DQB10501 DQA10102-DQB10503 DQA10103-DQB10501
GIRKVLFLDGIDKAQ

SEQ ID NO: 3582 - protein, 16 aa, Human immunodeficiency virus 1
  source 1..16: note = HLAs: DRB1_0101 DRB1_0102 DRB1_0301 DRB1_0401 DRB1_0404 DRB1_0405 DRB1_0408 DRB1_0410 DRB1_1001 DRB1_1102 DRB1_1104 DRB1_1114 DRB1_1301 DRB1_1302 DRB1_1304 DRB1_1406 DRB1_1601 DPA10103-DPB10101 DPA10103-DPB10201 DPA10103-DPB10202 DPA10103-DPB11501 DPA10103-DPB11601 DPA10103-DPB11801 DPA10103-DPB11901 DPA10103-DPB13101 DPA10103-DPB13401 DPA10103-DPB14001 DPA10103-DPB14801 DPA10103-DPB15001 DPA10104-DPB10101 DPA10104-DPB11501 DPA10105-DPB10101 DPA10105-DPB11801 DPA10105-DPB15001 DPA10201-DPB11501 DPA10202-DPB10101 DPA10202-DPB10501 DPA10202-DPB110601 DPA10202-DPB11801 DPA10202-DPB11901 DPA10202-DPB13101 DPA10202-DPB13801 DPA10301-DPB10101 DPA10301-DPB10201 DPA10301-DPB10202 DPA10301-DPB10401 DPA10301-DPB10402 DPA10301-DPB110501 DPA10301-DPB110601 DPA10301-DPB11801 DPA10301-DPB12301 DPA10301-DPB13901 DPA10301-DPB14001 DPA10301-DPB14901 DPA10301-DPB16501 DPA10301-DPB18001 DPA10401-DPB10101 DPA10401-DPB10201 DPA10401-DPB10202 DPA10401-DPB10501 DQA10102-DQB10501 DQA10102-DQB10502; note = HLAs: DQA10102-DQB10503 DQA10103-DQB10501
GIRKVLFLDGIDKAQE

SEQ ID NO: 3583 - protein, 17 aa, Human immunodeficiency virus 1
  source 1..17: note = HLAs: DRB1_0101 DRB1_0102 DRB1_0301 DRB1_0401 DRB1_0404 DRB1_0405 DRB1_0408 DRB1_0410 DRB1_0806 DRB1_1001 DRB1_1102 DRB1_1104 DRB1_1301 DRB1_1304 DRB1_1406 DRB1_1601 DPA10103-DPB10101 DPA10103-DPB10201 DPA10103-DPB10202 DPA10103-DPB11501 DPA10103-DPB11601 DPA10103-DPB11801 DPA10103-DPB11901 DPA10103-DPB13101 DPA10103-DPB13401 DPA10103-DPB14001 DPA10103-DPB14801 DPA10103-DPB15001 DPA10104-DPB10101 DPA10104-DPB11501 DPA10105-DPB10101 DPA10105-DPB11801 DPA10105-DPB15001 DPA10201-DPB11501 DPA10202-DPB10101 DPA10202-DPB10501 DPA10202-DPB110601 DPA10202-DPB11801 DPA10202-DPB11901 DPA10202-DPB13101 DPA10202-DPB13801 DPA10202-DPB16501 DPA10301-DPB10101 DPA10301-DPB10201 DPA10301-DPB10202 DPA10301-DPB10401 DPA10301-DPB10402 DPA10301-DPB110501 DPA10301-DPB110601 DPA10301-DPB11801 DPA10301-DPB12301 DPA10301-DPB13901 DPA10301-DPB14001 DPA10301-DPB14901 DPA10301-DPB16501 DPA10301-DPB18001 DPA10401-DPB10101 DPA10401-DPB10201 DPA10401-DPB10202 DPA10401-DPB10501 DQA10102-DQB10501 DQA10102-DQB10503; note = HLAs: DQA10103-DQB10501
GIRKVLFLDGIDKAQEE

SEQ ID NO: 3584 - protein, 18 aa, Human immunodeficiency virus 1
  source 1..18: note = HLAs: DRB1_0301 DRB1_0401 DPA10103-DPB11501 DPA10104-DPB11501 DPA10301-DPB10101 DPA10301-DPB10201 DPA10301-DPB10202 DPA10301-DPB110601 DPA10301-DPB11801 DPA10301-DPB14001 DPA10401-DPB10101 DQA10102-DQB10501
GIRKVLFLDGIDKAQEEH

SEQ ID NO: 3585 - protein, 19 aa, Human immunodeficiency virus 1
  source 1..19: note = HLAs: DRB1_0101 DRB1_0301 DRB1_0401 DRB1_0404 DRB1_0405 DRB1_0408 DRB1_0410 DRB1_1001 DRB1_1406 DPA10103-DPB10101 DPA10103-DPB11501 DPA10103-DPB15001 DPA10104-DPB10101 DPA10104-DPB11501 DPA10105-DPB10101 DPA10105-DPB15001 DPA10201-DPB11501 DPA10202-DPB10101 DPA10202-DPB110601 DPA10202-DPB11901 DPA10301-DPB10101 DPA10301-DPB10201 DPA10301-DPB10202 DPA10301-DPB10401 DPA10301-DPB110601 DPA10301-DPB11801 DPA10301-DPB12301 DPA10301-DPB13901 DPA10301-DPB14001 DPA10301-DPB16501 DPA10401-DPB10101 DPA10401-DPB10201 DPA10401-DPB10202 DPA10401-DPB10501 DQA10102-DQB10501 DQA10102-DQB10502 DQA10102-DQB10503 DQA10103-DQB10501
GIRKVLFLDGIDKAQEEHE

SEQ ID NO: 3586 - protein, 13 aa, Human immunodeficiency virus 1
  source 1..13: note = HLAs: DRB1_0401 DRB1_0404 DRB1_0408 DRB1_1001 DQA10102-DQB10501
GIRYQYNVLPQGW

SEQ ID NO: 3587 - protein, 14 aa, Human immunodeficiency virus 1
  source 1..14: note = HLAs: DRB1_0101 DRB1_0401 DRB1_0404 DRB1_0405 DRB1_0408 DRB1_0410 DRB1_0802 DRB1_0809 DRB1_0813 DRB1_1001 DRB1_1101 DRB1_1114 DRB1_1302 DRB1_1305 DRB1_1602 DPA10301-DPB10101 DPA10401-DPB10101 DQA10102-DQB10501 DQA10102-DQB10503
GIRYQYNVLPQGWK

SEQ ID NO: 3588 - protein, 15 aa, Human immunodeficiency virus 1
  source 1..15: note = HLAs: DRB1_0101 DRB1_0102 DRB1_0401 DRB1_0404 DRB1_0405 DRB1_0408 DRB1_0410 DRB1_0801 DRB1_0802 DRB1_0804 DRB1_0806 DRB1_0809 DRB1_0813 DRB1_0901 DRB1_1001 DRB1_1101 DRB1_1102 DRB1_1103 DRB1_1104 DRB1_1114 DRB1_1301 DRB1_1302 DRB1_1304 DRB1_1305 DRB1_1402 DRB1_1406 DRB1_1501 DRB1_1601 DRB1_1602 DPA10301-DPB10101 DPA10401-DPB10101 DQA10102-DQB10501 DQA10102-DQB10503 DQA10103-DQB10501
GIRYQYNVLPQGWKG

SEQ ID NO: 3589 - protein, 16 aa, Human immunodeficiency virus 1
  source 1..16: note = HLAs: DRB1_0101 DRB1_0401 DRB1_0404 DRB1_0405 DRB1_0408 DRB1_0410 DRB1_0802 DRB1_0809 DRB1_0813 DRB1_1001 DRB1_1101 DRB1_1114 DRB1_1302 DRB1_1305 DRB1_1406 DRB1_1602 DPA10301-DPB10101 DPA10301-DPB110601 DPA10401-DPB10101 DQA10102-DQB10501 DQA10102-DQB10503 DQA10103-DQB10501
GIRYQYNVLPQGWKGS

SEQ ID NO: 3590 - protein, 17 aa, Human immunodeficiency virus 1
  source 1..17: note = HLAs: DRB1_0101 DRB1_0401 DRB1_0404 DRB1_0405 DRB1_0408 DRB1_0410 DRB1_0813 DRB1_1001 DRB1_1101 DRB1_1114 DRB1_1302 DRB1_1305 DRB1_1406 DRB1_1602 DPA10401-DPB10101 DQA10102-DQB10501
GIRYQYNVLPQGWKGSP

SEQ ID NO: 3591 - protein, 18 aa, Human immunodeficiency virus 1
  source 1..18: note = HLAs: DRB1_1001 DQA10102-DQB10501
GIRYQYNVLPQGWKGSPA

SEQ ID NO: 3592 - protein, 19 aa, Human immunodeficiency virus 1
  source 1..19: note = HLAs: DRB1_0101 DRB1_0401 DRB1_0408 DRB1_0813 DRB1_1001 DPA10401-DPB10101 DQA10102-DQB10501 DQA10102-DQB10503 DQA10103-DQB10501
GIRYQYNVLPQGWKGSPAI

SEQ ID NO: 3593 - protein, 20 aa, Human immunodeficiency virus 1
  source 1..20: note = HLAs: DRB1_0101 DRB1_0401 DRB1_0404 DRB1_0405 DRB1_0408 DRB1_0410 DRB1_0801 DRB1_0802 DRB1_0809 DRB1_0813 DRB1_1001 DRB1_1101 DRB1_1104 DRB1_1114 DRB1_1302 DRB1_1305 DRB1_1406 DRB1_1602 DPA10103-DPB15001 DPA10105-DPB15001 DPA10301-DPB10101 DPA10301-DPB10201 DPA10301-DPB10202 DPA10301-DPB110601 DPA10301-DPB11801 DPA10401-DPB10101 DPA10401-DPB10501 DQA10102-DQB10501 DQA10102-DQB10503 DQA10103-DQB10501 DQA10505-DQB10402
GIRYQYNVLPQGWKGSPAIF

SEQ ID NO: 3594 - protein, 21 aa, Human immunodeficiency virus 1
  source 1..21: note = HLAs: DRB1_0101 DRB1_0401 DRB1_0408 DRB1_1001 DRB1_1101 DRB1_1305 DPA10301-DPB10101 DPA10401-DPB10101 DQA10102-DQB10501 DQA10103-DQB10501 DQA10505-DQB10402
GIRYQYNVLPQGWKGSPAIFQ

SEQ ID NO: 3595 - protein, 14 aa, Human immunodeficiency virus 1
  source 1..14: note = HLAs: DRB1_0401 DRB1_0405
GIWQLDCTHLEGKI

SEQ ID NO: 3596 - protein, 15 aa, Human immunodeficiency virus 1
  source 1..15: note = HLAs: DRB1_0101 DRB1_0401 DRB1_0405 DRB1_0408 DRB1_1001 DRB1_1303
GIWQLDCTHLEGKII

SEQ ID NO: 3597 - protein, 16 aa, Human immunodeficiency virus 1
  source 1..16: note = HLAs: DRB1_0101 DRB1_0401 DRB1_0405
GIWQLDCTHLEGKIIL

SEQ ID NO: 3598 - protein, 17 aa, Human immunodeficiency virus 1
  source 1..17: note = HLAs: DRB1_0101 DRB1_0401 DRB1_0405 DRB1_1001
GIWQLDCTHLEGKIILV

SEQ ID NO: 3599 - protein, 18 aa, Human immunodeficiency virus 1
  source 1..18: note = HLAs: DPA10301-DPB10202
GIWQLDCTHLEGKIILVA

SEQ ID NO: 3600 - protein, 19 aa, Human immunodeficiency virus 1
  source 1..19: note = HLAs: DRB1_0101 DRB1_1001 DPA10103-DPB11501 DPA10104-DPB11501 DPA10301-DPB10101 DPA10301-DPB10201 DPA10301-DPB10202 DPA10301-DPB110601 DPA10301-DPB11801 DPA10301-DPB14001 DPA10301-DPB16501 DPA10401-DPB10101 DPA10401-DPB10202 DQA10102-DQB10501
GIWQLDCTHLEGKIILVAV

SEQ ID NO: 3601 - protein, 20 aa, Human immunodeficiency virus 1
  source 1..20: note = HLAs: DRB1_0101 DRB1_0102 DRB1_0405 DRB1_1001 DPA10103-DPB10101 DPA10103-DPB11501 DPA10104-DPB10101 DPA10104-DPB11501 DPA10105-DPB10101 DPA10202-DPB10101 DPA10202-DPB110601 DPA10202-DPB11901 DPA10301-DPB10101 DPA10301-DPB10201 DPA10301-DPB10202 DPA10301-DPB10401 DPA10301-DPB10402 DPA10301-DPB110501 DPA10301-DPB110601 DPA10301-DPB11801 DPA10301-DPB12301 DPA10301-DPB13901 DPA10301-DPB14001 DPA10301-DPB14901 DPA10301-DPB16501 DPA10301-DPB18001 DPA10401-DPB10101 DPA10401-DPB10201 DPA10401-DPB10202 DPA10401-DPB10501 DQA10102-DQB10501
GIWQLDCTHLEGKIILVAVH

SEQ ID NO: 3602 - protein, 21 aa, Human immunodeficiency virus 1
  source 1..21: note = HLAs: DRB1_0101 DRB1_1001 DPA10103-DPB11501 DPA10104-DPB11501 DPA10301-DPB10101 DPA10301-DPB10201 DPA10301-DPB10202 DPA10301-DPB110601 DPA10301-DPB11801 DPA10301-DPB14001 DPA10301-DPB16501 DPA10401-DPB10101 DQA10102-DQB10501
GIWQLDCTHLEGKIILVAVHV

SEQ ID NO: 3603 - protein, 22 aa, Human immunodeficiency virus 1
  source 1..22: note = HLAs: DRB1_0101 DRB1_1001 DPA10103-DPB11501 DPA10104-DPB11501 DPA10301-DPB10101 DPA10301-DPB10201 DPA10301-DPB10202 DPA10301-DPB110601 DPA10301-DPB11801 DPA10301-DPB14001 DPA10301-DPB16501 DPA10401-DPB10101 DPA10401-DPB10202 DQA10102-DQB10501 DQA10103-DQB10501
GIWQLDCTHLEGKIILVAVHVA

SEQ ID NO: 3604 - protein, 23 aa, Human immunodeficiency virus 1
  source 1..23: note = HLAs: DRB1_0101 DRB1_1001 DPA10103-DPB11501 DPA10104-DPB11501 DPA10301-DPB10101 DPA10301-DPB10201 DPA10301-DPB10202 DPA10301-DPB110601 DPA10301-DPB11801 DPA10301-DPB14001 DPA10301-DPB16501 DPA10401-DPB10101 DPA10401-DPB10201 DPA10401-DPB10202 DQA10102-DQB10501 DQA10103-DQB10501
GIWQLDCTHLEGKIILVAVHVAS

SEQ ID NO: 3605 - protein, 24 aa, Human immunodeficiency virus 1
  source 1..24: note = HLAs: DRB1_0101 DRB1_0102 DRB1_0404 DRB1_0405 DRB1_0408 DRB1_0410 DRB1_1001 DRB1_1406 DPA10103-DPB11501 DPA10104-DPB11501 DPA10202-DPB10101 DPA10301-DPB10101 DPA10301-DPB10201 DPA10301-DPB10202 DPA10301-DPB10401 DPA10301-DPB110601 DPA10301-DPB11801 DPA10301-DPB12301 DPA10301-DPB13901 DPA10301-DPB14001 DPA10301-DPB16501 DPA10401-DPB10101 DPA10401-DPB10201 DPA10401-DPB10202 DQA10102-DQB10501 DQA10103-DQB10501 DQA10103-DQB10601 DQA10103-DQB10609
GIWQLDCTHLEGKIILVAVHVASG

SEQ ID NO: 3606 - protein, 25 aa, Human immunodeficiency virus 1
  source 1..25: note = HLAs: DRB1_0101 DRB1_0102 DRB1_0404 DRB1_0405 DRB1_0408 DRB1_0410 DRB1_0701 DRB1_0802 DRB1_0804 DRB1_0809 DRB1_0813 DRB1_1001 DRB1_1304 DRB1_1406 DPA10103-DPB11501 DPA10104-DPB11501 DPA10202-DPB10101 DPA10301-DPB10101 DPA10301-DPB10201 DPA10301-DPB10202 DPA10301-DPB10401 DPA10301-DPB110601 DPA10301-DPB11801 DPA10301-DPB12301 DPA10301-DPB13901 DPA10301-DPB14001 DPA10301-DPB16501 DPA10401-DPB10101 DPA10401-DPB10201 DPA10401-DPB10202 DPA10401-DPB10501 DQA10102-DQB10501 DQA10102-DQB10601 DQA10102-DQB10609 DQA10103-DQB10501 DQA10103-DQB10601 DQA10103-DQB10609
GIWQLDCTHLEGKIILVAVHVASGY

SEQ ID NO: 3607 - protein, 13 aa, Human immunodeficiency virus 1
  source 1..13: note = HLAs: DRB1_0404 DRB1_0408 DRB1_1001 DQA10102-DQB10501
GKIILVAVHVASG

SEQ ID NO: 3608 - protein, 14 aa, Human immunodeficiency virus 1
  source 1..14: note = HLAs: DRB1_0101 DRB1_0401 DRB1_0404 DRB1_0408 DRB1_0410 DRB1_0802 DRB1_0804 DRB1_0809 DRB1_0813 DRB1_1001 DRB1_1406 DQA10102-DQB10501 DQA10102-DQB10503 DQA10102-DQB10602 DQA10102-DQB10609 DQA10102-DQB10611 DQA10103-DQB10501 DQA10103-DQB10601 DQA10103-DQB10602 DQA10103-DQB10609 DQA10201-DQB10303 DQA10506-DQB10303
GKIILVAVHVASGY

SEQ ID NO: 3609 - protein, 24 aa, Human immunodeficiency virus 1
  source 1..24: note = HLAs: DRB1_1104
GKISKIGPENPYNTPVFAIKKKDS

SEQ ID NO: 3610 - protein, 25 aa, Human immunodeficiency virus 1
  source 1..25: note = HLAs: DRB1_0806 DRB1_1101 DRB1_1103 DRB1_1104 DRB1_1304 DRB1_1305
GKISKIGPENPYNTPVFAIKKKDST

SEQ ID NO: 3611 - protein, 13 aa, Human immunodeficiency virus 1
  source 1..13: note = HLAs: DQA10101-DQB10601 DQA10102-DQB10601 DQA10102-DQB10602 DQA10102-DQB10609 DQA10102-DQB10610 DQA10102-DQB10611 DQA10103-DQB10601 DQA10103-DQB10602 DQA10103-DQB10609 DQA10201-DQB10301
GKLNWASQIYPGI

SEQ ID NO: 3612 - protein, 14 aa, Human immunodeficiency virus 1
  source 1..14: note = HLAs: DPA10103-DPB11501 DPA10104-DPB11501 DPA10301-DPB10201 DPA10301-DPB10202 DPA10401-DPB10101 DPA10401-DPB10201 DQA10101-DQB10601 DQA10101-DQB10602 DQA10102-DQB10501 DQA10102-DQB10503 DQA10102-DQB10601 DQA10102-DQB10602 DQA10102-DQB10603 DQA10102-DQB10609 DQA10102-DQB10610 DQA10102-DQB10611 DQA10102-DQB10614 DQA10103-DQB10601 DQA10103-DQB10602 DQA10103-DQB10603 DQA10103-DQB10609 DQA10103-DQB10614 DQA10104-DQB10602 DQA10105-DQB10602 DQA10201-DQB10301 DQA10201-DQB10303 DQA10301-DQB10301 DQA10302-DQB10301 DQA10303-DQB10301 DQA10401-DQB10301 DQA10401-DQB10319 DQA10501-DQB10301 DQA10501-DQB10319 DQA10503-DQB10301 DQA10505-DQB10301 DQA10505-DQB10309 DQA10505-DQB10319 DQA10506-DQB10303 DQA10508-DQB10301 DQA10509-DQB10301 DQA10601-DQB10301
GKLNWASQIYPGIK

SEQ ID NO: 3613 - protein, 15 aa, Human immunodeficiency virus 1
  source 1..15: note = HLAs: DRB1_0101 DRB1_0701 DRB1_0901 DRB1_1001 DRB1_1102 DRB1_1301 DRB1_1304 DRB1_1501 DRB1_1502 DRB1_1503 DRB1_1602 DPA10103-DPB10101 DPA10103-DPB10201 DPA10103-DPB10202 DPA10103-DPB11501 DPA10103-DPB13401 DPA10103-DPB14801 DPA10104-DPB10101 DPA10104-DPB11501 DPA10105-DPB10101 DPA10201-DPB11501 DPA10202-DPB10101 DPA10202-DPB10201 DPA10202-DPB10202 DPA10301-DPB10101 DPA10301-DPB10201 DPA10301-DPB10202 DPA10301-DPB10401 DPA10301-DPB110601 DPA10301-DPB11801 DPA10301-DPB12301 DPA10301-DPB13901 DPA10301-DPB14001 DPA10401-DPB10101 DPA10401-DPB10201 DPA10401-DPB10202 DQA10101-DQB10601 DQA10101-DQB10602 DQA10102-DQB10501 DQA10102-DQB10503 DQA10102-DQB10601 DQA10102-DQB10602 DQA10102-DQB10603 DQA10102-DQB10609 DQA10102-DQB10610 DQA10102-DQB10611 DQA10102-DQB10614 DQA10103-DQB10501 DQA10103-DQB10503 DQA10103-DQB10601 DQA10103-DQB10602 DQA10103-DQB10603 DQA10103-DQB10604 DQA10103-DQB10608 DQA10103-DQB10609 DQA10103-DQB10614 DQA10104-DQB10602 DQA10105-DQB10602 DQA10201-DQB10301 DQA10201-DQB10303; note = HLAs: DQA10301-DQB10301 DQA10302-DQB10301 DQA10303-DQB10301 DQA10401-DQB10301 DQA10401-DQB10319 DQA10501-DQB10301 DQA10501-DQB10319 DQA10503-DQB10301 DQA10505-DQB10301 DQA10505-DQB10309 DQA10505-DQB10319 DQA10505-DQB10402 DQA10506-DQB10303 DQA10508-DQB10301 DQA10509-DQB10301 DQA10601-DQB10301
GKLNWASQIYPGIKV

SEQ ID NO: 3614 - protein, 15 aa, Human immunodeficiency virus 1
  source 1..15: note = HLAs: DRB1_0101 DRB1_0901 DQA10201-DQB10301 DQA10501-DQB10301 DQA10501-DQB10319 DQA10503-DQB10301 DQA10505-DQB10301 DQA10505-DQB10309 DQA10505-DQB10319 DQA10508-DQB10301 DQA10509-DQB10301
GKWKPKMIGGIGGFI

SEQ ID NO: 3615 - protein, 16 aa, Human immunodeficiency virus 1
  source 1..16: note = HLAs: DRB1_0101 DRB1_0901 DQA10102-DQB10601 DQA10103-DQB10601 DQA10201-DQB10301 DQA10501-DQB10301 DQA10501-DQB10319 DQA10503-DQB10301 DQA10505-DQB10301 DQA10505-DQB10309 DQA10505-DQB10319 DQA10508-DQB10301 DQA10509-DQB10301
GKWKPKMIGGIGGFIK

SEQ ID NO: 3616 - protein, 17 aa, Human immunodeficiency virus 1
  source 1..17: note = HLAs: DRB1_0101 DRB1_0901 DRB1_1001 DQA10102-DQB10601 DQA10103-DQB10601 DQA10201-DQB10301 DQA10501-DQB10301 DQA10501-DQB10319 DQA10503-DQB10301 DQA10505-DQB10301 DQA10505-DQB10309 DQA10505-DQB10319 DQA10508-DQB10301 DQA10509-DQB10301
GKWKPKMIGGIGGFIKV

SEQ ID NO: 3617 - protein, 18 aa, Human immunodeficiency virus 1
  source 1..18: note = HLAs: DRB1_0901 DQA10201-DQB10301 DQA10501-DQB10301 DQA10501-DQB10319 DQA10503-DQB10301 DQA10505-DQB10301 DQA10505-DQB10309 DQA10505-DQB10319 DQA10508-DQB10301 DQA10509-DQB10301
GKWKPKMIGGIGGFIKVR

SEQ ID NO: 3618 - protein, 19 aa, Human immunodeficiency virus 1
  source 1..19: note = HLAs: DRB1_0101 DRB1_0806 DRB1_0901 DRB1_1001 DRB1_1304 DRB1_1501 DQA10102-DQB10501 DQA10102-DQB10601 DQA10103-DQB10601 DQA10201-DQB10301 DQA10501-DQB10301 DQA10501-DQB10319 DQA10503-DQB10301 DQA10505-DQB10301 DQA10505-DQB10309 DQA10505-DQB10319 DQA10508-DQB10301 DQA10509-DQB10301
GKWKPKMIGGIGGFIKVRQ

SEQ ID NO: 3619 - protein, 20 aa, Human immunodeficiency virus 1
  source 1..20: note = HLAs: DRB1_0101 DRB1_0102 DRB1_0701 DRB1_0804 DRB1_0806 DRB1_0901 DRB1_1001 DRB1_1102 DRB1_1103 DRB1_1104 DRB1_1301 DRB1_1304 DRB1_1406 DRB1_1501 DRB1_1503 DRB1_1601 DQA10102-DQB10501 DQA10102-DQB10601 DQA10103-DQB10501 DQA10103-DQB10601 DQA10201-DQB10301 DQA10501-DQB10301 DQA10501-DQB10319 DQA10503-DQB10301 DQA10505-DQB10301 DQA10505-DQB10309 DQA10505-DQB10319 DQA10505-DQB10402 DQA10508-DQB10301 DQA10509-DQB10301
GKWKPKMIGGIGGFIKVRQY

SEQ ID NO: 3620 - protein, 14 aa, Human immunodeficiency virus 1
  source 1..14: note = HLAs: DPA10301-DPB10101 DPA10301-DPB10201 DPA10301-DPB10202 DPA10301-DPB110601 DPA10301-DPB11801 DPA10401-DPB10101
GLKKKKSVTVLDVG

SEQ ID NO: 3621 - protein, 15 aa, Human immunodeficiency virus 1
  source 1..15: note = HLAs: DRB1_0101 DRB1_0701 DRB1_0806 DRB1_1001 DRB1_1102 DRB1_1103 DRB1_1104 DRB1_1301 DRB1_1304 DRB1_1406 DPA10103-DPB11501 DPA10103-DPB15001 DPA10104-DPB11501 DPA10105-DPB15001 DPA10202-DPB10101 DPA10202-DPB110601 DPA10202-DPB11901 DPA10301-DPB10101 DPA10301-DPB10201 DPA10301-DPB10202 DPA10301-DPB110601 DPA10301-DPB11801 DPA10301-DPB14001 DPA10301-DPB16501 DPA10401-DPB10101 DPA10401-DPB10301 DPA10401-DPB11401
GLKKKKSVTVLDVGD

SEQ ID NO: 3622 - protein, 16 aa, Human immunodeficiency virus 1
  source 1..16: note = HLAs: DPA10103-DPB10101 DPA10103-DPB11501 DPA10103-DPB15001 DPA10104-DPB10101 DPA10104-DPB11501 DPA10105-DPB10101 DPA10105-DPB15001 DPA10202-DPB10101 DPA10301-DPB10101 DPA10301-DPB10201 DPA10301-DPB10202 DPA10301-DPB110601 DPA10301-DPB11801 DPA10301-DPB14001 DPA10301-DPB16501 DPA10401-DPB10101 DPA10401-DPB10301 DPA10401-DPB11401
GLKKKKSVTVLDVGDA

SEQ ID NO: 3623 - protein, 17 aa, Human immunodeficiency virus 1
  source 1..17: note = HLAs: DRB1_0101 DRB1_1001 DPA10103-DPB10101 DPA10103-DPB11501 DPA10103-DPB15001 DPA10104-DPB10101 DPA10104-DPB11501 DPA10105-DPB10101 DPA10105-DPB15001 DPA10202-DPB10101 DPA10202-DPB110601 DPA10202-DPB11901 DPA10301-DPB10101 DPA10301-DPB10201 DPA10301-DPB10202 DPA10301-DPB110601 DPA10301-DPB11801 DPA10301-DPB14001 DPA10301-DPB16501 DPA10401-DPB10101 DPA10401-DPB11401 DQA10102-DQB10501
GLKKKKSVTVLDVGDAY

SEQ ID NO: 3624 - protein, 18 aa, Human immunodeficiency virus 1
  source 1..18: note = HLAs: DPA10301-DPB10101 DPA10401-DPB10101 DQA10102-DQB10501 DQA10102-DQB10609
GLKKKKSVTVLDVGDAYF

SEQ ID NO: 3625 - protein, 19 aa, Human immunodeficiency virus 1
  source 1..19: note = HLAs: DRB1_0101 DRB1_0404 DRB1_1001 DPA10103-DPB10101 DPA10103-DPB11501 DPA10103-DPB15001 DPA10104-DPB10101 DPA10104-DPB11501 DPA10105-DPB10101 DPA10105-DPB15001 DPA10202-DPB10101 DPA10301-DPB10101 DPA10301-DPB10201 DPA10301-DPB10202 DPA10301-DPB10401 DPA10301-DPB110601 DPA10301-DPB11801 DPA10301-DPB12301 DPA10301-DPB13901 DPA10301-DPB14001 DPA10301-DPB16501 DPA10401-DPB10101 DPA10401-DPB10501 DQA10102-DQB10501 DQA10102-DQB10503 DQA10102-DQB10604 DQA10102-DQB10609 DQA10103-DQB10501 DQA10103-DQB10609 DQA10501-DQB10201 DQA10505-DQB10201 DQA10505-DQB10202
GLKKKKSVTVLDVGDAYFS

SEQ ID NO: 3626 - protein, 20 aa, Human immunodeficiency virus 1
  source 1..20: note = HLAs: DRB1_0101 DRB1_0301 DRB1_0404 DRB1_0410 DRB1_0806 DRB1_1001 DRB1_1102 DRB1_1301 DRB1_1304 DPA10103-DPB10101 DPA10103-DPB11501 DPA10103-DPB11601 DPA10103-DPB11901 DPA10103-DPB13101 DPA10103-DPB15001 DPA10104-DPB10101 DPA10104-DPB11501 DPA10105-DPB10101 DPA10105-DPB15001 DPA10106-DPB10101 DPA10201-DPB10101 DPA10202-DPB10101 DPA10202-DPB10501 DPA10202-DPB110601 DPA10202-DPB11101 DPA10202-DPB11901 DPA10202-DPB13101 DPA10202-DPB13801 DPA10202-DPB15501 DPA10301-DPB10101 DPA10301-DPB10201 DPA10301-DPB10202 DPA10301-DPB10401 DPA10301-DPB10402 DPA10301-DPB110501 DPA10301-DPB110601 DPA10301-DPB11101 DPA10301-DPB11801 DPA10301-DPB12301 DPA10301-DPB13901 DPA10301-DPB14001 DPA10301-DPB14901 DPA10301-DPB15501 DPA10301-DPB16501 DPA10301-DPB18001 DPA10401-DPB10101 DPA10401-DPB10201 DPA10401-DPB10202 DPA10401-DPB10301 DPA10401-DPB10501 DPA10401-DPB11401 DQA10102-DQB10501 DQA10102-DQB10503 DQA10102-DQB10604 DQA10102-DQB10609 DQA10103-DQB10501 DQA10103-DQB10609
GLKKKKSVTVLDVGDAYFSV

SEQ ID NO: 3627 - protein, 21 aa, Human immunodeficiency virus 1
  source 1..21: note = HLAs: DRB1_0101 DRB1_0404 DRB1_0410 DRB1_1001 DPA10103-DPB10101 DPA10103-DPB11501 DPA10103-DPB15001 DPA10104-DPB10101 DPA10104-DPB11501 DPA10105-DPB10101 DPA10105-DPB15001 DPA10202-DPB10101 DPA10301-DPB10101 DPA10301-DPB10201 DPA10301-DPB10202 DPA10301-DPB10401 DPA10301-DPB110601 DPA10301-DPB11801 DPA10301-DPB12301 DPA10301-DPB13901 DPA10301-DPB14001 DPA10301-DPB16501 DPA10401-DPB10101 DPA10401-DPB10202 DPA10401-DPB10501 DQA10102-DQB10501 DQA10102-DQB10503 DQA10102-DQB10604 DQA10102-DQB10609 DQA10103-DQB10501 DQA10103-DQB10609
GLKKKKSVTVLDVGDAYFSVP

SEQ ID NO: 3628 - protein, 22 aa, Human immunodeficiency virus 1
  source 1..22: note = HLAs: DRB1_0101 DRB1_0404 DRB1_0410 DRB1_1001 DPA10103-DPB10101 DPA10103-DPB11501 DPA10103-DPB15001 DPA10104-DPB10101 DPA10104-DPB11501 DPA10105-DPB10101 DPA10105-DPB15001 DPA10202-DPB10101 DPA10202-DPB110601 DPA10202-DPB11901 DPA10301-DPB10101 DPA10301-DPB10201 DPA10301-DPB10202 DPA10301-DPB10401 DPA10301-DPB110601 DPA10301-DPB11801 DPA10301-DPB12301 DPA10301-DPB13901 DPA10301-DPB14001 DPA10301-DPB16501 DPA10401-DPB10101 DPA10401-DPB10201 DPA10401-DPB10202 DPA10401-DPB10501 DQA10102-DQB10501 DQA10102-DQB10503 DQA10102-DQB10604 DQA10102-DQB10609 DQA10103-DQB10501 DQA10103-DQB10609
GLKKKKSVTVLDVGDAYFSVPL

SEQ ID NO: 3629 - protein, 23 aa, Human immunodeficiency virus 1
  source 1..23: note = HLAs: DRB1_0101 DRB1_0404 DRB1_0410 DRB1_1001 DPA10103-DPB10101 DPA10103-DPB11501 DPA10103-DPB15001 DPA10104-DPB10101 DPA10104-DPB11501 DPA10105-DPB10101 DPA10105-DPB15001 DPA10202-DPB10101 DPA10202-DPB110601 DPA10202-DPB11901 DPA10301-DPB10101 DPA10301-DPB10201 DPA10301-DPB10202 DPA10301-DPB10401 DPA10301-DPB110601 DPA10301-DPB11801 DPA10301-DPB12301 DPA10301-DPB13901 DPA10301-DPB14001 DPA10301-DPB16501 DPA10401-DPB10101 DPA10401-DPB10201 DPA10401-DPB10202 DPA10401-DPB10501 DQA10101-DQB10501 DQA10102-DQB10501 DQA10102-DQB10503 DQA10102-DQB10604 DQA10102-DQB10609 DQA10103-DQB10501 DQA10103-DQB10609 DQA10104-DQB10501 DQA10105-DQB10501
GLKKKKSVTVLDVGDAYFSVPLD

SEQ ID NO: 3630 - protein, 13 aa, Human immunodeficiency virus 1
  source 1..13: note = HLAs: DRB1_0101 DRB1_0401 DRB1_0404 DRB1_0405 DRB1_0408 DRB1_0410 DRB1_1001 DRB1_1101 DRB1_1104 DRB1_1305 DRB1_1406 DQA10102-DQB10501
GLNKIVRMYSPVS

SEQ ID NO: 3631 - protein, 14 aa, Human immunodeficiency virus 1
  source 1..14: note = HLAs: DRB1_0101 DRB1_0102 DRB1_0401 DRB1_0402 DRB1_0404 DRB1_0405 DRB1_0408 DRB1_0410 DRB1_0701 DRB1_0801 DRB1_0802 DRB1_0803 DRB1_0804 DRB1_0806 DRB1_0809 DRB1_0813 DRB1_0901 DRB1_1001 DRB1_1101 DRB1_1102 DRB1_1103 DRB1_1104 DRB1_1114 DRB1_1301 DRB1_1302 DRB1_1304 DRB1_1305 DRB1_1402 DRB1_1406 DRB1_1501 DRB1_1502 DRB1_1503 DRB1_1601 DRB1_1602 DPA10301-DPB10202 DQA10102-DQB10501 DQA10102-DQB10503 DQA10103-DQB10501 DQA10103-DQB10503 DQA10103-DQB10609 DQA10505-DQB10402
GLNKIVRMYSPVSI

SEQ ID NO: 3632 - protein, 15 aa, Human immunodeficiency virus 1
  source 1..15: note = HLAs: DRB1_0101 DRB1_0102 DRB1_0103 DRB1_0401 DRB1_0402 DRB1_0403 DRB1_0404 DRB1_0405 DRB1_0406 DRB1_0407 DRB1_0408 DRB1_0410 DRB1_0411 DRB1_0701 DRB1_0801 DRB1_0802 DRB1_0803 DRB1_0804 DRB1_0806 DRB1_0809 DRB1_0813 DRB1_0901 DRB1_1001 DRB1_1101 DRB1_1102 DRB1_1103 DRB1_1104 DRB1_1114 DRB1_1201 DRB1_1202 DRB1_1301 DRB1_1302 DRB1_1303 DRB1_1304 DRB1_1305 DRB1_1312 DRB1_1401 DRB1_1402 DRB1_1403 DRB1_1404 DRB1_1405 DRB1_1406 DRB1_1418 DRB1_1454 DRB1_1501 DRB1_1502 DRB1_1503 DRB1_1601 DRB1_1602 DPA10103-DPB10101 DPA10103-DPB10201 DPA10103-DPB10202 DPA10103-DPB10301 DPA10103-DPB10501 DPA10103-DPB10601 DPA10103-DPB10901 DPA10103-DPB11001 DPA10103-DPB11101 DPA10103-DPB112401 DPA10103-DPB11301 DPA10103-DPB113101 DPA10103-DPB113301 DPA10103-DPB11401 DPA10103-DPB11501 DPA10103-DPB11601 DPA10103-DPB11701 DPA10103-DPB11801 DPA10103-DPB11901 DPA10103-DPB12001 DPA10103-DPB12101 DPA10103-DPB12901 DPA10103-DPB13001 DPA10103-DPB13101 DPA10103-DPB13401 DPA10103-DPB14001 DPA10103-DPB14101; note = HLAs: DPA10103-DPB14801 DPA10103-DPB15001 DPA10103-DPB15501 DPA10104-DPB10101 DPA10104-DPB10301 DPA10104-DPB11001 DPA10104-DPB11301 DPA10104-DPB11501 DPA10105-DPB10101 DPA10105-DPB10301 DPA10105-DPB11801 DPA10105-DPB15001 DPA10201-DPB10601 DPA10201-DPB10901 DPA10201-DPB110601 DPA10201-DPB11301 DPA10201-DPB113301 DPA10201-DPB11401 DPA10201-DPB11501 DPA10201-DPB11901 DPA10201-DPB15501 DPA10202-DPB10101 DPA10202-DPB10201 DPA10202-DPB10202 DPA10202-DPB10301 DPA10202-DPB10501 DPA10202-DPB10901 DPA10202-DPB110601 DPA10202-DPB11101 DPA10202-DPB11301 DPA10202-DPB113101 DPA10202-DPB11401 DPA10202-DPB11701 DPA10202-DPB11801 DPA10202-DPB11901 DPA10202-DPB12101 DPA10202-DPB12901 DPA10202-DPB13001 DPA10202-DPB13101 DPA10202-DPB13801 DPA10202-DPB14501 DPA10202-DPB15501 DPA10202-DPB16501 DPA10202-DPB18501 DPA10301-DPB10101 DPA10301-DPB10201 DPA10301-DPB10202 DPA10301-DPB10301 DPA10301-DPB10401 DPA10301-DPB10402 DPA10301-DPB10901 DPA10301-DPB110501 DPA10301-DPB110601 DPA10301-DPB11101; note = HLAs: DPA10301-DPB11301 DPA10301-DPB11701 DPA10301-DPB11801 DPA10301-DPB12301 DPA10301-DPB13901 DPA10301-DPB14001 DPA10301-DPB14901 DPA10301-DPB15501 DPA10301-DPB16501 DPA10301-DPB17501 DPA10301-DPB18001 DPA10401-DPB10101 DPA10401-DPB10201 DPA10401-DPB10202 DPA10401-DPB10301 DPA10401-DPB10402 DPA10401-DPB10501 DPA10401-DPB110501 DPA10401-DPB11301 DPA10401-DPB113301 DPA10401-DPB11401 DPA10401-DPB14901 DQA10102-DQB10501 DQA10102-DQB10503 DQA10102-DQB10601 DQA10102-DQB10602 DQA10102-DQB10609 DQA10103-DQB10501 DQA10103-DQB10503 DQA10103-DQB10601 DQA10103-DQB10602 DQA10103-DQB10604 DQA10103-DQB10608 DQA10103-DQB10609 DQA10201-DQB10301 DQA10201-DQB10303 DQA10501-DQB10501 DQA10505-DQB10402 DQA10505-DQB10501 DQA10506-DQB10303
GLNKIVRMYSPVSIL

SEQ ID NO: 3633 - protein, 16 aa, Human immunodeficiency virus 1
  source 1..16: note = HLAs: DRB1_0101 DRB1_0102 DRB1_0401 DRB1_0402 DRB1_0403 DRB1_0404 DRB1_0405 DRB1_0406 DRB1_0407 DRB1_0408 DRB1_0410 DRB1_0701 DRB1_0801 DRB1_0802 DRB1_0803 DRB1_0804 DRB1_0806 DRB1_0809 DRB1_0813 DRB1_0901 DRB1_1001 DRB1_1101 DRB1_1102 DRB1_1103 DRB1_1104 DRB1_1114 DRB1_1201 DRB1_1202 DRB1_1301 DRB1_1302 DRB1_1304 DRB1_1305 DRB1_1312 DRB1_1401 DRB1_1402 DRB1_1403 DRB1_1404 DRB1_1406 DRB1_1454 DRB1_1501 DRB1_1502 DRB1_1503 DRB1_1601 DRB1_1602 DPA10103-DPB10101 DPA10103-DPB10301 DPA10103-DPB10501 DPA10103-DPB10601 DPA10103-DPB10901 DPA10103-DPB11001 DPA10103-DPB11101 DPA10103-DPB112401 DPA10103-DPB11301 DPA10103-DPB113101 DPA10103-DPB113301 DPA10103-DPB11401 DPA10103-DPB11501 DPA10103-DPB11601 DPA10103-DPB11701 DPA10103-DPB11901 DPA10103-DPB12001 DPA10103-DPB12101 DPA10103-DPB12901 DPA10103-DPB13001 DPA10103-DPB13101 DPA10103-DPB13401 DPA10103-DPB15001 DPA10103-DPB15501 DPA10104-DPB10101 DPA10104-DPB10301 DPA10104-DPB11001 DPA10104-DPB11301 DPA10104-DPB11501 DPA10105-DPB10101; note = HLAs: DPA10105-DPB10301 DPA10105-DPB15001 DPA10201-DPB10301 DPA10201-DPB10601 DPA10201-DPB10901 DPA10201-DPB11301 DPA10201-DPB113301 DPA10201-DPB11401 DPA10201-DPB11501 DPA10201-DPB14501 DPA10201-DPB15501 DPA10202-DPB10101 DPA10202-DPB10202 DPA10202-DPB10301 DPA10202-DPB10501 DPA10202-DPB10901 DPA10202-DPB110601 DPA10202-DPB11101 DPA10202-DPB11301 DPA10202-DPB113101 DPA10202-DPB11401 DPA10202-DPB11701 DPA10202-DPB11801 DPA10202-DPB11901 DPA10202-DPB12101 DPA10202-DPB12901 DPA10202-DPB13001 DPA10202-DPB13101 DPA10202-DPB13801 DPA10202-DPB14501 DPA10202-DPB15501 DPA10202-DPB16501 DPA10202-DPB18501 DPA10301-DPB10101 DPA10301-DPB10201 DPA10301-DPB10202 DPA10301-DPB10301 DPA10301-DPB10401 DPA10301-DPB10901 DPA10301-DPB110601 DPA10301-DPB11101 DPA10301-DPB11301 DPA10301-DPB11701 DPA10301-DPB11801 DPA10301-DPB12301 DPA10301-DPB13901 DPA10301-DPB14001 DPA10301-DPB15501 DPA10301-DPB16501 DPA10401-DPB10101 DPA10401-DPB10201 DPA10401-DPB10202 DPA10401-DPB10301 DPA10401-DPB10501 DPA10401-DPB11301; note = HLAs: DPA10401-DPB113301 DPA10401-DPB11401 DQA10102-DQB10501 DQA10102-DQB10503 DQA10102-DQB10601 DQA10102-DQB10609 DQA10103-DQB10501 DQA10103-DQB10503 DQA10103-DQB10601 DQA10103-DQB10602 DQA10103-DQB10604 DQA10103-DQB10608 DQA10103-DQB10609 DQA10201-DQB10301 DQA10201-DQB10303 DQA10501-DQB10501 DQA10505-DQB10402 DQA10505-DQB10501 DQA10506-DQB10303
GLNKIVRMYSPVSILD

SEQ ID NO: 3634 - protein, 17 aa, Human immunodeficiency virus 1
  source 1..17: note = HLAs: DRB1_0101 DRB1_0102 DRB1_0401 DRB1_0402 DRB1_0403 DRB1_0404 DRB1_0405 DRB1_0406 DRB1_0407 DRB1_0408 DRB1_0410 DRB1_0701 DRB1_0801 DRB1_0802 DRB1_0803 DRB1_0804 DRB1_0806 DRB1_0809 DRB1_0813 DRB1_0901 DRB1_1001 DRB1_1101 DRB1_1102 DRB1_1103 DRB1_1104 DRB1_1114 DRB1_1201 DRB1_1202 DRB1_1301 DRB1_1302 DRB1_1304 DRB1_1305 DRB1_1312 DRB1_1401 DRB1_1402 DRB1_1403 DRB1_1404 DRB1_1405 DRB1_1406 DRB1_1454 DRB1_1501 DRB1_1502 DRB1_1503 DRB1_1601 DRB1_1602 DPA10103-DPB10101 DPA10103-DPB10201 DPA10103-DPB10202 DPA10103-DPB10301 DPA10103-DPB10401 DPA10103-DPB10501 DPA10103-DPB10601 DPA10103-DPB10901 DPA10103-DPB11001 DPA10103-DPB11101 DPA10103-DPB112401 DPA10103-DPB112601 DPA10103-DPB11301 DPA10103-DPB113101 DPA10103-DPB113301 DPA10103-DPB11401 DPA10103-DPB11501 DPA10103-DPB11601 DPA10103-DPB11701 DPA10103-DPB11801 DPA10103-DPB11901 DPA10103-DPB12001 DPA10103-DPB12101 DPA10103-DPB12301 DPA10103-DPB12901 DPA10103-DPB13001 DPA10103-DPB13101 DPA10103-DPB13401 DPA10103-DPB13901 DPA10103-DPB14001; note = HLAs: DPA10103-DPB14101 DPA10103-DPB14801 DPA10103-DPB15001 DPA10103-DPB15501 DPA10103-DPB15901 DPA10104-DPB10101 DPA10104-DPB10301 DPA10104-DPB11001 DPA10104-DPB11301 DPA10104-DPB11501 DPA10105-DPB10101 DPA10105-DPB10301 DPA10105-DPB10401 DPA10105-DPB11801 DPA10105-DPB15001 DPA10106-DPB10101 DPA10106-DPB11101 DPA10201-DPB10101 DPA10201-DPB10301 DPA10201-DPB10601 DPA10201-DPB10901 DPA10201-DPB110601 DPA10201-DPB11101 DPA10201-DPB11301 DPA10201-DPB113101 DPA10201-DPB113301 DPA10201-DPB11401 DPA10201-DPB11501 DPA10201-DPB11601 DPA10201-DPB11701 DPA10201-DPB11901 DPA10201-DPB12601 DPA10201-DPB13001 DPA10201-DPB14501 DPA10201-DPB15501 DPA10201-DPB19101 DPA10202-DPB10101 DPA10202-DPB10201 DPA10202-DPB10202 DPA10202-DPB10301 DPA10202-DPB10401 DPA10202-DPB10501 DPA10202-DPB10901 DPA10202-DPB110601 DPA10202-DPB11101 DPA10202-DPB11301 DPA10202-DPB113101 DPA10202-DPB11401 DPA10202-DPB11701 DPA10202-DPB11801 DPA10202-DPB11901 DPA10202-DPB12101 DPA10202-DPB12901 DPA10202-DPB13001; note = HLAs: DPA10202-DPB13101 DPA10202-DPB13801 DPA10202-DPB14501 DPA10202-DPB15501 DPA10202-DPB16501 DPA10202-DPB18501 DPA10301-DPB10101 DPA10301-DPB10201 DPA10301-DPB10202 DPA10301-DPB10301 DPA10301-DPB10401 DPA10301-DPB10402 DPA10301-DPB10901 DPA10301-DPB110501 DPA10301-DPB110601 DPA10301-DPB11101 DPA10301-DPB11301 DPA10301-DPB11701 DPA10301-DPB11801 DPA10301-DPB12301 DPA10301-DPB13901 DPA10301-DPB14001 DPA10301-DPB14901 DPA10301-DPB15501 DPA10301-DPB16501 DPA10301-DPB17501 DPA10301-DPB18001 DPA10401-DPB10101 DPA10401-DPB10201 DPA10401-DPB10202 DPA10401-DPB10301 DPA10401-DPB10402 DPA10401-DPB10501 DPA10401-DPB110501 DPA10401-DPB11301 DPA10401-DPB113301 DPA10401-DPB11401 DPA10401-DPB14901 DQA10102-DQB10501 DQA10102-DQB10503 DQA10102-DQB10601 DQA10102-DQB10604 DQA10102-DQB10609 DQA10103-DQB10501 DQA10103-DQB10503 DQA10103-DQB10601 DQA10103-DQB10602 DQA10103-DQB10604 DQA10103-DQB10608 DQA10103-DQB10609 DQA10201-DQB10301 DQA10201-DQB10303 DQA10501-DQB10501 DQA10505-DQB10402 DQA10505-DQB10501; note = HLAs: DQA10506-DQB10303
GLNKIVRMYSPVSILDI

SEQ ID NO: 3635 - protein, 20 aa, Human immunodeficiency virus 1
  source 1..20: note = HLAs: DPA10202-DPB10101 DPA10301-DPB10101 DPA10301-DPB110601 DPA10301-DPB16501 DPA10401-DPB10101
GMDGPKVKQWPLTEEKIKAL

SEQ ID NO: 3636 - protein, 14 aa, Human immunodeficiency virus 1
  source 1..14: note = HLAs: DRB1_0101
GNEQVDKLVSSGIR

SEQ ID NO: 3637 - protein, 15 aa, Human immunodeficiency virus 1
  source 1..15: note = HLAs: DRB1_0101 DRB1_0102 DRB1_1001 DRB1_1102 DRB1_1301 DRB1_1304 DRB1_1406
GNEQVDKLVSSGIRK

SEQ ID NO: 3638 - protein, 16 aa, Human immunodeficiency virus 1
  source 1..16: note = HLAs: DRB1_0101 DRB1_0102 DRB1_0701 DRB1_0901 DRB1_1001 DRB1_1102 DRB1_1114 DRB1_1301 DRB1_1302 DRB1_1304 DRB1_1406 DPA10103-DPB10202 DPA10103-DPB11501 DPA10104-DPB11501 DPA10202-DPB10101 DPA10202-DPB10201 DPA10202-DPB10202 DPA10202-DPB110601 DPA10202-DPB11901 DPA10202-DPB13101 DPA10301-DPB10101 DPA10301-DPB10201 DPA10301-DPB10202 DPA10301-DPB10401 DPA10301-DPB110601 DPA10301-DPB11801 DPA10301-DPB12301 DPA10301-DPB13901 DPA10301-DPB14001 DPA10301-DPB16501 DPA10401-DPB10101 DPA10401-DPB10201 DPA10401-DPB10202 DQA10102-DQB10501 DQA10102-DQB10601 DQA10102-DQB10609 DQA10103-DQB10501 DQA10103-DQB10601 DQA10103-DQB10602 DQA10103-DQB10609 DQA10201-DQB10301 DQA10505-DQB10402
GNEQVDKLVSSGIRKV

SEQ ID NO: 3639 - protein, 17 aa, Human immunodeficiency virus 1
  source 1..17: note = HLAs: DRB1_0101 DRB1_0102 DRB1_0410 DRB1_0701 DRB1_0801 DRB1_0804 DRB1_0806 DRB1_0813 DRB1_0901 DRB1_1001 DRB1_1101 DRB1_1102 DRB1_1103 DRB1_1104 DRB1_1114 DRB1_1301 DRB1_1302 DRB1_1304 DRB1_1305 DRB1_1401 DRB1_1402 DRB1_1404 DRB1_1406 DRB1_1454 DRB1_1501 DRB1_1602 DPA10103-DPB10201 DPA10103-DPB10202 DPA10103-DPB11501 DPA10103-DPB11901 DPA10103-DPB13401 DPA10103-DPB14801 DPA10103-DPB15001 DPA10104-DPB11501 DPA10105-DPB15001 DPA10201-DPB110601 DPA10201-DPB11501 DPA10201-DPB11901 DPA10202-DPB10101 DPA10202-DPB10201 DPA10202-DPB10202 DPA10202-DPB10501 DPA10202-DPB110601 DPA10202-DPB11801 DPA10202-DPB11901 DPA10202-DPB13101 DPA10202-DPB13801 DPA10202-DPB16501 DPA10301-DPB10101 DPA10301-DPB10201 DPA10301-DPB10202 DPA10301-DPB10401 DPA10301-DPB10402 DPA10301-DPB110501 DPA10301-DPB110601 DPA10301-DPB11801 DPA10301-DPB12301 DPA10301-DPB13901 DPA10301-DPB14001 DPA10301-DPB14901 DPA10301-DPB16501 DPA10301-DPB17501 DPA10301-DPB18001 DPA10401-DPB10101 DPA10401-DPB10201 DPA10401-DPB10202; note = HLAs: DPA10401-DPB10501 DQA10102-DQB10501 DQA10102-DQB10601 DQA10102-DQB10602 DQA10102-DQB10609 DQA10103-DQB10501 DQA10103-DQB10601 DQA10103-DQB10602 DQA10103-DQB10609 DQA10201-DQB10301 DQA10505-DQB10402
GNEQVDKLVSSGIRKVL

SEQ ID NO: 3640 - protein, 18 aa, Human immunodeficiency virus 1
  source 1..18: note = HLAs: DRB1_0101 DRB1_0701 DRB1_0901 DRB1_1001 DRB1_1102 DRB1_1114 DRB1_1301 DRB1_1302 DRB1_1304 DRB1_1406 DPA10103-DPB10201 DPA10103-DPB10202 DPA10103-DPB11501 DPA10103-DPB13401 DPA10103-DPB14801 DPA10104-DPB11501 DPA10201-DPB11501 DPA10202-DPB10101 DPA10202-DPB10201 DPA10202-DPB10202 DPA10202-DPB110601 DPA10202-DPB11901 DPA10202-DPB13101 DPA10301-DPB10101 DPA10301-DPB10201 DPA10301-DPB10202 DPA10301-DPB10401 DPA10301-DPB10402 DPA10301-DPB110501 DPA10301-DPB110601 DPA10301-DPB11801 DPA10301-DPB12301 DPA10301-DPB13901 DPA10301-DPB14001 DPA10301-DPB14901 DPA10301-DPB16501 DPA10301-DPB17501 DPA10301-DPB18001 DPA10401-DPB10101 DPA10401-DPB10201 DPA10401-DPB10202 DQA10102-DQB10501 DQA10102-DQB10601 DQA10102-DQB10602 DQA10102-DQB10609 DQA10103-DQB10501 DQA10103-DQB10601 DQA10103-DQB10602 DQA10103-DQB10609 DQA10201-DQB10301
GNEQVDKLVSSGIRKVLF

SEQ ID NO: 3641 - protein, 19 aa, Human immunodeficiency virus 1
  source 1..19: note = HLAs: DRB1_0101 DRB1_0102 DRB1_0404 DRB1_0410 DRB1_0701 DRB1_0801 DRB1_0804 DRB1_0806 DRB1_0813 DRB1_0901 DRB1_1001 DRB1_1101 DRB1_1102 DRB1_1103 DRB1_1104 DRB1_1114 DRB1_1201 DRB1_1301 DRB1_1302 DRB1_1303 DRB1_1304 DRB1_1305 DRB1_1312 DRB1_1401 DRB1_1402 DRB1_1404 DRB1_1405 DRB1_1406 DRB1_1454 DRB1_1501 DRB1_1502 DRB1_1503 DRB1_1602 DPA10103-DPB10101 DPA10103-DPB10201 DPA10103-DPB10202 DPA10103-DPB10401 DPA10103-DPB112601 DPA10103-DPB11501 DPA10103-DPB11601 DPA10103-DPB11801 DPA10103-DPB11901 DPA10103-DPB12301 DPA10103-DPB13101 DPA10103-DPB13401 DPA10103-DPB13901 DPA10103-DPB14001 DPA10103-DPB14101 DPA10103-DPB14801 DPA10103-DPB15001 DPA10103-DPB15901 DPA10104-DPB10101 DPA10104-DPB11501 DPA10105-DPB10101 DPA10105-DPB10401 DPA10105-DPB11801 DPA10105-DPB15001 DPA10106-DPB10101 DPA10201-DPB10101 DPA10201-DPB10201 DPA10201-DPB10202 DPA10201-DPB110601 DPA10201-DPB11501 DPA10201-DPB11601 DPA10201-DPB11901 DPA10202-DPB10101 DPA10202-DPB10201 DPA10202-DPB10202 DPA10202-DPB10401; note = HLAs: DPA10202-DPB10501 DPA10202-DPB10901 DPA10202-DPB110601 DPA10202-DPB11801 DPA10202-DPB11901 DPA10202-DPB13101 DPA10202-DPB13801 DPA10202-DPB15501 DPA10202-DPB16501 DPA10301-DPB10101 DPA10301-DPB10201 DPA10301-DPB10202 DPA10301-DPB10401 DPA10301-DPB10402 DPA10301-DPB110501 DPA10301-DPB110601 DPA10301-DPB11801 DPA10301-DPB12301 DPA10301-DPB13901 DPA10301-DPB14001 DPA10301-DPB14901 DPA10301-DPB15501 DPA10301-DPB16501 DPA10301-DPB17501 DPA10301-DPB18001 DPA10401-DPB10101 DPA10401-DPB10201 DPA10401-DPB10202 DPA10401-DPB10402 DPA10401-DPB10501 DPA10401-DPB110501 DPA10401-DPB14901 DQA10102-DQB10501 DQA10102-DQB10503 DQA10102-DQB10601 DQA10102-DQB10602 DQA10102-DQB10609 DQA10102-DQB10611 DQA10103-DQB10501 DQA10103-DQB10601 DQA10103-DQB10602 DQA10103-DQB10608 DQA10103-DQB10609 DQA10201-DQB10301 DQA10201-DQB10303 DQA10505-DQB10402
GNEQVDKLVSSGIRKVLFL

SEQ ID NO: 3642 - protein, 20 aa, Human immunodeficiency virus 1
  source 1..20: note = HLAs: DRB1_0101 DRB1_0102 DRB1_0404 DRB1_0410 DRB1_0701 DRB1_0801 DRB1_0802 DRB1_0803 DRB1_0804 DRB1_0806 DRB1_0809 DRB1_0813 DRB1_0901 DRB1_1001 DRB1_1101 DRB1_1102 DRB1_1103 DRB1_1104 DRB1_1114 DRB1_1201 DRB1_1301 DRB1_1302 DRB1_1303 DRB1_1304 DRB1_1305 DRB1_1312 DRB1_1401 DRB1_1402 DRB1_1403 DRB1_1404 DRB1_1405 DRB1_1406 DRB1_1454 DRB1_1501 DRB1_1502 DRB1_1503 DRB1_1601 DRB1_1602 DPA10103-DPB10101 DPA10103-DPB10201 DPA10103-DPB10202 DPA10103-DPB10401 DPA10103-DPB10501 DPA10103-DPB112601 DPA10103-DPB11501 DPA10103-DPB11601 DPA10103-DPB11801 DPA10103-DPB11901 DPA10103-DPB12301 DPA10103-DPB13101 DPA10103-DPB13401 DPA10103-DPB13901 DPA10103-DPB14001 DPA10103-DPB14101 DPA10103-DPB14801 DPA10103-DPB15001 DPA10103-DPB15501 DPA10103-DPB15901 DPA10104-DPB10101 DPA10104-DPB11501 DPA10105-DPB10101 DPA10105-DPB10401 DPA10105-DPB11801 DPA10105-DPB15001 DPA10106-DPB10101 DPA10201-DPB10101 DPA10201-DPB10201 DPA10201-DPB10202 DPA10201-DPB10501 DPA10201-DPB110601 DPA10201-DPB11501 DPA10201-DPB11601; note = HLAs: DPA10201-DPB11901 DPA10202-DPB10101 DPA10202-DPB10201 DPA10202-DPB10202 DPA10202-DPB10401 DPA10202-DPB10402 DPA10202-DPB10501 DPA10202-DPB10901 DPA10202-DPB110001 DPA10202-DPB110501 DPA10202-DPB110601 DPA10202-DPB11301 DPA10202-DPB113101 DPA10202-DPB11401 DPA10202-DPB11701 DPA10202-DPB11801 DPA10202-DPB11901 DPA10202-DPB12101 DPA10202-DPB12901 DPA10202-DPB13001 DPA10202-DPB13101 DPA10202-DPB13801 DPA10202-DPB15501 DPA10202-DPB16501 DPA10301-DPB10101 DPA10301-DPB10201 DPA10301-DPB10202 DPA10301-DPB10401 DPA10301-DPB10402 DPA10301-DPB10901 DPA10301-DPB110501 DPA10301-DPB110601 DPA10301-DPB11301 DPA10301-DPB11701 DPA10301-DPB11801 DPA10301-DPB12301 DPA10301-DPB13901 DPA10301-DPB14001 DPA10301-DPB14901 DPA10301-DPB15501 DPA10301-DPB16501 DPA10301-DPB17501 DPA10301-DPB18001 DPA10401-DPB10101 DPA10401-DPB10201 DPA10401-DPB10202 DPA10401-DPB10301 DPA10401-DPB10402 DPA10401-DPB10501 DPA10401-DPB110501 DPA10401-DPB11301 DPA10401-DPB113301 DPA10401-DPB11401 DPA10401-DPB14901; note = HLAs: DQA10102-DQB10501 DQA10102-DQB10503 DQA10102-DQB10601 DQA10102-DQB10602 DQA10102-DQB10609 DQA10102-DQB10611 DQA10103-DQB10501 DQA10103-DQB10503 DQA10103-DQB10601 DQA10103-DQB10602 DQA10103-DQB10603 DQA10103-DQB10604 DQA10103-DQB10608 DQA10103-DQB10609 DQA10201-DQB10301 DQA10201-DQB10303 DQA10505-DQB10402 DQA10506-DQB10303
GNEQVDKLVSSGIRKVLFLD

SEQ ID NO: 3643 - protein, 21 aa, Human immunodeficiency virus 1
  source 1..21: note = HLAs: DRB1_0101 DRB1_0102 DRB1_0404 DRB1_0410 DRB1_0701 DRB1_0801 DRB1_0804 DRB1_0806 DRB1_0813 DRB1_0901 DRB1_1001 DRB1_1101 DRB1_1102 DRB1_1103 DRB1_1104 DRB1_1114 DRB1_1201 DRB1_1301 DRB1_1302 DRB1_1303 DRB1_1304 DRB1_1305 DRB1_1312 DRB1_1401 DRB1_1402 DRB1_1404 DRB1_1405 DRB1_1406 DRB1_1454 DRB1_1501 DRB1_1602 DPA10103-DPB10101 DPA10103-DPB10201 DPA10103-DPB10202 DPA10103-DPB10501 DPA10103-DPB11501 DPA10103-DPB11601 DPA10103-DPB11801 DPA10103-DPB11901 DPA10103-DPB13101 DPA10103-DPB13401 DPA10103-DPB14001 DPA10103-DPB14101 DPA10103-DPB14801 DPA10103-DPB15001 DPA10104-DPB10101 DPA10104-DPB11501 DPA10105-DPB10101 DPA10105-DPB11801 DPA10105-DPB15001 DPA10106-DPB10101 DPA10201-DPB10101 DPA10201-DPB110601 DPA10201-DPB11501 DPA10201-DPB11601 DPA10201-DPB11901 DPA10202-DPB10101 DPA10202-DPB10201 DPA10202-DPB10202 DPA10202-DPB10501 DPA10202-DPB110601 DPA10202-DPB11801 DPA10202-DPB11901 DPA10202-DPB13101 DPA10202-DPB13801 DPA10202-DPB16501 DPA10301-DPB10101 DPA10301-DPB10201; note = HLAs: DPA10301-DPB10202 DPA10301-DPB10401 DPA10301-DPB10402 DPA10301-DPB110501 DPA10301-DPB110601 DPA10301-DPB11801 DPA10301-DPB12301 DPA10301-DPB13901 DPA10301-DPB14001 DPA10301-DPB14901 DPA10301-DPB15501 DPA10301-DPB16501 DPA10301-DPB17501 DPA10301-DPB18001 DPA10401-DPB10101 DPA10401-DPB10201 DPA10401-DPB10202 DPA10401-DPB10402 DPA10401-DPB10501 DPA10401-DPB110501 DPA10401-DPB14901 DQA10102-DQB10501 DQA10102-DQB10601 DQA10102-DQB10602 DQA10102-DQB10609 DQA10103-DQB10501 DQA10103-DQB10601 DQA10103-DQB10602 DQA10103-DQB10609 DQA10201-DQB10301 DQA10505-DQB10402
GNEQVDKLVSSGIRKVLFLDG

SEQ ID NO: 3644 - protein, 22 aa, Human immunodeficiency virus 1
  source 1..22: note = HLAs: DRB1_0101 DRB1_0102 DRB1_0404 DRB1_0410 DRB1_0701 DRB1_0801 DRB1_0804 DRB1_0806 DRB1_0813 DRB1_0901 DRB1_1001 DRB1_1101 DRB1_1102 DRB1_1103 DRB1_1104 DRB1_1114 DRB1_1201 DRB1_1301 DRB1_1302 DRB1_1303 DRB1_1304 DRB1_1305 DRB1_1312 DRB1_1401 DRB1_1402 DRB1_1404 DRB1_1405 DRB1_1406 DRB1_1454 DRB1_1501 DRB1_1502 DRB1_1503 DRB1_1601 DRB1_1602 DPA10103-DPB10101 DPA10103-DPB10201 DPA10103-DPB10202 DPA10103-DPB10501 DPA10103-DPB11501 DPA10103-DPB11601 DPA10103-DPB11801 DPA10103-DPB11901 DPA10103-DPB13101 DPA10103-DPB13401 DPA10103-DPB14001 DPA10103-DPB14101 DPA10103-DPB14801 DPA10103-DPB15001 DPA10104-DPB10101 DPA10104-DPB11501 DPA10105-DPB10101 DPA10105-DPB11801 DPA10105-DPB15001 DPA10106-DPB10101 DPA10201-DPB10101 DPA10201-DPB110601 DPA10201-DPB11501 DPA10201-DPB11601 DPA10201-DPB11901 DPA10202-DPB10101 DPA10202-DPB10201 DPA10202-DPB10202 DPA10202-DPB10501 DPA10202-DPB110601 DPA10202-DPB11801 DPA10202-DPB11901 DPA10202-DPB13101 DPA10202-DPB13801 DPA10202-DPB15501 DPA10202-DPB16501; note = HLAs: DPA10301-DPB10101 DPA10301-DPB10201 DPA10301-DPB10202 DPA10301-DPB10401 DPA10301-DPB10402 DPA10301-DPB110501 DPA10301-DPB110601 DPA10301-DPB11801 DPA10301-DPB12301 DPA10301-DPB13901 DPA10301-DPB14001 DPA10301-DPB14901 DPA10301-DPB15501 DPA10301-DPB16501 DPA10301-DPB17501 DPA10301-DPB18001 DPA10401-DPB10101 DPA10401-DPB10201 DPA10401-DPB10202 DPA10401-DPB10402 DPA10401-DPB10501 DPA10401-DPB110501 DPA10401-DPB14901 DQA10102-DQB10501 DQA10102-DQB10601 DQA10102-DQB10602 DQA10102-DQB10609 DQA10103-DQB10501 DQA10103-DQB10601 DQA10103-DQB10602 DQA10103-DQB10609 DQA10201-DQB10301 DQA10505-DQB10402
GNEQVDKLVSSGIRKVLFLDGI

SEQ ID NO: 3645 - protein, 15 aa, Human immunodeficiency virus 1
  source 1..15: note = HLAs: DRB1_0101 DRB1_0102 DRB1_0701 DRB1_0806 DRB1_0901 DRB1_1001 DRB1_1102 DRB1_1103 DRB1_1104 DRB1_1114 DRB1_1301 DRB1_1302 DRB1_1304 DRB1_1406 DRB1_1501 DRB1_1602 DPA10301-DPB10101 DPA10301-DPB10201 DPA10301-DPB10202 DPA10401-DPB10101 DQA10102-DQB10501 DQA10103-DQB10501 DQA10201-DQB10301 DQA10501-DQB10301 DQA10501-DQB10319 DQA10503-DQB10301 DQA10505-DQB10301 DQA10505-DQB10309 DQA10505-DQB10319 DQA10508-DQB10301 DQA10509-DQB10301
GPAKLLWKGEGAVVI

SEQ ID NO: 3646 - protein, 16 aa, Human immunodeficiency virus 1
  source 1..16: note = HLAs: DRB1_0101 DRB1_0102 DRB1_0701 DRB1_0901 DRB1_1001 DRB1_1114 DRB1_1302 DRB1_1602 DPA10301-DPB10101 DPA10301-DPB10201 DPA10301-DPB10202 DPA10401-DPB10101 DPA10401-DPB10201 DPA10401-DPB10202 DQA10102-DQB10501 DQA10103-DQB10501 DQA10201-DQB10301 DQA10501-DQB10301 DQA10501-DQB10319 DQA10503-DQB10301 DQA10505-DQB10301 DQA10505-DQB10309 DQA10505-DQB10319 DQA10508-DQB10301 DQA10509-DQB10301
GPAKLLWKGEGAVVIQ

SEQ ID NO: 3647 - protein, 17 aa, Human immunodeficiency virus 1
  source 1..17: note = HLAs: DRB1_0101 DRB1_0102 DRB1_0701 DRB1_0901 DRB1_1001 DRB1_1114 DRB1_1302 DRB1_1602 DPA10301-DPB10101 DPA10301-DPB10201 DPA10301-DPB10202 DPA10401-DPB10101 DQA10102-DQB10501 DQA10102-DQB10601 DQA10102-DQB10609 DQA10103-DQB10501 DQA10201-DQB10301 DQA10501-DQB10301 DQA10501-DQB10319 DQA10503-DQB10301 DQA10505-DQB10301 DQA10505-DQB10309 DQA10505-DQB10319 DQA10508-DQB10301 DQA10509-DQB10301
GPAKLLWKGEGAVVIQD

SEQ ID NO: 3648 - protein, 18 aa, Human immunodeficiency virus 1
  source 1..18: note = HLAs: DRB1_0101 DRB1_0901 DRB1_1001 DQA10102-DQB10501 DQA10201-DQB10301
GPAKLLWKGEGAVVIQDN

SEQ ID NO: 3649 - protein, 19 aa, Human immunodeficiency virus 1
  source 1..19: note = HLAs: DRB1_0101 DRB1_0102 DRB1_0701 DRB1_0901 DRB1_1001 DRB1_1114 DRB1_1302 DRB1_1602 DPA10301-DPB10101 DPA10301-DPB10201 DPA10301-DPB10202 DPA10401-DPB10101 DQA10102-DQB10501 DQA10102-DQB10601 DQA10102-DQB10609 DQA10103-DQB10501 DQA10201-DQB10301 DQA10401-DQB10301 DQA10401-DQB10319 DQA10501-DQB10301 DQA10501-DQB10319 DQA10503-DQB10301 DQA10505-DQB10301 DQA10505-DQB10309 DQA10505-DQB10319 DQA10508-DQB10301 DQA10509-DQB10301
GPAKLLWKGEGAVVIQDNS

SEQ ID NO: 3650 - protein, 16 aa, Human immunodeficiency virus 1
  source 1..16: note = HLAs: DPA10401-DPB10101
GPENPYNTPVFAIKKK

SEQ ID NO: 3651 - protein, 19 aa, Human immunodeficiency virus 1
  source 1..19: note = HLAs: DRB1_1101 DRB1_1103 DRB1_1104 DRB1_1305
GPENPYNTPVFAIKKKDST

SEQ ID NO: 3652 - protein, 20 aa, Human immunodeficiency virus 1
  source 1..20: note = HLAs: DRB1_0801 DRB1_0804 DRB1_0806 DRB1_1101 DRB1_1102 DRB1_1103 DRB1_1104 DRB1_1301 DRB1_1304 DRB1_1305 DRB1_1406 DPA10401-DPB10101 DQA10103-DQB10601
GPENPYNTPVFAIKKKDSTK

SEQ ID NO: 3653 - protein, 21 aa, Human immunodeficiency virus 1
  source 1..21: note = HLAs: DRB1_0804 DRB1_0806 DRB1_1101 DRB1_1102 DRB1_1103 DRB1_1104 DRB1_1301 DRB1_1304 DRB1_1305 DRB1_1406
GPENPYNTPVFAIKKKDSTKW

SEQ ID NO: 3654 - protein, 22 aa, Human immunodeficiency virus 1
  source 1..22: note = HLAs: DRB1_0801 DRB1_0804 DRB1_0806 DRB1_1101 DRB1_1102 DRB1_1103 DRB1_1104 DRB1_1301 DRB1_1304 DRB1_1305 DRB1_1406
GPENPYNTPVFAIKKKDSTKWR

SEQ ID NO: 3655 - protein, 23 aa, Human immunodeficiency virus 1
  source 1..23: note = HLAs: DRB1_0801 DRB1_0804 DRB1_0806 DRB1_1101 DRB1_1102 DRB1_1103 DRB1_1104 DRB1_1301 DRB1_1304 DRB1_1305 DRB1_1406
GPENPYNTPVFAIKKKDSTKWRK

SEQ ID NO: 3656 - protein, 24 aa, Human immunodeficiency virus 1
  source 1..24: note = HLAs: DRB1_0801 DRB1_0804 DRB1_0806 DRB1_1101 DRB1_1102 DRB1_1103 DRB1_1104 DRB1_1301 DRB1_1304 DRB1_1305 DRB1_1406 DPA10401-DPB10101
GPENPYNTPVFAIKKKDSTKWRKL

SEQ ID NO: 3657 - protein, 25 aa, Human immunodeficiency virus 1
  source 1..25: note = HLAs: DRB1_0801 DRB1_0802 DRB1_0804 DRB1_0806 DRB1_0809 DRB1_1101 DRB1_1102 DRB1_1103 DRB1_1104 DRB1_1301 DRB1_1304 DRB1_1305 DRB1_1406 DPA10103-DPB11501 DPA10103-DPB15001 DPA10104-DPB11501 DPA10105-DPB15001 DPA10202-DPB13101 DPA10401-DPB10101
GPENPYNTPVFAIKKKDSTKWRKLV

SEQ ID NO: 3658 - protein, 14 aa, Human immunodeficiency virus 1
  source 1..14: note = HLAs: DQA10101-DQB10501 DQA10102-DQB10501 DQA10102-DQB10502 DQA10102-DQB10503 DQA10103-DQB10501 DQA10104-DQB10501 DQA10105-DQB10501
GPKEPFRDYVDRFF

SEQ ID NO: 3659 - protein, 15 aa, Human immunodeficiency virus 1
  source 1..15: note = HLAs: DRB1_1501 DRB1_1502 DRB1_1503 DQA10101-DQB10501 DQA10101-DQB10503 DQA10102-DQB10501 DQA10102-DQB10502 DQA10102-DQB10503 DQA10103-DQB10501 DQA10104-DQB10501 DQA10104-DQB10503 DQA10105-DQB10501 DQA10107-DQB10503
GPKEPFRDYVDRFFK

SEQ ID NO: 3660 - protein, 17 aa, Human immunodeficiency virus 1
  source 1..17: note = HLAs: DPA10301-DPB10101
GPKVKQWPLTEEKIKAL

SEQ ID NO: 3661 - protein, 14 aa, Human immunodeficiency virus 1
  source 1..14: note = HLAs: DQA10201-DQB10301 DQA10301-DQB10301 DQA10302-DQB10301 DQA10303-DQB10301 DQA10501-DQB10301 DQA10501-DQB10319 DQA10503-DQB10301 DQA10505-DQB10301 DQA10505-DQB10309 DQA10505-DQB10319 DQA10508-DQB10301 DQA10509-DQB10301 DQA10601-DQB10301
GQMREPRGSDIAGT

SEQ ID NO: 3662 - protein, 15 aa, Human immunodeficiency virus 1
  source 1..15: note = HLAs: DQA10201-DQB10301 DQA10201-DQB10303 DQA10301-DQB10301 DQA10302-DQB10301 DQA10303-DQB10301 DQA10401-DQB10301 DQA10401-DQB10319 DQA10501-DQB10301 DQA10501-DQB10319 DQA10503-DQB10301 DQA10505-DQB10301 DQA10505-DQB10309 DQA10505-DQB10319 DQA10506-DQB10303 DQA10508-DQB10301 DQA10509-DQB10301 DQA10601-DQB10301
GQMREPRGSDIAGTT

SEQ ID NO: 3663 - protein, 16 aa, Human immunodeficiency virus 1
  source 1..16: note = HLAs: DQA10201-DQB10301 DQA10301-DQB10301 DQA10302-DQB10301 DQA10303-DQB10301 DQA10401-DQB10301 DQA10401-DQB10319 DQA10501-DQB10301 DQA10501-DQB10319 DQA10503-DQB10301 DQA10505-DQB10301 DQA10505-DQB10309 DQA10505-DQB10319 DQA10506-DQB10303 DQA10508-DQB10301 DQA10509-DQB10301 DQA10601-DQB10301
GQMREPRGSDIAGTTS

SEQ ID NO: 3664 - protein, 17 aa, Human immunodeficiency virus 1
  source 1..17: note = HLAs: DQA10201-DQB10301 DQA10301-DQB10301 DQA10302-DQB10301 DQA10303-DQB10301 DQA10401-DQB10301 DQA10401-DQB10319 DQA10501-DQB10301 DQA10501-DQB10319 DQA10503-DQB10301 DQA10505-DQB10301 DQA10505-DQB10309 DQA10505-DQB10319 DQA10506-DQB10303 DQA10508-DQB10301 DQA10509-DQB10301 DQA10601-DQB10301
GQMREPRGSDIAGTTST

SEQ ID NO: 3665 - protein, 18 aa, Human immunodeficiency virus 1
  source 1..18: note = HLAs: DQA10201-DQB10301 DQA10501-DQB10301 DQA10501-DQB10319 DQA10503-DQB10301 DQA10505-DQB10301 DQA10505-DQB10309 DQA10505-DQB10319 DQA10508-DQB10301 DQA10509-DQB10301 DQA10601-DQB10301
GQMREPRGSDIAGTTSTL

SEQ ID NO: 3666 - protein, 19 aa, Human immunodeficiency virus 1
  source 1..19: note = HLAs: DQA10201-DQB10301 DQA10201-DQB10303 DQA10301-DQB10301 DQA10302-DQB10301 DQA10303-DQB10301 DQA10401-DQB10301 DQA10401-DQB10319 DQA10501-DQB10301 DQA10501-DQB10319 DQA10503-DQB10301 DQA10505-DQB10301 DQA10505-DQB10309 DQA10505-DQB10319 DQA10506-DQB10303 DQA10508-DQB10301 DQA10509-DQB10301 DQA10601-DQB10301
GQMREPRGSDIAGTTSTLQ

SEQ ID NO: 3667 - protein, 20 aa, Human immunodeficiency virus 1
  source 1..20: note = HLAs: DQA10102-DQB10601 DQA10103-DQB10601 DQA10201-DQB10301 DQA10201-DQB10303 DQA10301-DQB10301 DQA10302-DQB10301 DQA10303-DQB10301 DQA10401-DQB10301 DQA10401-DQB10319 DQA10501-DQB10301 DQA10501-DQB10319 DQA10503-DQB10301 DQA10505-DQB10301 DQA10505-DQB10309 DQA10505-DQB10319 DQA10506-DQB10303 DQA10508-DQB10301 DQA10509-DQB10301 DQA10601-DQB10301
GQMREPRGSDIAGTTSTLQE

SEQ ID NO: 3668 - protein, 21 aa, Human immunodeficiency virus 1
  source 1..21: note = HLAs: DQA10201-DQB10301 DQA10201-DQB10303 DQA10301-DQB10301 DQA10302-DQB10301 DQA10303-DQB10301 DQA10501-DQB10301 DQA10501-DQB10319 DQA10503-DQB10301 DQA10505-DQB10301 DQA10505-DQB10309 DQA10505-DQB10319 DQA10506-DQB10303 DQA10508-DQB10301 DQA10509-DQB10301 DQA10601-DQB10301
GQMREPRGSDIAGTTSTLQEQ

SEQ ID NO: 3669 - protein, 22 aa, Human immunodeficiency virus 1
  source 1..22: note = HLAs: DQA10102-DQB10601 DQA10103-DQB10601 DQA10201-DQB10301 DQA10201-DQB10303 DQA10301-DQB10301 DQA10302-DQB10301 DQA10303-DQB10301 DQA10501-DQB10301 DQA10501-DQB10319 DQA10503-DQB10301 DQA10505-DQB10301 DQA10505-DQB10309 DQA10505-DQB10319 DQA10506-DQB10303 DQA10508-DQB10301 DQA10509-DQB10301 DQA10601-DQB10301
GQMREPRGSDIAGTTSTLQEQI

SEQ ID NO: 3670 - protein, 20 aa, Human immunodeficiency virus 1
  source 1..20: note = HLAs: DRB1_0401 DRB1_0405
GQVDCSPGIWQLDCTHLEGK

SEQ ID NO: 3671 - protein, 21 aa, Human immunodeficiency virus 1
  source 1..21: note = HLAs: DRB1_0401 DRB1_0405
GQVDCSPGIWQLDCTHLEGKI

SEQ ID NO: 3672 - protein, 22 aa, Human immunodeficiency virus 1
  source 1..22: note = HLAs: DRB1_0401 DRB1_0405
GQVDCSPGIWQLDCTHLEGKII

SEQ ID NO: 3673 - protein, 19 aa, Human immunodeficiency virus 1
  source 1..19: note = HLAs: DRB1_1001 DPA10301-DPB10101 DPA10301-DPB10201 DPA10301-DPB10202 DPA10301-DPB110601 DPA10301-DPB11801 DPA10301-DPB16501 DPA10401-DPB10101 DQA10102-DQB10501 DQA10102-DQB10601 DQA10102-DQB10609 DQA10103-DQB10601 DQA10103-DQB10609
GQVRDQAEHLKTAVQMAVF

SEQ ID NO: 3674 - protein, 20 aa, Human immunodeficiency virus 1
  source 1..20: note = HLAs: DRB1_0101 DRB1_0701 DRB1_0901 DRB1_1001 DPA10103-DPB10101 DPA10103-DPB11501 DPA10103-DPB15001 DPA10104-DPB10101 DPA10104-DPB11501 DPA10105-DPB10101 DPA10105-DPB15001 DPA10202-DPB10101 DPA10301-DPB10101 DPA10301-DPB10201 DPA10301-DPB10202 DPA10301-DPB10401 DPA10301-DPB110601 DPA10301-DPB11801 DPA10301-DPB12301 DPA10301-DPB13901 DPA10301-DPB14001 DPA10301-DPB16501 DPA10401-DPB10101 DPA10401-DPB10301 DPA10401-DPB10501 DPA10401-DPB11401 DQA10102-DQB10501 DQA10102-DQB10601 DQA10102-DQB10602 DQA10102-DQB10609 DQA10102-DQB10611 DQA10103-DQB10501 DQA10103-DQB10601 DQA10103-DQB10602 DQA10103-DQB10609
GQVRDQAEHLKTAVQMAVFI

SEQ ID NO: 3675 - protein, 21 aa, Human immunodeficiency virus 1
  source 1..21: note = HLAs: DRB1_0101 DRB1_1001 DPA10103-DPB11501 DPA10104-DPB11501 DPA10301-DPB10101 DPA10301-DPB10201 DPA10301-DPB10202 DPA10301-DPB110601 DPA10301-DPB11801 DPA10301-DPB14001 DPA10301-DPB16501 DPA10401-DPB10101 DQA10102-DQB10501 DQA10103-DQB10609
GQVRDQAEHLKTAVQMAVFIH

SEQ ID NO: 3676 - protein, 22 aa, Human immunodeficiency virus 1
  source 1..22: note = HLAs: DRB1_0101 DRB1_1001 DPA10103-DPB10101 DPA10103-DPB11501 DPA10103-DPB11901 DPA10103-DPB15001 DPA10104-DPB10101 DPA10104-DPB11501 DPA10105-DPB10101 DPA10105-DPB15001 DPA10202-DPB10101 DPA10301-DPB10101 DPA10301-DPB10201 DPA10301-DPB10202 DPA10301-DPB10401 DPA10301-DPB10402 DPA10301-DPB110501 DPA10301-DPB110601 DPA10301-DPB11801 DPA10301-DPB12301 DPA10301-DPB13901 DPA10301-DPB14001 DPA10301-DPB14901 DPA10301-DPB16501 DPA10301-DPB18001 DPA10401-DPB10101 DPA10401-DPB10201 DPA10401-DPB10202 DPA10401-DPB10501 DQA10102-DQB10501 DQA10103-DQB10501 DQA10103-DQB10601 DQA10103-DQB10609
GQVRDQAEHLKTAVQMAVFIHN

SEQ ID NO: 3677 - protein, 23 aa, Human immunodeficiency virus 1
  source 1..23: note = HLAs: DRB1_0101 DRB1_1001 DPA10103-DPB10101 DPA10103-DPB10202 DPA10103-DPB11501 DPA10103-DPB11901 DPA10103-DPB15001 DPA10104-DPB10101 DPA10104-DPB11501 DPA10105-DPB10101 DPA10105-DPB15001 DPA10202-DPB10101 DPA10301-DPB10101 DPA10301-DPB10201 DPA10301-DPB10202 DPA10301-DPB10401 DPA10301-DPB10402 DPA10301-DPB110501 DPA10301-DPB110601 DPA10301-DPB11801 DPA10301-DPB12301 DPA10301-DPB13901 DPA10301-DPB14001 DPA10301-DPB14901 DPA10301-DPB15501 DPA10301-DPB16501 DPA10301-DPB17501 DPA10301-DPB18001 DPA10401-DPB10101 DPA10401-DPB10201 DPA10401-DPB10202 DPA10401-DPB10501 DPA10401-DPB11401 DQA10102-DQB10501 DQA10102-DQB10601 DQA10102-DQB10609 DQA10103-DQB10501 DQA10103-DQB10601 DQA10103-DQB10609
GQVRDQAEHLKTAVQMAVFIHNF

SEQ ID NO: 3678 - protein, 24 aa, Human immunodeficiency virus 1
  source 1..24: note = HLAs: DRB1_0101 DRB1_0701 DRB1_1001 DRB1_1406 DPA10103-DPB10101 DPA10103-DPB10201 DPA10103-DPB10202 DPA10103-DPB10501 DPA10103-DPB11501 DPA10103-DPB11601 DPA10103-DPB11801 DPA10103-DPB11901 DPA10103-DPB13101 DPA10103-DPB13401 DPA10103-DPB14001 DPA10103-DPB14801 DPA10103-DPB15001 DPA10104-DPB10101 DPA10104-DPB11501 DPA10105-DPB10101 DPA10105-DPB11801 DPA10105-DPB15001 DPA10106-DPB10101 DPA10201-DPB10101 DPA10201-DPB11501 DPA10202-DPB10101 DPA10202-DPB10202 DPA10202-DPB110601 DPA10202-DPB11901 DPA10202-DPB16501 DPA10301-DPB10101 DPA10301-DPB10201 DPA10301-DPB10202 DPA10301-DPB10401 DPA10301-DPB10402 DPA10301-DPB110501 DPA10301-DPB110601 DPA10301-DPB11101 DPA10301-DPB11801 DPA10301-DPB12301 DPA10301-DPB13901 DPA10301-DPB14001 DPA10301-DPB14901 DPA10301-DPB15501 DPA10301-DPB16501 DPA10301-DPB17501 DPA10301-DPB18001 DPA10401-DPB10101 DPA10401-DPB10201 DPA10401-DPB10202 DPA10401-DPB10301 DPA10401-DPB10402 DPA10401-DPB10501 DPA10401-DPB110501 DPA10401-DPB11301 DPA10401-DPB113301; note = HLAs: DPA10401-DPB11401 DPA10401-DPB14901 DQA10102-DQB10501 DQA10102-DQB10601 DQA10102-DQB10602 DQA10102-DQB10609 DQA10102-DQB10611 DQA10103-DQB10501 DQA10103-DQB10601 DQA10103-DQB10609
GQVRDQAEHLKTAVQMAVFIHNFK

SEQ ID NO: 3679 - protein, 25 aa, Human immunodeficiency virus 1
  source 1..25: note = HLAs: DRB1_0101 DRB1_0410 DRB1_0701 DRB1_0806 DRB1_0813 DRB1_1001 DRB1_1104 DRB1_1304 DRB1_1406 DRB1_1602 DPA10103-DPB10101 DPA10103-DPB10201 DPA10103-DPB10202 DPA10103-DPB10401 DPA10103-DPB10501 DPA10103-DPB11101 DPA10103-DPB112601 DPA10103-DPB11501 DPA10103-DPB11601 DPA10103-DPB11801 DPA10103-DPB11901 DPA10103-DPB12301 DPA10103-DPB13101 DPA10103-DPB13401 DPA10103-DPB13901 DPA10103-DPB14001 DPA10103-DPB14101 DPA10103-DPB14801 DPA10103-DPB15001 DPA10103-DPB15501 DPA10103-DPB15901 DPA10104-DPB10101 DPA10104-DPB11501 DPA10105-DPB10101 DPA10105-DPB10401 DPA10105-DPB11801 DPA10105-DPB15001 DPA10106-DPB10101 DPA10201-DPB10101 DPA10201-DPB110601 DPA10201-DPB11501 DPA10201-DPB11601 DPA10201-DPB11901 DPA10202-DPB10101 DPA10202-DPB10201 DPA10202-DPB10202 DPA10202-DPB10501 DPA10202-DPB110601 DPA10202-DPB11801 DPA10202-DPB11901 DPA10202-DPB13101 DPA10202-DPB13801 DPA10202-DPB15501 DPA10202-DPB16501 DPA10301-DPB10101 DPA10301-DPB10201 DPA10301-DPB10202 DPA10301-DPB10401 DPA10301-DPB10402; note = HLAs: DPA10301-DPB110501 DPA10301-DPB110601 DPA10301-DPB11101 DPA10301-DPB11301 DPA10301-DPB11801 DPA10301-DPB12301 DPA10301-DPB13901 DPA10301-DPB14001 DPA10301-DPB14901 DPA10301-DPB15501 DPA10301-DPB16501 DPA10301-DPB17501 DPA10301-DPB18001 DPA10401-DPB10101 DPA10401-DPB10201 DPA10401-DPB10202 DPA10401-DPB10301 DPA10401-DPB10402 DPA10401-DPB10501 DPA10401-DPB110501 DPA10401-DPB11301 DPA10401-DPB113301 DPA10401-DPB11401 DPA10401-DPB14901 DQA10102-DQB10501 DQA10102-DQB10503 DQA10102-DQB10601 DQA10102-DQB10602 DQA10102-DQB10609 DQA10102-DQB10611 DQA10103-DQB10501 DQA10103-DQB10601 DQA10103-DQB10602 DQA10103-DQB10609
GQVRDQAEHLKTAVQMAVFIHNFKR

SEQ ID NO: 3680 - protein, 14 aa, Human immunodeficiency virus 1
  source 1..14: note = HLAs: DQA10201-DQB10301
GSDIAGTTSTLQEQ

SEQ ID NO: 3681 - protein, 15 aa, Human immunodeficiency virus 1
  source 1..15: note = HLAs: DRB1_0404 DRB1_0408 DQA10102-DQB10601 DQA10103-DQB10601 DQA10201-DQB10301 DQA10501-DQB10301 DQA10501-DQB10319 DQA10503-DQB10301 DQA10505-DQB10301 DQA10505-DQB10309 DQA10505-DQB10319 DQA10508-DQB10301 DQA10509-DQB10301
GSDIAGTTSTLQEQI

SEQ ID NO: 3682 - protein, 14 aa, Human immunodeficiency virus 1
  source 1..14: note = HLAs: DQA10201-DQB10301
GTVLVGPTPVNIIG

SEQ ID NO: 3683 - protein, 15 aa, Human immunodeficiency virus 1
  source 1..15: note = HLAs: DRB1_0101 DRB1_0701 DRB1_0901 DRB1_1001 DRB1_1114 DRB1_1302 DQA10102-DQB10601 DQA10103-DQB10601 DQA10201-DQB10301 DQA10501-DQB10301 DQA10501-DQB10319 DQA10503-DQB10301 DQA10505-DQB10301 DQA10505-DQB10309 DQA10505-DQB10319 DQA10508-DQB10301 DQA10509-DQB10301
GTVLVGPTPVNIIGR

SEQ ID NO: 3684 - protein, 16 aa, Human immunodeficiency virus 1
  source 1..16: note = HLAs: DQA10103-DQB10601 DQA10201-DQB10301
GTVLVGPTPVNIIGRN

SEQ ID NO: 3685 - protein, 14 aa, Human immunodeficiency virus 1
  source 1..14: note = HLAs: DRB1_1104
GVVESMNKELKKII

SEQ ID NO: 3686 - protein, 15 aa, Human immunodeficiency virus 1
  source 1..15: note = HLAs: DRB1_0804 DRB1_0806 DRB1_1101 DRB1_1102 DRB1_1103 DRB1_1104 DRB1_1301 DRB1_1304 DRB1_1305 DRB1_1406
GVVESMNKELKKIIG

SEQ ID NO: 3687 - protein, 16 aa, Human immunodeficiency virus 1
  source 1..16: note = HLAs: DRB1_1103 DRB1_1104 DRB1_1304 DRB1_1406
GVVESMNKELKKIIGQ

SEQ ID NO: 3688 - protein, 17 aa, Human immunodeficiency virus 1
  source 1..17: note = HLAs: DRB1_0806 DRB1_1101 DRB1_1102 DRB1_1103 DRB1_1104 DRB1_1301 DRB1_1304 DRB1_1305 DRB1_1406
GVVESMNKELKKIIGQV

SEQ ID NO: 3689 - protein, 17 aa, Human immunodeficiency virus 1
  source 1..17: note = HLAs: DPA10301-DPB10101 DPA10401-DPB10101
GYELHPDKWTVQPIQLP

SEQ ID NO: 3690 - protein, 13 aa, Human immunodeficiency virus 1
  source 1..13: note = HLAs: DRB1_1001 DQA10201-DQB10301 DQA10501-DQB10201 DQA10505-DQB10201 DQA10505-DQB10202
GYIEAEVIPAETG

SEQ ID NO: 3691 - protein, 14 aa, Human immunodeficiency virus 1
  source 1..14: note = HLAs: DRB1_0101 DRB1_0401 DRB1_0408 DRB1_1001 DQA10201-DQB10301 DQA10301-DQB10302 DQA10302-DQB10302 DQA10303-DQB10302 DQA10401-DQB10301 DQA10401-DQB10319 DQA10501-DQB10201 DQA10501-DQB10203 DQA10501-DQB10301 DQA10501-DQB10319 DQA10503-DQB10301 DQA10505-DQB10201 DQA10505-DQB10202 DQA10505-DQB10301 DQA10505-DQB10302 DQA10505-DQB10309 DQA10505-DQB10319 DQA10508-DQB10301 DQA10509-DQB10301
GYIEAEVIPAETGQ

SEQ ID NO: 3692 - protein, 15 aa, Human immunodeficiency virus 1
  source 1..15: note = HLAs: DRB1_0101 DRB1_0401 DRB1_0405 DRB1_0408 DRB1_0901 DRB1_1001 DQA10102-DQB10601 DQA10201-DQB10301 DQA10201-DQB10303 DQA10401-DQB10301 DQA10401-DQB10319 DQA10501-DQB10201 DQA10501-DQB10203 DQA10501-DQB10301 DQA10501-DQB10319 DQA10503-DQB10301 DQA10505-DQB10201 DQA10505-DQB10202 DQA10505-DQB10301 DQA10505-DQB10302 DQA10505-DQB10309 DQA10505-DQB10319 DQA10506-DQB10303 DQA10508-DQB10301 DQA10509-DQB10301
GYIEAEVIPAETGQE

SEQ ID NO: 3693 - protein, 16 aa, Human immunodeficiency virus 1
  source 1..16: note = HLAs: DRB1_0101 DRB1_0408 DRB1_1001 DQA10102-DQB10501 DQA10102-DQB10601 DQA10201-DQB10301 DQA10301-DQB10302 DQA10302-DQB10302 DQA10303-DQB10302 DQA10401-DQB10301 DQA10401-DQB10319 DQA10501-DQB10201 DQA10501-DQB10301 DQA10501-DQB10319 DQA10503-DQB10301 DQA10505-DQB10201 DQA10505-DQB10202 DQA10505-DQB10301 DQA10505-DQB10302 DQA10505-DQB10309 DQA10505-DQB10319 DQA10506-DQB10303 DQA10508-DQB10301 DQA10509-DQB10301
GYIEAEVIPAETGQET

SEQ ID NO: 3694 - protein, 17 aa, Human immunodeficiency virus 1
  source 1..17: note = HLAs: DRB1_0101 DRB1_0408 DRB1_1001 DQA10102-DQB10601 DQA10201-DQB10301
GYIEAEVIPAETGQETA

SEQ ID NO: 3695 - protein, 19 aa, Human immunodeficiency virus 1
  source 1..19: note = HLAs: DRB1_1001 DQA10102-DQB10501 DQA10201-DQB10301 DQA10501-DQB10201 DQA10505-DQB10201 DQA10505-DQB10202
GYIEAEVIPAETGQETAYF

SEQ ID NO: 3696 - protein, 22 aa, Human immunodeficiency virus 1
  source 1..22: note = HLAs: DRB1_0401 DRB1_0405
HGQVDCSPGIWQLDCTHLEGKI

SEQ ID NO: 3697 - protein, 23 aa, Human immunodeficiency virus 1
  source 1..23: note = HLAs: DRB1_0401 DRB1_0405
HGQVDCSPGIWQLDCTHLEGKII

SEQ ID NO: 3698 - protein, 13 aa, Human immunodeficiency virus 1
  source 1..13: note = HLAs: DPA10103-DPB10301 DPA10103-DPB112401 DPA10103-DPB11401 DPA10103-DPB15001 DPA10104-DPB10301 DPA10105-DPB10301 DPA10105-DPB15001 DPA10301-DPB10101 DPA10401-DPB10101 DPA10401-DPB10301 DPA10401-DPB11401
HKARVLAEAMSQV

SEQ ID NO: 3699 - protein, 14 aa, Human immunodeficiency virus 1
  source 1..14: note = HLAs: DRB1_1001 DPA10103-DPB10101 DPA10103-DPB10301 DPA10103-DPB10601 DPA10103-DPB11101 DPA10103-DPB112401 DPA10103-DPB11401 DPA10103-DPB11501 DPA10103-DPB12001 DPA10103-DPB12901 DPA10103-DPB15001 DPA10104-DPB10101 DPA10104-DPB10301 DPA10104-DPB11501 DPA10105-DPB10101 DPA10105-DPB10301 DPA10105-DPB15001 DPA10202-DPB10101 DPA10202-DPB11401 DPA10301-DPB10101 DPA10301-DPB10201 DPA10301-DPB10202 DPA10301-DPB10301 DPA10301-DPB10401 DPA10301-DPB110601 DPA10301-DPB11801 DPA10301-DPB12301 DPA10301-DPB13901 DPA10301-DPB14001 DPA10301-DPB16501 DPA10401-DPB10101 DPA10401-DPB10301 DPA10401-DPB10501 DPA10401-DPB11301 DPA10401-DPB113301 DPA10401-DPB11401 DQA10102-DQB10501 DQA10201-DQB10301
HKARVLAEAMSQVT

SEQ ID NO: 3700 - protein, 15 aa, Human immunodeficiency virus 1
  source 1..15: note = HLAs: DRB1_0101 DRB1_0102 DRB1_0401 DRB1_0404 DRB1_0408 DRB1_0410 DRB1_0701 DRB1_0813 DRB1_0901 DRB1_1001 DRB1_1304 DRB1_1406 DPA10103-DPB10101 DPA10103-DPB10301 DPA10103-DPB10601 DPA10103-DPB10901 DPA10103-DPB11101 DPA10103-DPB112401 DPA10103-DPB11401 DPA10103-DPB11501 DPA10103-DPB12001 DPA10103-DPB12901 DPA10103-DPB13101 DPA10103-DPB15001 DPA10104-DPB10101 DPA10104-DPB10301 DPA10104-DPB11501 DPA10105-DPB10101 DPA10105-DPB10301 DPA10105-DPB15001 DPA10201-DPB10301 DPA10201-DPB11401 DPA10201-DPB14501 DPA10202-DPB10101 DPA10202-DPB10301 DPA10202-DPB11401 DPA10202-DPB14501 DPA10301-DPB10101 DPA10301-DPB10201 DPA10301-DPB10202 DPA10301-DPB10301 DPA10301-DPB10401 DPA10301-DPB10901 DPA10301-DPB110601 DPA10301-DPB11101 DPA10301-DPB11801 DPA10301-DPB12301 DPA10301-DPB13901 DPA10301-DPB14001 DPA10301-DPB15501 DPA10301-DPB16501 DPA10401-DPB10101 DPA10401-DPB10201 DPA10401-DPB10202 DPA10401-DPB10301 DPA10401-DPB10501 DPA10401-DPB11301 DPA10401-DPB113301 DPA10401-DPB11401 DQA10102-DQB10501; note = HLAs: DQA10102-DQB10601 DQA10103-DQB10501 DQA10103-DQB10601 DQA10201-DQB10301 DQA10201-DQB10303 DQA10501-DQB10301 DQA10501-DQB10319 DQA10503-DQB10301 DQA10505-DQB10301 DQA10505-DQB10309 DQA10505-DQB10319 DQA10505-DQB10402 DQA10506-DQB10303 DQA10508-DQB10301 DQA10509-DQB10301
HKARVLAEAMSQVTN

SEQ ID NO: 3701 - protein, 20 aa, Human immunodeficiency virus 1
  source 1..20: note = HLAs: DRB1_0101 DRB1_0102 DRB1_1001
HKGIGGNEQVDKLVSSGIRK

SEQ ID NO: 3702 - protein, 21 aa, Human immunodeficiency virus 1
  source 1..21: note = HLAs: DRB1_0101 DRB1_0102 DRB1_0701 DRB1_0901 DRB1_1001 DRB1_1102 DRB1_1114 DRB1_1301 DRB1_1302 DRB1_1304 DRB1_1406 DPA10202-DPB10101 DPA10301-DPB10101 DPA10301-DPB10201 DPA10301-DPB10202 DPA10301-DPB10401 DPA10301-DPB11801 DPA10301-DPB12301 DPA10301-DPB13901 DPA10301-DPB14001 DPA10401-DPB10201 DPA10401-DPB10202 DQA10102-DQB10501 DQA10103-DQB10601 DQA10103-DQB10609
HKGIGGNEQVDKLVSSGIRKV

SEQ ID NO: 3703 - protein, 22 aa, Human immunodeficiency virus 1
  source 1..22: note = HLAs: DRB1_0101 DRB1_0102 DRB1_0701 DRB1_0806 DRB1_0901 DRB1_1001 DRB1_1102 DRB1_1103 DRB1_1104 DRB1_1114 DRB1_1301 DRB1_1302 DRB1_1304 DRB1_1401 DRB1_1406 DRB1_1454 DRB1_1501 DRB1_1602 DPA10103-DPB10201 DPA10103-DPB10202 DPA10103-DPB11501 DPA10103-DPB14801 DPA10104-DPB11501 DPA10202-DPB10101 DPA10202-DPB10201 DPA10202-DPB10202 DPA10202-DPB110601 DPA10202-DPB11901 DPA10301-DPB10101 DPA10301-DPB10201 DPA10301-DPB10202 DPA10301-DPB10401 DPA10301-DPB10402 DPA10301-DPB110501 DPA10301-DPB110601 DPA10301-DPB11801 DPA10301-DPB12301 DPA10301-DPB13901 DPA10301-DPB14001 DPA10301-DPB14901 DPA10301-DPB16501 DPA10301-DPB18001 DPA10401-DPB10101 DPA10401-DPB10201 DPA10401-DPB10202 DQA10102-DQB10501 DQA10102-DQB10601 DQA10103-DQB10501 DQA10103-DQB10601 DQA10103-DQB10602 DQA10103-DQB10609
HKGIGGNEQVDKLVSSGIRKVL

SEQ ID NO: 3704 - protein, 23 aa, Human immunodeficiency virus 1
  source 1..23: note = HLAs: DRB1_0101 DRB1_0102 DRB1_0410 DRB1_0701 DRB1_0806 DRB1_0813 DRB1_0901 DRB1_1001 DRB1_1102 DRB1_1103 DRB1_1104 DRB1_1114 DRB1_1301 DRB1_1302 DRB1_1303 DRB1_1304 DRB1_1401 DRB1_1402 DRB1_1404 DRB1_1405 DRB1_1406 DRB1_1454 DRB1_1501 DRB1_1602 DPA10103-DPB10101 DPA10103-DPB10201 DPA10103-DPB10202 DPA10103-DPB11501 DPA10103-DPB11601 DPA10103-DPB11801 DPA10103-DPB11901 DPA10103-DPB13401 DPA10103-DPB14801 DPA10103-DPB15001 DPA10104-DPB10101 DPA10104-DPB11501 DPA10105-DPB10101 DPA10105-DPB11801 DPA10105-DPB15001 DPA10202-DPB10101 DPA10202-DPB10201 DPA10202-DPB10202 DPA10202-DPB10501 DPA10202-DPB110601 DPA10202-DPB11801 DPA10202-DPB11901 DPA10202-DPB13101 DPA10202-DPB13801 DPA10202-DPB16501 DPA10301-DPB10101 DPA10301-DPB10201 DPA10301-DPB10202 DPA10301-DPB10401 DPA10301-DPB10402 DPA10301-DPB110501 DPA10301-DPB110601 DPA10301-DPB11801 DPA10301-DPB12301 DPA10301-DPB13901 DPA10301-DPB14001 DPA10301-DPB14901 DPA10301-DPB16501 DPA10301-DPB17501 DPA10301-DPB18001 DPA10401-DPB10101; note = HLAs: DPA10401-DPB10201 DPA10401-DPB10202 DPA10401-DPB10501 DQA10102-DQB10501 DQA10102-DQB10601 DQA10102-DQB10609 DQA10103-DQB10501 DQA10103-DQB10601 DQA10103-DQB10602 DQA10103-DQB10609 DQA10201-DQB10301 DQA10505-DQB10402
HKGIGGNEQVDKLVSSGIRKVLF

SEQ ID NO: 3705 - protein, 24 aa, Human immunodeficiency virus 1
  source 1..24: note = HLAs: DRB1_0101 DRB1_0102 DRB1_0404 DRB1_0410 DRB1_0701 DRB1_0801 DRB1_0804 DRB1_0806 DRB1_0813 DRB1_0901 DRB1_1001 DRB1_1101 DRB1_1102 DRB1_1103 DRB1_1104 DRB1_1114 DRB1_1201 DRB1_1301 DRB1_1302 DRB1_1303 DRB1_1304 DRB1_1305 DRB1_1312 DRB1_1401 DRB1_1402 DRB1_1404 DRB1_1405 DRB1_1406 DRB1_1454 DRB1_1501 DRB1_1502 DRB1_1503 DRB1_1601 DRB1_1602 DPA10103-DPB10101 DPA10103-DPB10201 DPA10103-DPB10202 DPA10103-DPB11501 DPA10103-DPB11601 DPA10103-DPB11801 DPA10103-DPB11901 DPA10103-DPB13101 DPA10103-DPB13401 DPA10103-DPB14001 DPA10103-DPB14101 DPA10103-DPB14801 DPA10103-DPB15001 DPA10104-DPB10101 DPA10104-DPB11501 DPA10105-DPB10101 DPA10105-DPB11801 DPA10105-DPB15001 DPA10106-DPB10101 DPA10201-DPB10101 DPA10201-DPB110601 DPA10201-DPB11501 DPA10201-DPB11901 DPA10202-DPB10101 DPA10202-DPB10201 DPA10202-DPB10202 DPA10202-DPB10501 DPA10202-DPB110601 DPA10202-DPB11801 DPA10202-DPB11901 DPA10202-DPB13101 DPA10202-DPB13801 DPA10202-DPB16501 DPA10301-DPB10101 DPA10301-DPB10201 DPA10301-DPB10202; note = HLAs: DPA10301-DPB10401 DPA10301-DPB10402 DPA10301-DPB110501 DPA10301-DPB110601 DPA10301-DPB11801 DPA10301-DPB12301 DPA10301-DPB13901 DPA10301-DPB14001 DPA10301-DPB14901 DPA10301-DPB15501 DPA10301-DPB16501 DPA10301-DPB17501 DPA10301-DPB18001 DPA10401-DPB10101 DPA10401-DPB10201 DPA10401-DPB10202 DPA10401-DPB10402 DPA10401-DPB10501 DPA10401-DPB110501 DPA10401-DPB14901 DQA10102-DQB10501 DQA10102-DQB10601 DQA10102-DQB10602 DQA10102-DQB10609 DQA10103-DQB10501 DQA10103-DQB10601 DQA10103-DQB10602 DQA10103-DQB10609 DQA10201-DQB10301 DQA10505-DQB10402
HKGIGGNEQVDKLVSSGIRKVLFL

SEQ ID NO: 3706 - protein, 25 aa, Human immunodeficiency virus 1
  source 1..25: note = HLAs: DRB1_0101 DRB1_0102 DRB1_0404 DRB1_0410 DRB1_0701 DRB1_0801 DRB1_0804 DRB1_0806 DRB1_0813 DRB1_0901 DRB1_1001 DRB1_1101 DRB1_1102 DRB1_1103 DRB1_1104 DRB1_1114 DRB1_1201 DRB1_1301 DRB1_1302 DRB1_1303 DRB1_1304 DRB1_1305 DRB1_1312 DRB1_1401 DRB1_1402 DRB1_1404 DRB1_1405 DRB1_1406 DRB1_1454 DRB1_1501 DRB1_1502 DRB1_1503 DRB1_1601 DRB1_1602 DPA10103-DPB10101 DPA10103-DPB10201 DPA10103-DPB10202 DPA10103-DPB11501 DPA10103-DPB11601 DPA10103-DPB11801 DPA10103-DPB11901 DPA10103-DPB13101 DPA10103-DPB13401 DPA10103-DPB14001 DPA10103-DPB14101 DPA10103-DPB14801 DPA10103-DPB15001 DPA10104-DPB10101 DPA10104-DPB11501 DPA10105-DPB10101 DPA10105-DPB11801 DPA10105-DPB15001 DPA10106-DPB10101 DPA10201-DPB10101 DPA10201-DPB110601 DPA10201-DPB11501 DPA10201-DPB11601 DPA10201-DPB11901 DPA10202-DPB10101 DPA10202-DPB10201 DPA10202-DPB10202 DPA10202-DPB10501 DPA10202-DPB110601 DPA10202-DPB11801 DPA10202-DPB11901 DPA10202-DPB13101 DPA10202-DPB13801 DPA10202-DPB16501 DPA10301-DPB10101 DPA10301-DPB10201; note = HLAs: DPA10301-DPB10202 DPA10301-DPB10401 DPA10301-DPB10402 DPA10301-DPB110501 DPA10301-DPB110601 DPA10301-DPB11801 DPA10301-DPB12301 DPA10301-DPB13901 DPA10301-DPB14001 DPA10301-DPB14901 DPA10301-DPB15501 DPA10301-DPB16501 DPA10301-DPB17501 DPA10301-DPB18001 DPA10401-DPB10101 DPA10401-DPB10201 DPA10401-DPB10202 DPA10401-DPB10402 DPA10401-DPB10501 DPA10401-DPB110501 DPA10401-DPB14901 DQA10102-DQB10501 DQA10102-DQB10601 DQA10102-DQB10602 DQA10102-DQB10609 DQA10103-DQB10501 DQA10103-DQB10601 DQA10103-DQB10602 DQA10103-DQB10608 DQA10103-DQB10609 DQA10201-DQB10301 DQA10505-DQB10402
HKGIGGNEQVDKLVSSGIRKVLFLD

SEQ ID NO: 3707 - protein, 13 aa, Human immunodeficiency virus 1
  source 1..13: note = HLAs: DPA10301-DPB10101 DPA10301-DPB10201 DPA10301-DPB10202 DPA10301-DPB11801
HLEGKIILVAVHV

SEQ ID NO: 3708 - protein, 14 aa, Human immunodeficiency virus 1
  source 1..14: note = HLAs: DRB1_0101 DRB1_0404 DRB1_0408 DRB1_1001 DPA10103-DPB11501 DPA10104-DPB11501 DPA10301-DPB10101 DPA10301-DPB10201 DPA10301-DPB10202 DPA10301-DPB10401 DPA10301-DPB110601 DPA10301-DPB11801 DPA10301-DPB12301 DPA10301-DPB13901 DPA10301-DPB14001 DPA10301-DPB16501 DPA10401-DPB10101 DPA10401-DPB10201 DPA10401-DPB10202 DQA10102-DQB10501 DQA10102-DQB10609 DQA10102-DQB10611 DQA10103-DQB10501
HLEGKIILVAVHVA

SEQ ID NO: 3709 - protein, 15 aa, Human immunodeficiency virus 1
  source 1..15: note = HLAs: DRB1_0101 DRB1_0102 DRB1_0401 DRB1_0404 DRB1_0405 DRB1_0408 DRB1_0410 DRB1_0701 DRB1_0801 DRB1_0802 DRB1_0804 DRB1_0806 DRB1_0809 DRB1_0813 DRB1_1001 DRB1_1101 DRB1_1102 DRB1_1104 DRB1_1301 DRB1_1304 DRB1_1305 DRB1_1401 DRB1_1402 DRB1_1404 DRB1_1406 DRB1_1454 DRB1_1501 DRB1_1502 DRB1_1602 DPA10103-DPB10101 DPA10103-DPB10201 DPA10103-DPB10202 DPA10103-DPB11501 DPA10103-DPB11901 DPA10103-DPB14801 DPA10103-DPB15001 DPA10104-DPB10101 DPA10104-DPB11501 DPA10105-DPB10101 DPA10105-DPB15001 DPA10202-DPB110601 DPA10202-DPB11901 DPA10301-DPB10101 DPA10301-DPB10201 DPA10301-DPB10202 DPA10301-DPB10401 DPA10301-DPB10402 DPA10301-DPB110501 DPA10301-DPB110601 DPA10301-DPB11801 DPA10301-DPB12301 DPA10301-DPB13901 DPA10301-DPB14001 DPA10301-DPB14901 DPA10301-DPB16501 DPA10301-DPB17501 DPA10301-DPB18001 DPA10401-DPB10101 DPA10401-DPB10201 DPA10401-DPB10202 DPA10401-DPB10301 DPA10401-DPB11401 DQA10102-DQB10501 DQA10102-DQB10503 DQA10102-DQB10601 DQA10102-DQB10602 DQA10102-DQB10609; note = HLAs: DQA10102-DQB10611 DQA10103-DQB10501 DQA10103-DQB10601 DQA10103-DQB10602 DQA10103-DQB10609 DQA10201-DQB10301
HLEGKIILVAVHVAS

SEQ ID NO: 3710 - protein, 16 aa, Human immunodeficiency virus 1
  source 1..16: note = HLAs: DRB1_0101 DRB1_0404 DRB1_0408 DRB1_0410 DRB1_0802 DRB1_0804 DRB1_0806 DRB1_0809 DRB1_0813 DRB1_1001 DRB1_1104 DRB1_1406 DRB1_1501 DPA10103-DPB10101 DPA10103-DPB11501 DPA10104-DPB10101 DPA10104-DPB11501 DPA10105-DPB10101 DPA10301-DPB10101 DPA10301-DPB10201 DPA10301-DPB10202 DPA10301-DPB10401 DPA10301-DPB110601 DPA10301-DPB11801 DPA10301-DPB12301 DPA10301-DPB13901 DPA10301-DPB14001 DPA10301-DPB16501 DPA10401-DPB10101 DPA10401-DPB10201 DPA10401-DPB10202 DPA10401-DPB10301 DPA10401-DPB11401 DQA10102-DQB10501 DQA10102-DQB10503 DQA10102-DQB10601 DQA10102-DQB10602 DQA10102-DQB10609 DQA10102-DQB10611 DQA10103-DQB10501 DQA10103-DQB10601 DQA10103-DQB10602 DQA10103-DQB10609 DQA10201-DQB10301 DQA10201-DQB10303 DQA10506-DQB10303
HLEGKIILVAVHVASG

SEQ ID NO: 3711 - protein, 17 aa, Human immunodeficiency virus 1
  source 1..17: note = HLAs: DRB1_0101 DRB1_0102 DRB1_0401 DRB1_0404 DRB1_0405 DRB1_0408 DRB1_0410 DRB1_0701 DRB1_0801 DRB1_0802 DRB1_0804 DRB1_0806 DRB1_0809 DRB1_0813 DRB1_0901 DRB1_1001 DRB1_1101 DRB1_1102 DRB1_1104 DRB1_1301 DRB1_1304 DRB1_1305 DRB1_1402 DRB1_1403 DRB1_1404 DRB1_1406 DRB1_1501 DRB1_1502 DRB1_1602 DPA10103-DPB10101 DPA10103-DPB11501 DPA10103-DPB15001 DPA10104-DPB10101 DPA10104-DPB11501 DPA10105-DPB10101 DPA10105-DPB15001 DPA10202-DPB10101 DPA10202-DPB110601 DPA10202-DPB11901 DPA10301-DPB10101 DPA10301-DPB10201 DPA10301-DPB10202 DPA10301-DPB10401 DPA10301-DPB110601 DPA10301-DPB11801 DPA10301-DPB12301 DPA10301-DPB13901 DPA10301-DPB14001 DPA10301-DPB16501 DPA10301-DPB17501 DPA10401-DPB10101 DPA10401-DPB10201 DPA10401-DPB10202 DPA10401-DPB10301 DPA10401-DPB10501 DPA10401-DPB11401 DQA10102-DQB10501 DQA10102-DQB10503 DQA10102-DQB10601 DQA10102-DQB10602 DQA10102-DQB10609 DQA10102-DQB10611 DQA10103-DQB10501 DQA10103-DQB10601 DQA10103-DQB10602 DQA10103-DQB10609 DQA10201-DQB10301 DQA10201-DQB10303; note = HLAs: DQA10506-DQB10303
HLEGKIILVAVHVASGY

SEQ ID NO: 3712 - protein, 13 aa, Human immunodeficiency virus 1
  source 1..13: note = HLAs: DQA10102-DQB10501
HLKTAVQMAVFIH

SEQ ID NO: 3713 - protein, 14 aa, Human immunodeficiency virus 1
  source 1..14: note = HLAs: DRB1_0101 DRB1_1001 DPA10103-DPB10101 DPA10103-DPB10201 DPA10103-DPB10202 DPA10103-DPB11501 DPA10103-DPB11601 DPA10103-DPB11901 DPA10103-DPB13401 DPA10103-DPB14001 DPA10103-DPB14801 DPA10103-DPB15001 DPA10104-DPB10101 DPA10104-DPB11501 DPA10105-DPB10101 DPA10105-DPB15001 DPA10106-DPB10101 DPA10201-DPB10101 DPA10201-DPB11501 DPA10202-DPB10101 DPA10202-DPB110601 DPA10202-DPB11901 DPA10301-DPB10101 DPA10301-DPB10201 DPA10301-DPB10202 DPA10301-DPB10401 DPA10301-DPB10402 DPA10301-DPB110501 DPA10301-DPB110601 DPA10301-DPB11801 DPA10301-DPB12301 DPA10301-DPB13901 DPA10301-DPB14001 DPA10301-DPB14901 DPA10301-DPB15501 DPA10301-DPB16501 DPA10301-DPB18001 DPA10401-DPB10101 DPA10401-DPB10201 DPA10401-DPB10202 DPA10401-DPB10501 DPA10401-DPB11301 DPA10401-DPB113301 DQA10102-DQB10501
HLKTAVQMAVFIHN

SEQ ID NO: 3714 - protein, 15 aa, Human immunodeficiency virus 1
  source 1..15: note = HLAs: DRB1_0101 DRB1_0102 DRB1_0404 DRB1_0410 DRB1_0701 DRB1_0901 DRB1_1001 DRB1_1102 DRB1_1301 DRB1_1304 DRB1_1404 DRB1_1406 DPA10103-DPB10101 DPA10103-DPB10201 DPA10103-DPB10202 DPA10103-DPB10401 DPA10103-DPB10501 DPA10103-DPB11101 DPA10103-DPB112601 DPA10103-DPB11501 DPA10103-DPB11601 DPA10103-DPB11801 DPA10103-DPB11901 DPA10103-DPB12301 DPA10103-DPB13101 DPA10103-DPB13401 DPA10103-DPB13901 DPA10103-DPB14001 DPA10103-DPB14101 DPA10103-DPB14801 DPA10103-DPB15001 DPA10103-DPB15501 DPA10103-DPB15901 DPA10104-DPB10101 DPA10104-DPB11501 DPA10105-DPB10101 DPA10105-DPB10401 DPA10105-DPB11801 DPA10105-DPB15001 DPA10106-DPB10101 DPA10201-DPB10101 DPA10201-DPB10202 DPA10201-DPB110601 DPA10201-DPB11501 DPA10201-DPB11601 DPA10201-DPB11901 DPA10202-DPB10101 DPA10202-DPB10201 DPA10202-DPB10202 DPA10202-DPB10501 DPA10202-DPB10901 DPA10202-DPB110601 DPA10202-DPB11101 DPA10202-DPB11301 DPA10202-DPB11801 DPA10202-DPB11901 DPA10202-DPB13101 DPA10202-DPB13801 DPA10202-DPB15501 DPA10202-DPB16501; note = HLAs: DPA10301-DPB10101 DPA10301-DPB10201 DPA10301-DPB10202 DPA10301-DPB10401 DPA10301-DPB10402 DPA10301-DPB10901 DPA10301-DPB110501 DPA10301-DPB110601 DPA10301-DPB11101 DPA10301-DPB11301 DPA10301-DPB11801 DPA10301-DPB12301 DPA10301-DPB13901 DPA10301-DPB14001 DPA10301-DPB14901 DPA10301-DPB15501 DPA10301-DPB16501 DPA10301-DPB17501 DPA10301-DPB18001 DPA10401-DPB10101 DPA10401-DPB10201 DPA10401-DPB10202 DPA10401-DPB10301 DPA10401-DPB10402 DPA10401-DPB10501 DPA10401-DPB110501 DPA10401-DPB11301 DPA10401-DPB113301 DPA10401-DPB11401 DPA10401-DPB14901 DQA10102-DQB10501 DQA10102-DQB10601 DQA10102-DQB10602 DQA10102-DQB10609 DQA10102-DQB10611 DQA10103-DQB10501 DQA10103-DQB10601 DQA10103-DQB10602 DQA10103-DQB10609 DQA10201-DQB10301 DQA10201-DQB10303
HLKTAVQMAVFIHNF

SEQ ID NO: 3715 - protein, 16 aa, Human immunodeficiency virus 1
  source 1..16: note = HLAs: DRB1_0101 DRB1_1001 DRB1_1406 DPA10103-DPB10101 DPA10103-DPB10201 DPA10103-DPB10202 DPA10103-DPB10401 DPA10103-DPB10501 DPA10103-DPB10601 DPA10103-DPB11101 DPA10103-DPB112601 DPA10103-DPB11501 DPA10103-DPB11601 DPA10103-DPB11801 DPA10103-DPB11901 DPA10103-DPB12301 DPA10103-DPB13101 DPA10103-DPB13401 DPA10103-DPB13901 DPA10103-DPB14001 DPA10103-DPB14101 DPA10103-DPB14801 DPA10103-DPB15001 DPA10103-DPB15501 DPA10103-DPB15901 DPA10104-DPB10101 DPA10104-DPB11501 DPA10105-DPB10101 DPA10105-DPB10401 DPA10105-DPB11801 DPA10105-DPB15001 DPA10106-DPB10101 DPA10106-DPB11101 DPA10201-DPB10101 DPA10201-DPB10201 DPA10201-DPB10202 DPA10201-DPB110601 DPA10201-DPB11101 DPA10201-DPB11501 DPA10201-DPB11601 DPA10201-DPB11901 DPA10201-DPB15501 DPA10202-DPB10101 DPA10202-DPB10201 DPA10202-DPB10202 DPA10202-DPB10501 DPA10202-DPB10901 DPA10202-DPB110601 DPA10202-DPB11101 DPA10202-DPB11301 DPA10202-DPB11801 DPA10202-DPB11901 DPA10202-DPB12101 DPA10202-DPB13001 DPA10202-DPB13101 DPA10202-DPB13801; note = HLAs: DPA10202-DPB15501 DPA10202-DPB16501 DPA10301-DPB10101 DPA10301-DPB10201 DPA10301-DPB10202 DPA10301-DPB10401 DPA10301-DPB10402 DPA10301-DPB10901 DPA10301-DPB110501 DPA10301-DPB110601 DPA10301-DPB11101 DPA10301-DPB11301 DPA10301-DPB11701 DPA10301-DPB11801 DPA10301-DPB12301 DPA10301-DPB13901 DPA10301-DPB14001 DPA10301-DPB14901 DPA10301-DPB15501 DPA10301-DPB16501 DPA10301-DPB17501 DPA10301-DPB18001 DPA10401-DPB10101 DPA10401-DPB10201 DPA10401-DPB10202 DPA10401-DPB10301 DPA10401-DPB10402 DPA10401-DPB10501 DPA10401-DPB110501 DPA10401-DPB11301 DPA10401-DPB113301 DPA10401-DPB11401 DPA10401-DPB14901 DQA10102-DQB10501 DQA10102-DQB10503 DQA10102-DQB10601 DQA10102-DQB10602 DQA10102-DQB10609 DQA10102-DQB10611 DQA10103-DQB10501 DQA10103-DQB10601 DQA10103-DQB10602 DQA10103-DQB10609 DQA10201-DQB10301 DQA10201-DQB10303
HLKTAVQMAVFIHNFK

SEQ ID NO: 3716 - protein, 17 aa, Human immunodeficiency virus 1
  source 1..17: note = HLAs: DRB1_0101 DRB1_0404 DRB1_0410 DRB1_0701 DRB1_0801 DRB1_0804 DRB1_0806 DRB1_0813 DRB1_0901 DRB1_1001 DRB1_1102 DRB1_1103 DRB1_1104 DRB1_1301 DRB1_1304 DRB1_1406 DRB1_1501 DRB1_1601 DRB1_1602 DPA10103-DPB10101 DPA10103-DPB10201 DPA10103-DPB10202 DPA10103-DPB10301 DPA10103-DPB10401 DPA10103-DPB10402 DPA10103-DPB10501 DPA10103-DPB10601 DPA10103-DPB110501 DPA10103-DPB11101 DPA10103-DPB112401 DPA10103-DPB112601 DPA10103-DPB11301 DPA10103-DPB113301 DPA10103-DPB11401 DPA10103-DPB11501 DPA10103-DPB11601 DPA10103-DPB11801 DPA10103-DPB11901 DPA10103-DPB12001 DPA10103-DPB12301 DPA10103-DPB13101 DPA10103-DPB13401 DPA10103-DPB13901 DPA10103-DPB14001 DPA10103-DPB14101 DPA10103-DPB14801 DPA10103-DPB14901 DPA10103-DPB15001 DPA10103-DPB15101 DPA10103-DPB15501 DPA10103-DPB15901 DPA10103-DPB18001 DPA10104-DPB10101 DPA10104-DPB10301 DPA10104-DPB11301 DPA10104-DPB11501 DPA10105-DPB10101 DPA10105-DPB10301 DPA10105-DPB10401 DPA10105-DPB11801 DPA10105-DPB15001 DPA10106-DPB10101 DPA10106-DPB11101; note = HLAs: DPA10201-DPB10101 DPA10201-DPB10201 DPA10201-DPB10202 DPA10201-DPB10501 DPA10201-DPB110601 DPA10201-DPB11101 DPA10201-DPB11301 DPA10201-DPB113301 DPA10201-DPB11501 DPA10201-DPB11601 DPA10201-DPB11801 DPA10201-DPB11901 DPA10201-DPB13401 DPA10201-DPB15501 DPA10202-DPB10101 DPA10202-DPB10201 DPA10202-DPB10202 DPA10202-DPB10401 DPA10202-DPB10402 DPA10202-DPB10501 DPA10202-DPB10901 DPA10202-DPB110001 DPA10202-DPB110501 DPA10202-DPB110601 DPA10202-DPB11101 DPA10202-DPB11301 DPA10202-DPB113101 DPA10202-DPB11401 DPA10202-DPB11701 DPA10202-DPB11801 DPA10202-DPB11901 DPA10202-DPB12101 DPA10202-DPB12901 DPA10202-DPB13001 DPA10202-DPB13101 DPA10202-DPB13801 DPA10202-DPB15501 DPA10202-DPB16501 DPA10202-DPB18501 DPA10301-DPB10101 DPA10301-DPB10201 DPA10301-DPB10202 DPA10301-DPB10401 DPA10301-DPB10402 DPA10301-DPB10901 DPA10301-DPB110501 DPA10301-DPB110601 DPA10301-DPB11101 DPA10301-DPB11301 DPA10301-DPB11701 DPA10301-DPB11801 DPA10301-DPB12301 DPA10301-DPB13901 DPA10301-DPB14001; note = HLAs: DPA10301-DPB14901 DPA10301-DPB15501 DPA10301-DPB16501 DPA10301-DPB17501 DPA10301-DPB18001 DPA10401-DPB10101 DPA10401-DPB10201 DPA10401-DPB10202 DPA10401-DPB10301 DPA10401-DPB10402 DPA10401-DPB10501 DPA10401-DPB110501 DPA10401-DPB11301 DPA10401-DPB113301 DPA10401-DPB11401 DPA10401-DPB14901 DQA10102-DQB10501 DQA10102-DQB10503 DQA10102-DQB10601 DQA10102-DQB10602 DQA10102-DQB10609 DQA10102-DQB10611 DQA10103-DQB10501 DQA10103-DQB10601 DQA10103-DQB10602 DQA10103-DQB10609 DQA10201-DQB10301
HLKTAVQMAVFIHNFKR

SEQ ID NO: 3717 - protein, 18 aa, Human immunodeficiency virus 1
  source 1..18: note = HLAs: DRB1_1001 DPA10103-DPB10101 DPA10103-DPB10201 DPA10103-DPB10202 DPA10103-DPB10401 DPA10103-DPB10501 DPA10103-DPB112601 DPA10103-DPB11501 DPA10103-DPB11601 DPA10103-DPB11801 DPA10103-DPB11901 DPA10103-DPB12301 DPA10103-DPB13101 DPA10103-DPB13401 DPA10103-DPB13901 DPA10103-DPB14001 DPA10103-DPB14101 DPA10103-DPB14801 DPA10103-DPB15001 DPA10103-DPB15901 DPA10104-DPB10101 DPA10104-DPB11501 DPA10105-DPB10101 DPA10105-DPB10401 DPA10105-DPB11801 DPA10105-DPB15001 DPA10106-DPB10101 DPA10201-DPB10101 DPA10201-DPB10202 DPA10201-DPB110601 DPA10201-DPB11501 DPA10201-DPB11601 DPA10201-DPB11901 DPA10202-DPB10101 DPA10202-DPB10201 DPA10202-DPB10202 DPA10202-DPB10501 DPA10202-DPB110601 DPA10202-DPB11801 DPA10202-DPB11901 DPA10202-DPB13101 DPA10202-DPB13801 DPA10202-DPB16501 DPA10301-DPB10101 DPA10301-DPB10201 DPA10301-DPB10202 DPA10301-DPB10401 DPA10301-DPB10402 DPA10301-DPB110501 DPA10301-DPB110601 DPA10301-DPB11101 DPA10301-DPB11801 DPA10301-DPB12301 DPA10301-DPB13901 DPA10301-DPB14001; note = HLAs: DPA10301-DPB14901 DPA10301-DPB15501 DPA10301-DPB16501 DPA10301-DPB17501 DPA10301-DPB18001 DPA10401-DPB10101 DPA10401-DPB10201 DPA10401-DPB10202 DPA10401-DPB10402 DPA10401-DPB10501 DPA10401-DPB110501 DPA10401-DPB11401 DPA10401-DPB14901 DQA10102-DQB10501 DQA10102-DQB10503 DQA10102-DQB10602 DQA10102-DQB10609 DQA10102-DQB10611 DQA10103-DQB10501
HLKTAVQMAVFIHNFKRK

SEQ ID NO: 3718 - protein, 19 aa, Human immunodeficiency virus 1
  source 1..19: note = HLAs: DRB1_0101 DRB1_0801 DRB1_0804 DRB1_0806 DRB1_1001 DRB1_1101 DRB1_1102 DRB1_1103 DRB1_1104 DRB1_1301 DRB1_1304 DRB1_1305 DRB1_1406 DRB1_1501 DRB1_1601 DRB1_1602 DPA10103-DPB10101 DPA10103-DPB10201 DPA10103-DPB10202 DPA10103-DPB10401 DPA10103-DPB10402 DPA10103-DPB10501 DPA10103-DPB10601 DPA10103-DPB110501 DPA10103-DPB11101 DPA10103-DPB112601 DPA10103-DPB11501 DPA10103-DPB11601 DPA10103-DPB11801 DPA10103-DPB11901 DPA10103-DPB12301 DPA10103-DPB13101 DPA10103-DPB13401 DPA10103-DPB13901 DPA10103-DPB14001 DPA10103-DPB14101 DPA10103-DPB14801 DPA10103-DPB14901 DPA10103-DPB15001 DPA10103-DPB15101 DPA10103-DPB15501 DPA10103-DPB15901 DPA10103-DPB18001 DPA10104-DPB10101 DPA10104-DPB11501 DPA10105-DPB10101 DPA10105-DPB10401 DPA10105-DPB11801 DPA10105-DPB15001 DPA10106-DPB10101 DPA10106-DPB11101 DPA10201-DPB10101 DPA10201-DPB10201 DPA10201-DPB10202 DPA10201-DPB10501 DPA10201-DPB110601 DPA10201-DPB11101 DPA10201-DPB11501 DPA10201-DPB11601 DPA10201-DPB11801 DPA10201-DPB11901 DPA10201-DPB13401; note = HLAs: DPA10201-DPB15501 DPA10202-DPB10101 DPA10202-DPB10201 DPA10202-DPB10202 DPA10202-DPB10401 DPA10202-DPB10501 DPA10202-DPB10901 DPA10202-DPB110001 DPA10202-DPB110601 DPA10202-DPB11101 DPA10202-DPB11301 DPA10202-DPB11801 DPA10202-DPB11901 DPA10202-DPB12101 DPA10202-DPB13001 DPA10202-DPB13101 DPA10202-DPB13801 DPA10202-DPB15501 DPA10202-DPB16501 DPA10301-DPB10101 DPA10301-DPB10201 DPA10301-DPB10202 DPA10301-DPB10401 DPA10301-DPB10402 DPA10301-DPB10901 DPA10301-DPB110501 DPA10301-DPB110601 DPA10301-DPB11101 DPA10301-DPB11301 DPA10301-DPB11701 DPA10301-DPB11801 DPA10301-DPB12301 DPA10301-DPB13901 DPA10301-DPB14001 DPA10301-DPB14901 DPA10301-DPB15501 DPA10301-DPB16501 DPA10301-DPB17501 DPA10301-DPB18001 DPA10401-DPB10101 DPA10401-DPB10201 DPA10401-DPB10202 DPA10401-DPB10301 DPA10401-DPB10402 DPA10401-DPB10501 DPA10401-DPB110501 DPA10401-DPB11301 DPA10401-DPB113301 DPA10401-DPB11401 DPA10401-DPB14901 DQA10102-DQB10501 DQA10102-DQB10503 DQA10102-DQB10601 DQA10102-DQB10602; note = HLAs: DQA10102-DQB10609 DQA10102-DQB10611 DQA10103-DQB10501 DQA10103-DQB10601 DQA10103-DQB10602 DQA10103-DQB10609
HLKTAVQMAVFIHNFKRKG

SEQ ID NO: 3719 - protein, 20 aa, Human immunodeficiency virus 1
  source 1..20: note = HLAs: DRB1_0101 DRB1_0404 DRB1_0410 DRB1_0701 DRB1_0801 DRB1_0802 DRB1_0804 DRB1_0806 DRB1_0809 DRB1_0813 DRB1_1001 DRB1_1101 DRB1_1102 DRB1_1103 DRB1_1104 DRB1_1114 DRB1_1301 DRB1_1302 DRB1_1304 DRB1_1305 DRB1_1402 DRB1_1406 DRB1_1501 DRB1_1503 DRB1_1601 DRB1_1602 DPA10103-DPB10101 DPA10103-DPB10201 DPA10103-DPB10202 DPA10103-DPB10401 DPA10103-DPB10402 DPA10103-DPB10501 DPA10103-DPB10601 DPA10103-DPB110501 DPA10103-DPB11101 DPA10103-DPB112601 DPA10103-DPB11501 DPA10103-DPB11601 DPA10103-DPB11801 DPA10103-DPB11901 DPA10103-DPB12001 DPA10103-DPB12301 DPA10103-DPB13101 DPA10103-DPB13401 DPA10103-DPB13901 DPA10103-DPB14001 DPA10103-DPB14101 DPA10103-DPB14801 DPA10103-DPB14901 DPA10103-DPB15001 DPA10103-DPB15101 DPA10103-DPB15501 DPA10103-DPB15901 DPA10103-DPB18001 DPA10104-DPB10101 DPA10104-DPB11501 DPA10105-DPB10101 DPA10105-DPB10401 DPA10105-DPB11801 DPA10105-DPB15001 DPA10106-DPB10101 DPA10106-DPB11101 DPA10201-DPB10101 DPA10201-DPB10201 DPA10201-DPB10202 DPA10201-DPB10501; note = HLAs: DPA10201-DPB110601 DPA10201-DPB11101 DPA10201-DPB11501 DPA10201-DPB11601 DPA10201-DPB11801 DPA10201-DPB11901 DPA10201-DPB13401 DPA10201-DPB15501 DPA10202-DPB10101 DPA10202-DPB10201 DPA10202-DPB10202 DPA10202-DPB10401 DPA10202-DPB10402 DPA10202-DPB10501 DPA10202-DPB10901 DPA10202-DPB110001 DPA10202-DPB110501 DPA10202-DPB110601 DPA10202-DPB11101 DPA10202-DPB11301 DPA10202-DPB113101 DPA10202-DPB11701 DPA10202-DPB11801 DPA10202-DPB11901 DPA10202-DPB12101 DPA10202-DPB12901 DPA10202-DPB13001 DPA10202-DPB13101 DPA10202-DPB13801 DPA10202-DPB15501 DPA10202-DPB16501 DPA10202-DPB18501 DPA10301-DPB10101 DPA10301-DPB10201 DPA10301-DPB10202 DPA10301-DPB10401 DPA10301-DPB10402 DPA10301-DPB10901 DPA10301-DPB110501 DPA10301-DPB110601 DPA10301-DPB11101 DPA10301-DPB11301 DPA10301-DPB11701 DPA10301-DPB11801 DPA10301-DPB12301 DPA10301-DPB13901 DPA10301-DPB14001 DPA10301-DPB14901 DPA10301-DPB15501 DPA10301-DPB16501 DPA10301-DPB17501 DPA10301-DPB18001 DPA10401-DPB10101 DPA10401-DPB10201; note = HLAs: DPA10401-DPB10202 DPA10401-DPB10301 DPA10401-DPB10402 DPA10401-DPB10501 DPA10401-DPB110501 DPA10401-DPB11301 DPA10401-DPB113301 DPA10401-DPB11401 DPA10401-DPB14901 DQA10102-DQB10501 DQA10102-DQB10503 DQA10102-DQB10601 DQA10102-DQB10602 DQA10102-DQB10609 DQA10102-DQB10611 DQA10103-DQB10501 DQA10103-DQB10601 DQA10103-DQB10602 DQA10103-DQB10609
HLKTAVQMAVFIHNFKRKGG

SEQ ID NO: 3720 - protein, 21 aa, Human immunodeficiency virus 1
  source 1..21: note = HLAs: DRB1_0101 DRB1_0801 DRB1_0802 DRB1_0804 DRB1_0806 DRB1_0809 DRB1_1001 DRB1_1101 DRB1_1102 DRB1_1103 DRB1_1104 DRB1_1301 DRB1_1304 DRB1_1305 DRB1_1406 DRB1_1501 DRB1_1503 DRB1_1601 DRB1_1602 DPA10103-DPB10101 DPA10103-DPB10201 DPA10103-DPB10202 DPA10103-DPB10401 DPA10103-DPB10501 DPA10103-DPB112601 DPA10103-DPB11501 DPA10103-DPB11601 DPA10103-DPB11801 DPA10103-DPB11901 DPA10103-DPB12301 DPA10103-DPB13101 DPA10103-DPB13401 DPA10103-DPB13901 DPA10103-DPB14001 DPA10103-DPB14101 DPA10103-DPB14801 DPA10103-DPB15001 DPA10104-DPB10101 DPA10104-DPB11501 DPA10105-DPB10101 DPA10105-DPB10401 DPA10105-DPB11801 DPA10105-DPB15001 DPA10106-DPB10101 DPA10201-DPB10101 DPA10201-DPB110601 DPA10201-DPB11501 DPA10201-DPB11601 DPA10201-DPB11901 DPA10202-DPB10101 DPA10202-DPB10201 DPA10202-DPB10202 DPA10202-DPB10501 DPA10202-DPB110601 DPA10202-DPB11801 DPA10202-DPB11901 DPA10202-DPB13101 DPA10202-DPB13801 DPA10202-DPB16501 DPA10301-DPB10101 DPA10301-DPB10201 DPA10301-DPB10202 DPA10301-DPB10401; note = HLAs: DPA10301-DPB10402 DPA10301-DPB110501 DPA10301-DPB110601 DPA10301-DPB11101 DPA10301-DPB11801 DPA10301-DPB12301 DPA10301-DPB13901 DPA10301-DPB14001 DPA10301-DPB14901 DPA10301-DPB15501 DPA10301-DPB16501 DPA10301-DPB17501 DPA10301-DPB18001 DPA10401-DPB10101 DPA10401-DPB10201 DPA10401-DPB10202 DPA10401-DPB10402 DPA10401-DPB10501 DPA10401-DPB110501 DPA10401-DPB11301 DPA10401-DPB113301 DPA10401-DPB14901 DQA10102-DQB10501 DQA10102-DQB10609 DQA10103-DQB10501 DQA10103-DQB10609
HLKTAVQMAVFIHNFKRKGGI

SEQ ID NO: 3721 - protein, 22 aa, Human immunodeficiency virus 1
  source 1..22: note = HLAs: DRB1_0101 DRB1_0801 DRB1_0802 DRB1_0804 DRB1_0806 DRB1_0809 DRB1_1001 DRB1_1101 DRB1_1102 DRB1_1103 DRB1_1104 DRB1_1301 DRB1_1304 DRB1_1305 DRB1_1406 DRB1_1501 DRB1_1503 DRB1_1601 DRB1_1602 DPA10103-DPB10101 DPA10103-DPB10201 DPA10103-DPB10202 DPA10103-DPB10401 DPA10103-DPB10501 DPA10103-DPB112601 DPA10103-DPB11501 DPA10103-DPB11601 DPA10103-DPB11801 DPA10103-DPB11901 DPA10103-DPB12301 DPA10103-DPB13101 DPA10103-DPB13401 DPA10103-DPB13901 DPA10103-DPB14001 DPA10103-DPB14101 DPA10103-DPB14801 DPA10103-DPB15001 DPA10104-DPB10101 DPA10104-DPB11501 DPA10105-DPB10101 DPA10105-DPB10401 DPA10105-DPB11801 DPA10105-DPB15001 DPA10106-DPB10101 DPA10201-DPB10101 DPA10201-DPB110601 DPA10201-DPB11501 DPA10201-DPB11601 DPA10201-DPB11901 DPA10202-DPB10101 DPA10202-DPB10201 DPA10202-DPB10202 DPA10202-DPB10501 DPA10202-DPB110601 DPA10202-DPB11801 DPA10202-DPB11901 DPA10202-DPB13101 DPA10202-DPB13801 DPA10202-DPB15501 DPA10202-DPB16501 DPA10301-DPB10101 DPA10301-DPB10201 DPA10301-DPB10202; note = HLAs: DPA10301-DPB10401 DPA10301-DPB10402 DPA10301-DPB110501 DPA10301-DPB110601 DPA10301-DPB11101 DPA10301-DPB11801 DPA10301-DPB12301 DPA10301-DPB13901 DPA10301-DPB14001 DPA10301-DPB14901 DPA10301-DPB15501 DPA10301-DPB16501 DPA10301-DPB17501 DPA10301-DPB18001 DPA10401-DPB10101 DPA10401-DPB10201 DPA10401-DPB10202 DPA10401-DPB10402 DPA10401-DPB10501 DPA10401-DPB110501 DPA10401-DPB11301 DPA10401-DPB113301 DPA10401-DPB14901 DQA10102-DQB10501 DQA10102-DQB10609 DQA10103-DQB10501 DQA10103-DQB10609
HLKTAVQMAVFIHNFKRKGGIG

SEQ ID NO: 3722 - protein, 23 aa, Human immunodeficiency virus 1
  source 1..23: note = HLAs: DRB1_0101 DRB1_0801 DRB1_0802 DRB1_0804 DRB1_0806 DRB1_0809 DRB1_1001 DRB1_1101 DRB1_1102 DRB1_1103 DRB1_1104 DRB1_1301 DRB1_1303 DRB1_1304 DRB1_1305 DRB1_1406 DRB1_1501 DRB1_1601 DRB1_1602 DPA10103-DPB10101 DPA10103-DPB10201 DPA10103-DPB10202 DPA10103-DPB10401 DPA10103-DPB10501 DPA10103-DPB112601 DPA10103-DPB11501 DPA10103-DPB11601 DPA10103-DPB11801 DPA10103-DPB11901 DPA10103-DPB12301 DPA10103-DPB13101 DPA10103-DPB13401 DPA10103-DPB13901 DPA10103-DPB14001 DPA10103-DPB14101 DPA10103-DPB14801 DPA10103-DPB15001 DPA10104-DPB10101 DPA10104-DPB11501 DPA10105-DPB10101 DPA10105-DPB10401 DPA10105-DPB11801 DPA10105-DPB15001 DPA10106-DPB10101 DPA10201-DPB10101 DPA10201-DPB10202 DPA10201-DPB110601 DPA10201-DPB11501 DPA10201-DPB11601 DPA10201-DPB11901 DPA10202-DPB10101 DPA10202-DPB10201 DPA10202-DPB10202 DPA10202-DPB10501 DPA10202-DPB110601 DPA10202-DPB11801 DPA10202-DPB11901 DPA10202-DPB13101 DPA10202-DPB13801 DPA10202-DPB15501 DPA10202-DPB16501 DPA10301-DPB10101 DPA10301-DPB10201; note = HLAs: DPA10301-DPB10202 DPA10301-DPB10401 DPA10301-DPB10402 DPA10301-DPB110501 DPA10301-DPB110601 DPA10301-DPB11101 DPA10301-DPB11801 DPA10301-DPB12301 DPA10301-DPB13901 DPA10301-DPB14001 DPA10301-DPB14901 DPA10301-DPB15501 DPA10301-DPB16501 DPA10301-DPB17501 DPA10301-DPB18001 DPA10401-DPB10101 DPA10401-DPB10201 DPA10401-DPB10202 DPA10401-DPB10402 DPA10401-DPB10501 DPA10401-DPB110501 DPA10401-DPB11301 DPA10401-DPB113301 DPA10401-DPB14901 DQA10102-DQB10501 DQA10102-DQB10609 DQA10103-DQB10501 DQA10103-DQB10609
HLKTAVQMAVFIHNFKRKGGIGG

SEQ ID NO: 3723 - protein, 24 aa, Human immunodeficiency virus 1
  source 1..24: note = HLAs: DRB1_0101 DRB1_0410 DRB1_0801 DRB1_0802 DRB1_0804 DRB1_0806 DRB1_0809 DRB1_0813 DRB1_1001 DRB1_1101 DRB1_1102 DRB1_1103 DRB1_1104 DRB1_1301 DRB1_1303 DRB1_1304 DRB1_1305 DRB1_1406 DRB1_1501 DRB1_1503 DRB1_1601 DRB1_1602 DPA10103-DPB10101 DPA10103-DPB10201 DPA10103-DPB10202 DPA10103-DPB10401 DPA10103-DPB10501 DPA10103-DPB112601 DPA10103-DPB11501 DPA10103-DPB11601 DPA10103-DPB11801 DPA10103-DPB11901 DPA10103-DPB12301 DPA10103-DPB13101 DPA10103-DPB13401 DPA10103-DPB13901 DPA10103-DPB14001 DPA10103-DPB14101 DPA10103-DPB14801 DPA10103-DPB15001 DPA10104-DPB10101 DPA10104-DPB11501 DPA10105-DPB10101 DPA10105-DPB10401 DPA10105-DPB11801 DPA10105-DPB15001 DPA10106-DPB10101 DPA10201-DPB10101 DPA10201-DPB10202 DPA10201-DPB110601 DPA10201-DPB11501 DPA10201-DPB11601 DPA10201-DPB11901 DPA10202-DPB10101 DPA10202-DPB10201 DPA10202-DPB10202 DPA10202-DPB10501 DPA10202-DPB110601 DPA10202-DPB11801 DPA10202-DPB11901 DPA10202-DPB13101 DPA10202-DPB13801 DPA10202-DPB15501 DPA10202-DPB16501; note = HLAs: DPA10301-DPB10101 DPA10301-DPB10201 DPA10301-DPB10202 DPA10301-DPB10401 DPA10301-DPB10402 DPA10301-DPB110501 DPA10301-DPB110601 DPA10301-DPB11101 DPA10301-DPB11801 DPA10301-DPB12301 DPA10301-DPB13901 DPA10301-DPB14001 DPA10301-DPB14901 DPA10301-DPB15501 DPA10301-DPB16501 DPA10301-DPB17501 DPA10301-DPB18001 DPA10401-DPB10101 DPA10401-DPB10201 DPA10401-DPB10202 DPA10401-DPB10402 DPA10401-DPB10501 DPA10401-DPB110501 DPA10401-DPB11301 DPA10401-DPB113301 DPA10401-DPB14901 DQA10102-DQB10501 DQA10102-DQB10609 DQA10103-DQB10501 DQA10103-DQB10609
HLKTAVQMAVFIHNFKRKGGIGGY

SEQ ID NO: 3724 - protein, 25 aa, Human immunodeficiency virus 1
  source 1..25: note = HLAs: DRB1_0101 DRB1_0410 DRB1_0801 DRB1_0802 DRB1_0804 DRB1_0806 DRB1_0809 DRB1_0813 DRB1_1001 DRB1_1101 DRB1_1102 DRB1_1103 DRB1_1104 DRB1_1301 DRB1_1303 DRB1_1304 DRB1_1305 DRB1_1406 DRB1_1501 DRB1_1503 DRB1_1601 DRB1_1602 DPA10103-DPB10101 DPA10103-DPB10201 DPA10103-DPB10202 DPA10103-DPB10401 DPA10103-DPB10501 DPA10103-DPB112601 DPA10103-DPB11501 DPA10103-DPB11601 DPA10103-DPB11801 DPA10103-DPB11901 DPA10103-DPB12301 DPA10103-DPB13101 DPA10103-DPB13401 DPA10103-DPB13901 DPA10103-DPB14001 DPA10103-DPB14101 DPA10103-DPB14801 DPA10103-DPB15001 DPA10104-DPB10101 DPA10104-DPB11501 DPA10105-DPB10101 DPA10105-DPB10401 DPA10105-DPB11801 DPA10105-DPB15001 DPA10106-DPB10101 DPA10201-DPB10101 DPA10201-DPB10202 DPA10201-DPB110601 DPA10201-DPB11501 DPA10201-DPB11601 DPA10201-DPB11901 DPA10202-DPB10101 DPA10202-DPB10201 DPA10202-DPB10202 DPA10202-DPB10501 DPA10202-DPB110601 DPA10202-DPB11801 DPA10202-DPB11901 DPA10202-DPB13101 DPA10202-DPB13801 DPA10202-DPB15501 DPA10202-DPB16501; note = HLAs: DPA10301-DPB10101 DPA10301-DPB10201 DPA10301-DPB10202 DPA10301-DPB10401 DPA10301-DPB10402 DPA10301-DPB110501 DPA10301-DPB110601 DPA10301-DPB11101 DPA10301-DPB11801 DPA10301-DPB12301 DPA10301-DPB13901 DPA10301-DPB14001 DPA10301-DPB14901 DPA10301-DPB15501 DPA10301-DPB16501 DPA10301-DPB17501 DPA10301-DPB18001 DPA10401-DPB10101 DPA10401-DPB10201 DPA10401-DPB10202 DPA10401-DPB10402 DPA10401-DPB10501 DPA10401-DPB110501 DPA10401-DPB11301 DPA10401-DPB113301 DPA10401-DPB11401 DPA10401-DPB14901 DQA10102-DQB10501 DQA10102-DQB10609 DQA10103-DQB10501 DQA10103-DQB10609
HLKTAVQMAVFIHNFKRKGGIGGYS

SEQ ID NO: 3725 - protein, 20 aa, Human immunodeficiency virus 1
  source 1..20: note = HLAs: DQA10201-DQB10301
HNFKRKGGIGGYSAGERIID

SEQ ID NO: 3726 - protein, 15 aa, Human immunodeficiency virus 1
  source 1..15: note = HLAs: DRB1_0101 DRB1_1102 DRB1_1103 DRB1_1104 DRB1_1301 DRB1_1304 DRB1_1406
HPAGLKKKKSVTVLD

SEQ ID NO: 3727 - protein, 16 aa, Human immunodeficiency virus 1
  source 1..16: note = HLAs: DRB1_1102 DRB1_1103 DRB1_1301 DRB1_1304 DPA10103-DPB10101 DPA10103-DPB11501 DPA10103-DPB15001 DPA10104-DPB10101 DPA10104-DPB11501 DPA10105-DPB10101 DPA10105-DPB15001 DPA10202-DPB10101 DPA10202-DPB110601 DPA10202-DPB11901 DPA10301-DPB10101 DPA10301-DPB10201 DPA10301-DPB10202 DPA10301-DPB10401 DPA10301-DPB110601 DPA10301-DPB11801 DPA10301-DPB12301 DPA10301-DPB13901 DPA10301-DPB16501 DPA10401-DPB10101
HPAGLKKKKSVTVLDV

SEQ ID NO: 3728 - protein, 17 aa, Human immunodeficiency virus 1
  source 1..17: note = HLAs: DRB1_0101 DRB1_1001 DRB1_1102 DRB1_1103 DRB1_1104 DRB1_1301 DRB1_1304 DPA10103-DPB10101 DPA10103-DPB11501 DPA10103-DPB15001 DPA10104-DPB10101 DPA10104-DPB11501 DPA10105-DPB10101 DPA10105-DPB15001 DPA10202-DPB10101 DPA10202-DPB110601 DPA10202-DPB11901 DPA10301-DPB10101 DPA10301-DPB10201 DPA10301-DPB10202 DPA10301-DPB110601 DPA10301-DPB11801 DPA10301-DPB14001 DPA10301-DPB16501 DPA10401-DPB10101
HPAGLKKKKSVTVLDVG

SEQ ID NO: 3729 - protein, 19 aa, Human immunodeficiency virus 1
  source 1..19: note = HLAs: DRB1_1102 DRB1_1301 DPA10103-DPB10101 DPA10103-DPB11501 DPA10103-DPB15001 DPA10104-DPB10101 DPA10104-DPB11501 DPA10105-DPB10101 DPA10105-DPB15001 DPA10202-DPB10101 DPA10301-DPB10101 DPA10301-DPB10201 DPA10301-DPB10202 DPA10301-DPB110601 DPA10301-DPB11801 DPA10301-DPB14001 DPA10301-DPB16501 DPA10401-DPB10101
HPAGLKKKKSVTVLDVGDA

SEQ ID NO: 3730 - protein, 20 aa, Human immunodeficiency virus 1
  source 1..20: note = HLAs: DRB1_0101 DRB1_0701 DRB1_0801 DRB1_0804 DRB1_0806 DRB1_0813 DRB1_1001 DRB1_1102 DRB1_1103 DRB1_1104 DRB1_1114 DRB1_1301 DRB1_1302 DRB1_1304 DPA10103-DPB10101 DPA10103-DPB11501 DPA10103-DPB11901 DPA10103-DPB13101 DPA10103-DPB15001 DPA10104-DPB10101 DPA10104-DPB11501 DPA10105-DPB10101 DPA10105-DPB15001 DPA10202-DPB10101 DPA10202-DPB10501 DPA10202-DPB110601 DPA10202-DPB11101 DPA10202-DPB11401 DPA10202-DPB11901 DPA10202-DPB13801 DPA10202-DPB15501 DPA10301-DPB10101 DPA10301-DPB10201 DPA10301-DPB10202 DPA10301-DPB10401 DPA10301-DPB110601 DPA10301-DPB11801 DPA10301-DPB12301 DPA10301-DPB13901 DPA10301-DPB14001 DPA10301-DPB15501 DPA10301-DPB16501 DPA10401-DPB10101 DPA10401-DPB10201 DPA10401-DPB10202 DPA10401-DPB10301 DPA10401-DPB10501 DPA10401-DPB11401 DQA10102-DQB10501 DQA10102-DQB10609
HPAGLKKKKSVTVLDVGDAY

SEQ ID NO: 3731 - protein, 21 aa, Human immunodeficiency virus 1
  source 1..21: note = HLAs: DRB1_0101 DRB1_0410 DRB1_0806 DRB1_1001 DRB1_1102 DRB1_1301 DRB1_1304 DPA10103-DPB10101 DPA10103-DPB11501 DPA10103-DPB15001 DPA10104-DPB10101 DPA10104-DPB11501 DPA10105-DPB10101 DPA10105-DPB15001 DPA10202-DPB10101 DPA10301-DPB10101 DPA10301-DPB10201 DPA10301-DPB10202 DPA10301-DPB110601 DPA10301-DPB11801 DPA10301-DPB14001 DPA10301-DPB16501 DPA10401-DPB10101 DPA10401-DPB10202 DPA10401-DPB10501 DQA10102-DQB10501 DQA10102-DQB10609
HPAGLKKKKSVTVLDVGDAYF

SEQ ID NO: 3732 - protein, 22 aa, Human immunodeficiency virus 1
  source 1..22: note = HLAs: DRB1_0101 DRB1_0404 DRB1_0410 DRB1_0806 DRB1_1001 DRB1_1102 DRB1_1103 DRB1_1301 DRB1_1304 DRB1_1406 DPA10103-DPB10101 DPA10103-DPB11501 DPA10103-DPB15001 DPA10104-DPB10101 DPA10104-DPB11501 DPA10105-DPB10101 DPA10105-DPB15001 DPA10202-DPB10101 DPA10202-DPB110601 DPA10202-DPB11901 DPA10301-DPB10101 DPA10301-DPB10201 DPA10301-DPB10202 DPA10301-DPB10401 DPA10301-DPB110601 DPA10301-DPB11801 DPA10301-DPB12301 DPA10301-DPB13901 DPA10301-DPB14001 DPA10301-DPB16501 DPA10401-DPB10101 DPA10401-DPB10202 DPA10401-DPB10501 DQA10102-DQB10501 DQA10102-DQB10604 DQA10102-DQB10609
HPAGLKKKKSVTVLDVGDAYFS

SEQ ID NO: 3733 - protein, 23 aa, Human immunodeficiency virus 1
  source 1..23: note = HLAs: DRB1_0101 DRB1_0404 DRB1_0410 DRB1_0806 DRB1_1001 DRB1_1102 DRB1_1103 DRB1_1114 DRB1_1301 DRB1_1302 DRB1_1304 DRB1_1406 DPA10103-DPB10101 DPA10103-DPB11501 DPA10103-DPB15001 DPA10104-DPB10101 DPA10104-DPB11501 DPA10105-DPB10101 DPA10105-DPB15001 DPA10202-DPB10101 DPA10202-DPB110601 DPA10202-DPB11901 DPA10301-DPB10101 DPA10301-DPB10201 DPA10301-DPB10202 DPA10301-DPB10401 DPA10301-DPB110601 DPA10301-DPB11801 DPA10301-DPB12301 DPA10301-DPB13901 DPA10301-DPB14001 DPA10301-DPB16501 DPA10401-DPB10101 DPA10401-DPB10201 DPA10401-DPB10202 DPA10401-DPB10501 DQA10102-DQB10501 DQA10102-DQB10503 DQA10102-DQB10604 DQA10102-DQB10609 DQA10103-DQB10501 DQA10103-DQB10609
HPAGLKKKKSVTVLDVGDAYFSV

SEQ ID NO: 3734 - protein, 24 aa, Human immunodeficiency virus 1
  source 1..24: note = HLAs: DRB1_0101 DRB1_0404 DRB1_0410 DRB1_0806 DRB1_1001 DRB1_1102 DRB1_1103 DRB1_1114 DRB1_1301 DRB1_1302 DRB1_1304 DRB1_1406 DPA10103-DPB10101 DPA10103-DPB11501 DPA10103-DPB15001 DPA10104-DPB10101 DPA10104-DPB11501 DPA10105-DPB10101 DPA10105-DPB15001 DPA10202-DPB10101 DPA10202-DPB110601 DPA10202-DPB11901 DPA10301-DPB10101 DPA10301-DPB10201 DPA10301-DPB10202 DPA10301-DPB10401 DPA10301-DPB110601 DPA10301-DPB11801 DPA10301-DPB12301 DPA10301-DPB13901 DPA10301-DPB14001 DPA10301-DPB16501 DPA10401-DPB10101 DPA10401-DPB10201 DPA10401-DPB10202 DPA10401-DPB10501 DQA10102-DQB10501 DQA10102-DQB10503 DQA10102-DQB10604 DQA10102-DQB10609 DQA10103-DQB10501 DQA10103-DQB10609
HPAGLKKKKSVTVLDVGDAYFSVP

SEQ ID NO: 3735 - protein, 25 aa, Human immunodeficiency virus 1
  source 1..25: note = HLAs: DRB1_0101 DRB1_0404 DRB1_0410 DRB1_0806 DRB1_1001 DRB1_1102 DRB1_1103 DRB1_1104 DRB1_1114 DRB1_1301 DRB1_1302 DRB1_1304 DRB1_1406 DPA10103-DPB10101 DPA10103-DPB11501 DPA10103-DPB11901 DPA10103-DPB13101 DPA10103-DPB15001 DPA10104-DPB10101 DPA10104-DPB11501 DPA10105-DPB10101 DPA10105-DPB15001 DPA10202-DPB10101 DPA10202-DPB110601 DPA10202-DPB11901 DPA10301-DPB10101 DPA10301-DPB10201 DPA10301-DPB10202 DPA10301-DPB10401 DPA10301-DPB110601 DPA10301-DPB11801 DPA10301-DPB12301 DPA10301-DPB13901 DPA10301-DPB14001 DPA10301-DPB16501 DPA10401-DPB10101 DPA10401-DPB10201 DPA10401-DPB10202 DPA10401-DPB10501 DQA10102-DQB10501 DQA10102-DQB10503 DQA10102-DQB10604 DQA10102-DQB10609 DQA10103-DQB10501 DQA10103-DQB10609
HPAGLKKKKSVTVLDVGDAYFSVPL

SEQ ID NO: 3736 - protein, 15 aa, Human immunodeficiency virus 1
  source 1..15: note = HLAs: DRB1_1001 DQA10102-DQB10501
HQAAMQMLKDTINEE

SEQ ID NO: 3737 - protein, 16 aa, Human immunodeficiency virus 1
  source 1..16: note = HLAs: DPA10301-DPB10101 DQA10102-DQB10501 DQA10102-DQB10609
HQAAMQMLKDTINEEA

SEQ ID NO: 3738 - protein, 17 aa, Human immunodeficiency virus 1
  source 1..17: note = HLAs: DRB1_1001 DPA10301-DPB10101 DQA10102-DQB10501 DQA10102-DQB10609
HQAAMQMLKDTINEEAA

SEQ ID NO: 3739 - protein, 18 aa, Human immunodeficiency virus 1
  source 1..18: note = HLAs: DQA10102-DQB10501
HQAAMQMLKDTINEEAAE

SEQ ID NO: 3740 - protein, 19 aa, Human immunodeficiency virus 1
  source 1..19: note = HLAs: DPA10301-DPB10101 DPA10401-DPB10101 DQA10102-DQB10501 DQA10102-DQB10609
HQAAMQMLKDTINEEAAEW

SEQ ID NO: 3741 - protein, 20 aa, Human immunodeficiency virus 1
  source 1..20: note = HLAs: DRB1_1001 DPA10301-DPB10101 DPA10401-DPB10101 DQA10102-DQB10501 DQA10102-DQB10503 DQA10102-DQB10609 DQA10103-DQB10501 DQA10103-DQB10609
HQAAMQMLKDTINEEAAEWD

SEQ ID NO: 3742 - protein, 21 aa, Human immunodeficiency virus 1
  source 1..21: note = HLAs: DRB1_1001 DPA10301-DPB10101 DPA10401-DPB10101 DQA10102-DQB10501 DQA10102-DQB10609
HQAAMQMLKDTINEEAAEWDR

SEQ ID NO: 3743 - protein, 15 aa, Human immunodeficiency virus 1
  source 1..15: note = HLAs: DRB1_0101 DRB1_1001 DRB1_1501 DPA10103-DPB10101 DPA10103-DPB10201 DPA10103-DPB10202 DPA10103-DPB10401 DPA10103-DPB112601 DPA10103-DPB11501 DPA10103-DPB11601 DPA10103-DPB11901 DPA10103-DPB12301 DPA10103-DPB13101 DPA10103-DPB13401 DPA10103-DPB13901 DPA10103-DPB14001 DPA10103-DPB14101 DPA10103-DPB14801 DPA10103-DPB15001 DPA10103-DPB15901 DPA10104-DPB10101 DPA10104-DPB11501 DPA10105-DPB10101 DPA10105-DPB10401 DPA10105-DPB15001 DPA10106-DPB10101 DPA10201-DPB10101 DPA10201-DPB11501 DPA10201-DPB11601 DPA10202-DPB10101 DPA10202-DPB10202 DPA10202-DPB110601 DPA10202-DPB11901 DPA10202-DPB13101 DPA10202-DPB16501 DPA10301-DPB10101 DPA10301-DPB10201 DPA10301-DPB10202 DPA10301-DPB10401 DPA10301-DPB10402 DPA10301-DPB110501 DPA10301-DPB110601 DPA10301-DPB11801 DPA10301-DPB12301 DPA10301-DPB13901 DPA10301-DPB14001 DPA10301-DPB14901 DPA10301-DPB16501 DPA10301-DPB17501 DPA10301-DPB18001 DPA10401-DPB10101 DPA10401-DPB10201 DPA10401-DPB10202 DQA10102-DQB10501
HQKEPPFLWMGYELH

SEQ ID NO: 3744 - protein, 16 aa, Human immunodeficiency virus 1
  source 1..16: note = HLAs: DRB1_1001 DPA10103-DPB10101 DPA10103-DPB10201 DPA10103-DPB10202 DPA10103-DPB10401 DPA10103-DPB112601 DPA10103-DPB11501 DPA10103-DPB11601 DPA10103-DPB11801 DPA10103-DPB11901 DPA10103-DPB12301 DPA10103-DPB13101 DPA10103-DPB13401 DPA10103-DPB13901 DPA10103-DPB14001 DPA10103-DPB14101 DPA10103-DPB14801 DPA10103-DPB15001 DPA10103-DPB15901 DPA10104-DPB10101 DPA10104-DPB11501 DPA10105-DPB10101 DPA10105-DPB10401 DPA10105-DPB11801 DPA10105-DPB15001 DPA10106-DPB10101 DPA10201-DPB10101 DPA10201-DPB10202 DPA10201-DPB110601 DPA10201-DPB11501 DPA10201-DPB11601 DPA10201-DPB11901 DPA10202-DPB10101 DPA10202-DPB10201 DPA10202-DPB10202 DPA10202-DPB10401 DPA10202-DPB110601 DPA10202-DPB11901 DPA10202-DPB13101 DPA10202-DPB16501 DPA10301-DPB10101 DPA10301-DPB10201 DPA10301-DPB10202 DPA10301-DPB10401 DPA10301-DPB10402 DPA10301-DPB110501 DPA10301-DPB110601 DPA10301-DPB11801 DPA10301-DPB12301 DPA10301-DPB13901 DPA10301-DPB14001 DPA10301-DPB14901 DPA10301-DPB15501 DPA10301-DPB16501 DPA10301-DPB17501; note = HLAs: DPA10301-DPB18001 DPA10401-DPB10101 DPA10401-DPB10201 DPA10401-DPB10202 DPA10401-DPB10402 DPA10401-DPB10501 DPA10401-DPB110501 DPA10401-DPB14901 DQA10102-DQB10501
HQKEPPFLWMGYELHP

SEQ ID NO: 3745 - protein, 17 aa, Human immunodeficiency virus 1
  source 1..17: note = HLAs: DRB1_1001 DPA10103-DPB10101 DPA10103-DPB10201 DPA10103-DPB10202 DPA10103-DPB10401 DPA10103-DPB112601 DPA10103-DPB11501 DPA10103-DPB11601 DPA10103-DPB11901 DPA10103-DPB12301 DPA10103-DPB13101 DPA10103-DPB13401 DPA10103-DPB13901 DPA10103-DPB14001 DPA10103-DPB14101 DPA10103-DPB14801 DPA10103-DPB15001 DPA10103-DPB15901 DPA10104-DPB10101 DPA10104-DPB11501 DPA10105-DPB10101 DPA10105-DPB10401 DPA10105-DPB15001 DPA10106-DPB10101 DPA10201-DPB10101 DPA10201-DPB110601 DPA10201-DPB11501 DPA10201-DPB11601 DPA10201-DPB11901 DPA10202-DPB10101 DPA10202-DPB10201 DPA10202-DPB10202 DPA10202-DPB10401 DPA10202-DPB110601 DPA10202-DPB11901 DPA10202-DPB13101 DPA10202-DPB16501 DPA10301-DPB10101 DPA10301-DPB10201 DPA10301-DPB10202 DPA10301-DPB10401 DPA10301-DPB10402 DPA10301-DPB110501 DPA10301-DPB110601 DPA10301-DPB11801 DPA10301-DPB12301 DPA10301-DPB13901 DPA10301-DPB14001 DPA10301-DPB14901 DPA10301-DPB15501 DPA10301-DPB16501 DPA10301-DPB17501 DPA10301-DPB18001 DPA10401-DPB10101 DPA10401-DPB10201; note = HLAs: DPA10401-DPB10202 DPA10401-DPB10402 DPA10401-DPB10501 DPA10401-DPB110501 DPA10401-DPB14901 DQA10101-DQB10501 DQA10102-DQB10501 DQA10102-DQB10502 DQA10102-DQB10503 DQA10103-DQB10501 DQA10104-DQB10501 DQA10105-DQB10501
HQKEPPFLWMGYELHPD

SEQ ID NO: 3746 - protein, 18 aa, Human immunodeficiency virus 1
  source 1..18: note = HLAs: DPA10103-DPB10101 DPA10103-DPB10201 DPA10103-DPB10202 DPA10103-DPB10401 DPA10103-DPB112601 DPA10103-DPB11501 DPA10103-DPB11601 DPA10103-DPB12301 DPA10103-DPB13101 DPA10103-DPB13401 DPA10103-DPB13901 DPA10103-DPB14001 DPA10103-DPB14101 DPA10103-DPB14801 DPA10103-DPB15001 DPA10103-DPB15901 DPA10104-DPB10101 DPA10104-DPB11501 DPA10105-DPB10101 DPA10105-DPB10401 DPA10105-DPB15001 DPA10106-DPB10101 DPA10201-DPB10101 DPA10201-DPB11501 DPA10201-DPB11601 DPA10202-DPB10101 DPA10202-DPB10202 DPA10202-DPB110601 DPA10202-DPB11901 DPA10202-DPB13101 DPA10202-DPB16501 DPA10301-DPB10101 DPA10301-DPB10201 DPA10301-DPB10202 DPA10301-DPB10401 DPA10301-DPB10402 DPA10301-DPB110501 DPA10301-DPB110601 DPA10301-DPB11801 DPA10301-DPB12301 DPA10301-DPB13901 DPA10301-DPB14001 DPA10301-DPB14901 DPA10301-DPB15501 DPA10301-DPB16501 DPA10301-DPB18001 DPA10401-DPB10101 DPA10401-DPB10201 DPA10401-DPB10202 DQA10101-DQB10501 DQA10102-DQB10501 DQA10102-DQB10502 DQA10104-DQB10501 DQA10105-DQB10501
HQKEPPFLWMGYELHPDK

SEQ ID NO: 3747 - protein, 19 aa, Human immunodeficiency virus 1
  source 1..19: note = HLAs: DRB1_1001 DPA10103-DPB10101 DPA10103-DPB10201 DPA10103-DPB10202 DPA10103-DPB10401 DPA10103-DPB112601 DPA10103-DPB11501 DPA10103-DPB11601 DPA10103-DPB11801 DPA10103-DPB11901 DPA10103-DPB12301 DPA10103-DPB13101 DPA10103-DPB13401 DPA10103-DPB13901 DPA10103-DPB14001 DPA10103-DPB14101 DPA10103-DPB14801 DPA10103-DPB15001 DPA10103-DPB15901 DPA10104-DPB10101 DPA10104-DPB11501 DPA10105-DPB10101 DPA10105-DPB10401 DPA10105-DPB11801 DPA10105-DPB15001 DPA10106-DPB10101 DPA10201-DPB10101 DPA10201-DPB10201 DPA10201-DPB10202 DPA10201-DPB110601 DPA10201-DPB11501 DPA10201-DPB11601 DPA10201-DPB11901 DPA10201-DPB13401 DPA10202-DPB10101 DPA10202-DPB10201 DPA10202-DPB10202 DPA10202-DPB10401 DPA10202-DPB110601 DPA10202-DPB11901 DPA10202-DPB13101 DPA10202-DPB15501 DPA10202-DPB16501 DPA10301-DPB10101 DPA10301-DPB10201 DPA10301-DPB10202 DPA10301-DPB10401 DPA10301-DPB10402 DPA10301-DPB110501 DPA10301-DPB110601 DPA10301-DPB11101 DPA10301-DPB11301 DPA10301-DPB11801 DPA10301-DPB12301 DPA10301-DPB13901; note = HLAs: DPA10301-DPB14001 DPA10301-DPB14901 DPA10301-DPB15501 DPA10301-DPB16501 DPA10301-DPB17501 DPA10301-DPB18001 DPA10401-DPB10101 DPA10401-DPB10201 DPA10401-DPB10202 DPA10401-DPB10402 DPA10401-DPB10501 DPA10401-DPB110501 DPA10401-DPB14901 DQA10101-DQB10501 DQA10101-DQB10503 DQA10102-DQB10501 DQA10102-DQB10502 DQA10102-DQB10503 DQA10103-DQB10501 DQA10104-DQB10501 DQA10104-DQB10503 DQA10105-DQB10501 DQA10107-DQB10503
HQKEPPFLWMGYELHPDKW

SEQ ID NO: 3748 - protein, 20 aa, Human immunodeficiency virus 1
  source 1..20: note = HLAs: DRB1_0101 DRB1_0405 DRB1_1001 DRB1_1501 DRB1_1503 DRB1_1602 DPA10103-DPB10101 DPA10103-DPB10201 DPA10103-DPB10202 DPA10103-DPB10401 DPA10103-DPB10402 DPA10103-DPB10501 DPA10103-DPB110501 DPA10103-DPB11101 DPA10103-DPB112601 DPA10103-DPB11501 DPA10103-DPB11601 DPA10103-DPB11801 DPA10103-DPB11901 DPA10103-DPB12301 DPA10103-DPB13101 DPA10103-DPB13401 DPA10103-DPB13901 DPA10103-DPB14001 DPA10103-DPB14101 DPA10103-DPB14801 DPA10103-DPB14901 DPA10103-DPB15001 DPA10103-DPB15101 DPA10103-DPB15501 DPA10103-DPB15901 DPA10103-DPB18001 DPA10104-DPB10101 DPA10104-DPB11501 DPA10105-DPB10101 DPA10105-DPB10401 DPA10105-DPB11801 DPA10105-DPB15001 DPA10106-DPB10101 DPA10201-DPB10101 DPA10201-DPB10201 DPA10201-DPB10202 DPA10201-DPB10401 DPA10201-DPB10501 DPA10201-DPB110601 DPA10201-DPB11501 DPA10201-DPB11601 DPA10201-DPB11901 DPA10201-DPB13401 DPA10201-DPB15501 DPA10202-DPB10101 DPA10202-DPB10201 DPA10202-DPB10202 DPA10202-DPB10401 DPA10202-DPB10501 DPA10202-DPB110601 DPA10202-DPB11101; note = HLAs: DPA10202-DPB11301 DPA10202-DPB11801 DPA10202-DPB11901 DPA10202-DPB13101 DPA10202-DPB13801 DPA10202-DPB15501 DPA10202-DPB16501 DPA10301-DPB10101 DPA10301-DPB10201 DPA10301-DPB10202 DPA10301-DPB10401 DPA10301-DPB10402 DPA10301-DPB110501 DPA10301-DPB110601 DPA10301-DPB11101 DPA10301-DPB11301 DPA10301-DPB11801 DPA10301-DPB12301 DPA10301-DPB13901 DPA10301-DPB14001 DPA10301-DPB14901 DPA10301-DPB15501 DPA10301-DPB16501 DPA10301-DPB17501 DPA10301-DPB18001 DPA10401-DPB10101 DPA10401-DPB10201 DPA10401-DPB10202 DPA10401-DPB10402 DPA10401-DPB10501 DPA10401-DPB110501 DPA10401-DPB14901 DQA10101-DQB10501 DQA10101-DQB10503 DQA10102-DQB10501 DQA10102-DQB10502 DQA10102-DQB10503 DQA10103-DQB10501 DQA10104-DQB10501 DQA10104-DQB10503 DQA10105-DQB10501 DQA10107-DQB10503 DQA10505-DQB10402
HQKEPPFLWMGYELHPDKWT

SEQ ID NO: 3749 - protein, 21 aa, Human immunodeficiency virus 1
  source 1..21: note = HLAs: DRB1_1001 DPA10103-DPB10101 DPA10103-DPB10201 DPA10103-DPB10202 DPA10103-DPB10401 DPA10103-DPB112601 DPA10103-DPB11501 DPA10103-DPB11601 DPA10103-DPB11801 DPA10103-DPB11901 DPA10103-DPB12301 DPA10103-DPB13101 DPA10103-DPB13401 DPA10103-DPB13901 DPA10103-DPB14001 DPA10103-DPB14101 DPA10103-DPB14801 DPA10103-DPB15001 DPA10103-DPB15901 DPA10104-DPB10101 DPA10104-DPB11501 DPA10105-DPB10101 DPA10105-DPB10401 DPA10105-DPB11801 DPA10105-DPB15001 DPA10106-DPB10101 DPA10201-DPB10101 DPA10201-DPB110601 DPA10201-DPB11501 DPA10201-DPB11601 DPA10201-DPB11901 DPA10202-DPB10101 DPA10202-DPB10201 DPA10202-DPB10202 DPA10202-DPB10401 DPA10202-DPB110601 DPA10202-DPB11901 DPA10202-DPB13101 DPA10202-DPB16501 DPA10301-DPB10101 DPA10301-DPB10201 DPA10301-DPB10202 DPA10301-DPB10401 DPA10301-DPB10402 DPA10301-DPB110501 DPA10301-DPB110601 DPA10301-DPB11801 DPA10301-DPB12301 DPA10301-DPB13901 DPA10301-DPB14001 DPA10301-DPB14901 DPA10301-DPB15501 DPA10301-DPB16501 DPA10301-DPB17501 DPA10301-DPB18001; note = HLAs: DPA10401-DPB10101 DPA10401-DPB10201 DPA10401-DPB10202 DPA10401-DPB10402 DPA10401-DPB10501 DPA10401-DPB110501 DPA10401-DPB14901 DQA10101-DQB10501 DQA10102-DQB10501 DQA10102-DQB10502 DQA10102-DQB10503 DQA10103-DQB10501 DQA10104-DQB10501 DQA10105-DQB10501
HQKEPPFLWMGYELHPDKWTV

SEQ ID NO: 3750 - protein, 22 aa, Human immunodeficiency virus 1
  source 1..22: note = HLAs: DRB1_1001 DPA10103-DPB10101 DPA10103-DPB10201 DPA10103-DPB10202 DPA10103-DPB10401 DPA10103-DPB112601 DPA10103-DPB11501 DPA10103-DPB11601 DPA10103-DPB11801 DPA10103-DPB11901 DPA10103-DPB12301 DPA10103-DPB13101 DPA10103-DPB13401 DPA10103-DPB13901 DPA10103-DPB14001 DPA10103-DPB14101 DPA10103-DPB14801 DPA10103-DPB15001 DPA10103-DPB15901 DPA10104-DPB10101 DPA10104-DPB11501 DPA10105-DPB10101 DPA10105-DPB10401 DPA10105-DPB11801 DPA10105-DPB15001 DPA10106-DPB10101 DPA10201-DPB10101 DPA10201-DPB10202 DPA10201-DPB110601 DPA10201-DPB11501 DPA10201-DPB11601 DPA10201-DPB11901 DPA10202-DPB10101 DPA10202-DPB10201 DPA10202-DPB10202 DPA10202-DPB10401 DPA10202-DPB110601 DPA10202-DPB11901 DPA10202-DPB13101 DPA10202-DPB16501 DPA10301-DPB10101 DPA10301-DPB10201 DPA10301-DPB10202 DPA10301-DPB10401 DPA10301-DPB10402 DPA10301-DPB110501 DPA10301-DPB110601 DPA10301-DPB11801 DPA10301-DPB12301 DPA10301-DPB13901 DPA10301-DPB14001 DPA10301-DPB14901 DPA10301-DPB15501 DPA10301-DPB16501 DPA10301-DPB17501; note = HLAs: DPA10301-DPB18001 DPA10401-DPB10101 DPA10401-DPB10201 DPA10401-DPB10202 DPA10401-DPB10402 DPA10401-DPB10501 DPA10401-DPB110501 DPA10401-DPB14901 DQA10101-DQB10501 DQA10102-DQB10501 DQA10102-DQB10502 DQA10102-DQB10503 DQA10103-DQB10501 DQA10104-DQB10501 DQA10105-DQB10501
HQKEPPFLWMGYELHPDKWTVQ

SEQ ID NO: 3751 - protein, 23 aa, Human immunodeficiency virus 1
  source 1..23: note = HLAs: DRB1_1001 DPA10103-DPB10101 DPA10103-DPB10201 DPA10103-DPB10202 DPA10103-DPB10401 DPA10103-DPB112601 DPA10103-DPB11501 DPA10103-DPB11601 DPA10103-DPB11801 DPA10103-DPB11901 DPA10103-DPB12301 DPA10103-DPB13101 DPA10103-DPB13401 DPA10103-DPB13901 DPA10103-DPB14001 DPA10103-DPB14101 DPA10103-DPB14801 DPA10103-DPB15001 DPA10103-DPB15901 DPA10104-DPB10101 DPA10104-DPB11501 DPA10105-DPB10101 DPA10105-DPB10401 DPA10105-DPB11801 DPA10105-DPB15001 DPA10106-DPB10101 DPA10201-DPB10101 DPA10201-DPB10202 DPA10201-DPB110601 DPA10201-DPB11501 DPA10201-DPB11601 DPA10201-DPB11901 DPA10202-DPB10101 DPA10202-DPB10201 DPA10202-DPB10202 DPA10202-DPB10401 DPA10202-DPB110601 DPA10202-DPB11901 DPA10202-DPB13101 DPA10202-DPB16501 DPA10301-DPB10101 DPA10301-DPB10201 DPA10301-DPB10202 DPA10301-DPB10401 DPA10301-DPB10402 DPA10301-DPB110501 DPA10301-DPB110601 DPA10301-DPB11801 DPA10301-DPB12301 DPA10301-DPB13901 DPA10301-DPB14001 DPA10301-DPB14901 DPA10301-DPB15501 DPA10301-DPB16501 DPA10301-DPB17501; note = HLAs: DPA10301-DPB18001 DPA10401-DPB10101 DPA10401-DPB10201 DPA10401-DPB10202 DPA10401-DPB10402 DPA10401-DPB10501 DPA10401-DPB110501 DPA10401-DPB14901 DQA10101-DQB10501 DQA10102-DQB10501 DQA10102-DQB10502 DQA10102-DQB10503 DQA10103-DQB10501 DQA10104-DQB10501 DQA10105-DQB10501
HQKEPPFLWMGYELHPDKWTVQP

SEQ ID NO: 3752 - protein, 24 aa, Human immunodeficiency virus 1
  source 1..24: note = HLAs: DRB1_0101 DRB1_0405 DRB1_1001 DPA10103-DPB10101 DPA10103-DPB10201 DPA10103-DPB10202 DPA10103-DPB10401 DPA10103-DPB112601 DPA10103-DPB11501 DPA10103-DPB11601 DPA10103-DPB11801 DPA10103-DPB11901 DPA10103-DPB12301 DPA10103-DPB13101 DPA10103-DPB13401 DPA10103-DPB13901 DPA10103-DPB14001 DPA10103-DPB14101 DPA10103-DPB14801 DPA10103-DPB15001 DPA10103-DPB15901 DPA10104-DPB10101 DPA10104-DPB11501 DPA10105-DPB10101 DPA10105-DPB10401 DPA10105-DPB11801 DPA10105-DPB15001 DPA10106-DPB10101 DPA10201-DPB10101 DPA10201-DPB10202 DPA10201-DPB110601 DPA10201-DPB11501 DPA10201-DPB11601 DPA10201-DPB11901 DPA10202-DPB10101 DPA10202-DPB10201 DPA10202-DPB10202 DPA10202-DPB10401 DPA10202-DPB110601 DPA10202-DPB11901 DPA10202-DPB13101 DPA10202-DPB16501 DPA10301-DPB10101 DPA10301-DPB10201 DPA10301-DPB10202 DPA10301-DPB10401 DPA10301-DPB10402 DPA10301-DPB110501 DPA10301-DPB110601 DPA10301-DPB11801 DPA10301-DPB12301 DPA10301-DPB13901 DPA10301-DPB14001 DPA10301-DPB14901 DPA10301-DPB15501 DPA10301-DPB16501; note = HLAs: DPA10301-DPB17501 DPA10301-DPB18001 DPA10401-DPB10101 DPA10401-DPB10201 DPA10401-DPB10202 DPA10401-DPB10402 DPA10401-DPB10501 DPA10401-DPB110501 DPA10401-DPB14901 DQA10101-DQB10501 DQA10101-DQB10503 DQA10102-DQB10501 DQA10102-DQB10502 DQA10102-DQB10503 DQA10103-DQB10501 DQA10104-DQB10501 DQA10104-DQB10503 DQA10105-DQB10501 DQA10107-DQB10503
HQKEPPFLWMGYELHPDKWTVQPI

SEQ ID NO: 3753 - protein, 25 aa, Human immunodeficiency virus 1
  source 1..25: note = HLAs: DRB1_0101 DRB1_0405 DRB1_1001 DPA10103-DPB10101 DPA10103-DPB10201 DPA10103-DPB10202 DPA10103-DPB10401 DPA10103-DPB112601 DPA10103-DPB11501 DPA10103-DPB11601 DPA10103-DPB11801 DPA10103-DPB11901 DPA10103-DPB12301 DPA10103-DPB13101 DPA10103-DPB13401 DPA10103-DPB13901 DPA10103-DPB14001 DPA10103-DPB14101 DPA10103-DPB14801 DPA10103-DPB15001 DPA10103-DPB15901 DPA10104-DPB10101 DPA10104-DPB11501 DPA10105-DPB10101 DPA10105-DPB10401 DPA10105-DPB11801 DPA10105-DPB15001 DPA10106-DPB10101 DPA10201-DPB10101 DPA10201-DPB10202 DPA10201-DPB110601 DPA10201-DPB11501 DPA10201-DPB11601 DPA10201-DPB11901 DPA10202-DPB10101 DPA10202-DPB10201 DPA10202-DPB10202 DPA10202-DPB10401 DPA10202-DPB110601 DPA10202-DPB11901 DPA10202-DPB13101 DPA10202-DPB16501 DPA10301-DPB10101 DPA10301-DPB10201 DPA10301-DPB10202 DPA10301-DPB10401 DPA10301-DPB10402 DPA10301-DPB110501 DPA10301-DPB110601 DPA10301-DPB11801 DPA10301-DPB12301 DPA10301-DPB13901 DPA10301-DPB14001 DPA10301-DPB14901 DPA10301-DPB15501 DPA10301-DPB16501; note = HLAs: DPA10301-DPB17501 DPA10301-DPB18001 DPA10401-DPB10101 DPA10401-DPB10201 DPA10401-DPB10202 DPA10401-DPB10402 DPA10401-DPB10501 DPA10401-DPB110501 DPA10401-DPB14901 DQA10101-DQB10501 DQA10101-DQB10503 DQA10102-DQB10501 DQA10102-DQB10502 DQA10102-DQB10503 DQA10103-DQB10501 DQA10104-DQB10501 DQA10104-DQB10503 DQA10105-DQB10501 DQA10107-DQB10503 DQA10505-DQB10402
HQKEPPFLWMGYELHPDKWTVQPIQ

SEQ ID NO: 3754 - protein, 13 aa, Human immunodeficiency virus 1
  source 1..13: note = HLAs: DQA10102-DQB10609 DQA10201-DQB10201 DQA10201-DQB10202 DQA10201-DQB10301 DQA10301-DQB10302 DQA10301-DQB10304 DQA10302-DQB10302 DQA10302-DQB10304 DQA10303-DQB10302 DQA10303-DQB10304 DQA10401-DQB10201 DQA10401-DQB10301 DQA10401-DQB10319 DQA10401-DQB10402 DQA10402-DQB10402 DQA10501-DQB10201 DQA10501-DQB10203 DQA10505-DQB10201 DQA10505-DQB10202 DQA10505-DQB10302 DQA10601-DQB10301
HVASGYIEAEVIP

SEQ ID NO: 3755 - protein, 14 aa, Human immunodeficiency virus 1
  source 1..14: note = HLAs: DRB1_0101 DRB1_0401 DRB1_0408 DRB1_0901 DRB1_1001 DPA10301-DPB10101 DQA10102-DQB10501 DQA10102-DQB10601 DQA10102-DQB10609 DQA10201-DQB10201 DQA10201-DQB10202 DQA10201-DQB10301 DQA10201-DQB10302 DQA10201-DQB10303 DQA10301-DQB10301 DQA10301-DQB10302 DQA10301-DQB10304 DQA10301-DQB10305 DQA10302-DQB10301 DQA10302-DQB10302 DQA10302-DQB10304 DQA10303-DQB10301 DQA10303-DQB10302 DQA10303-DQB10304 DQA10401-DQB10201 DQA10401-DQB10301 DQA10401-DQB10319 DQA10401-DQB10402 DQA10402-DQB10402 DQA10501-DQB10201 DQA10501-DQB10203 DQA10501-DQB10301 DQA10501-DQB10319 DQA10503-DQB10301 DQA10505-DQB10201 DQA10505-DQB10202 DQA10505-DQB10301 DQA10505-DQB10302 DQA10505-DQB10309 DQA10505-DQB10319 DQA10506-DQB10303 DQA10508-DQB10301 DQA10509-DQB10301 DQA10601-DQB10301
HVASGYIEAEVIPA

SEQ ID NO: 3756 - protein, 15 aa, Human immunodeficiency virus 1
  source 1..15: note = HLAs: DRB1_0101 DRB1_0401 DRB1_0405 DRB1_0408 DRB1_0701 DRB1_0813 DRB1_0901 DRB1_1001 DPA10103-DPB11501 DPA10104-DPB11501 DPA10301-DPB10101 DPA10401-DPB10101 DQA10102-DQB10501 DQA10102-DQB10502 DQA10102-DQB10503 DQA10102-DQB10601 DQA10102-DQB10604 DQA10102-DQB10609 DQA10102-DQB10611 DQA10103-DQB10601 DQA10103-DQB10609 DQA10201-DQB10201 DQA10201-DQB10202 DQA10201-DQB10301 DQA10201-DQB10302 DQA10201-DQB10303 DQA10301-DQB10301 DQA10301-DQB10302 DQA10301-DQB10303 DQA10301-DQB10304 DQA10301-DQB10305 DQA10302-DQB10301 DQA10302-DQB10302 DQA10302-DQB10303 DQA10302-DQB10304 DQA10303-DQB10301 DQA10303-DQB10302 DQA10303-DQB10303 DQA10303-DQB10304 DQA10401-DQB10201 DQA10401-DQB10301 DQA10401-DQB10319 DQA10401-DQB10402 DQA10402-DQB10402 DQA10501-DQB10201 DQA10501-DQB10203 DQA10501-DQB10301 DQA10501-DQB10319 DQA10503-DQB10301 DQA10505-DQB10201 DQA10505-DQB10202 DQA10505-DQB10301 DQA10505-DQB10302 DQA10505-DQB10309 DQA10505-DQB10319 DQA10505-DQB10402 DQA10506-DQB10303 DQA10508-DQB10301; note = HLAs: DQA10509-DQB10301 DQA10601-DQB10301
HVASGYIEAEVIPAE

SEQ ID NO: 3757 - protein, 16 aa, Human immunodeficiency virus 1
  source 1..16: note = HLAs: DRB1_0101 DRB1_0401 DRB1_0405 DRB1_0408 DRB1_0901 DRB1_1001 DPA10301-DPB10101 DPA10301-DPB16501 DPA10401-DPB10101 DQA10102-DQB10501 DQA10102-DQB10502 DQA10102-DQB10503 DQA10102-DQB10601 DQA10102-DQB10602 DQA10102-DQB10604 DQA10102-DQB10609 DQA10102-DQB10611 DQA10103-DQB10501 DQA10103-DQB10601 DQA10103-DQB10609 DQA10201-DQB10201 DQA10201-DQB10202 DQA10201-DQB10301 DQA10201-DQB10302 DQA10201-DQB10303 DQA10301-DQB10301 DQA10301-DQB10302 DQA10301-DQB10303 DQA10301-DQB10304 DQA10301-DQB10305 DQA10302-DQB10301 DQA10302-DQB10302 DQA10302-DQB10303 DQA10302-DQB10304 DQA10303-DQB10301 DQA10303-DQB10302 DQA10303-DQB10303 DQA10303-DQB10304 DQA10401-DQB10201 DQA10401-DQB10301 DQA10401-DQB10319 DQA10401-DQB10402 DQA10402-DQB10402 DQA10501-DQB10201 DQA10501-DQB10203 DQA10501-DQB10301 DQA10501-DQB10319 DQA10503-DQB10301 DQA10505-DQB10201 DQA10505-DQB10202 DQA10505-DQB10301 DQA10505-DQB10302 DQA10505-DQB10309 DQA10505-DQB10319 DQA10506-DQB10303 DQA10508-DQB10301 DQA10509-DQB10301; note = HLAs: DQA10601-DQB10301
HVASGYIEAEVIPAET

SEQ ID NO: 3758 - protein, 17 aa, Human immunodeficiency virus 1
  source 1..17: note = HLAs: DRB1_0101 DRB1_0401 DRB1_0405 DRB1_0408 DRB1_0901 DRB1_1001 DPA10301-DPB10101 DPA10401-DPB10101 DQA10102-DQB10501 DQA10102-DQB10503 DQA10102-DQB10601 DQA10102-DQB10604 DQA10102-DQB10609 DQA10102-DQB10611 DQA10103-DQB10601 DQA10103-DQB10609 DQA10201-DQB10201 DQA10201-DQB10202 DQA10201-DQB10301 DQA10201-DQB10302 DQA10201-DQB10303 DQA10301-DQB10301 DQA10301-DQB10302 DQA10301-DQB10303 DQA10301-DQB10304 DQA10302-DQB10301 DQA10302-DQB10302 DQA10302-DQB10303 DQA10302-DQB10304 DQA10303-DQB10301 DQA10303-DQB10302 DQA10303-DQB10303 DQA10303-DQB10304 DQA10401-DQB10201 DQA10401-DQB10301 DQA10401-DQB10319 DQA10401-DQB10402 DQA10402-DQB10402 DQA10501-DQB10201 DQA10501-DQB10203 DQA10501-DQB10301 DQA10501-DQB10319 DQA10503-DQB10301 DQA10505-DQB10201 DQA10505-DQB10202 DQA10505-DQB10301 DQA10505-DQB10302 DQA10505-DQB10309 DQA10505-DQB10319 DQA10506-DQB10303 DQA10508-DQB10301 DQA10509-DQB10301 DQA10601-DQB10301
HVASGYIEAEVIPAETG

SEQ ID NO: 3759 - protein, 18 aa, Human immunodeficiency virus 1
  source 1..18: note = HLAs: DRB1_0101 DRB1_0408 DRB1_1001 DPA10301-DPB10101 DQA10102-DQB10501 DQA10102-DQB10601 DQA10102-DQB10609 DQA10201-DQB10301 DQA10201-DQB10302 DQA10301-DQB10301 DQA10301-DQB10302 DQA10301-DQB10304 DQA10302-DQB10301 DQA10302-DQB10302 DQA10302-DQB10304 DQA10303-DQB10301 DQA10303-DQB10302 DQA10303-DQB10304 DQA10401-DQB10201 DQA10401-DQB10301 DQA10401-DQB10319 DQA10401-DQB10402 DQA10402-DQB10402 DQA10501-DQB10201 DQA10501-DQB10203 DQA10501-DQB10301 DQA10501-DQB10319 DQA10503-DQB10301 DQA10505-DQB10201 DQA10505-DQB10202 DQA10505-DQB10301 DQA10505-DQB10302 DQA10505-DQB10309 DQA10505-DQB10319 DQA10508-DQB10301 DQA10509-DQB10301 DQA10601-DQB10301
HVASGYIEAEVIPAETGQ

SEQ ID NO: 3760 - protein, 19 aa, Human immunodeficiency virus 1
  source 1..19: note = HLAs: DRB1_0101 DRB1_0401 DRB1_0408 DRB1_0901 DRB1_1001 DPA10301-DPB10101 DPA10401-DPB10101 DQA10102-DQB10501 DQA10102-DQB10502 DQA10102-DQB10503 DQA10102-DQB10601 DQA10102-DQB10609 DQA10102-DQB10611 DQA10103-DQB10601 DQA10103-DQB10609 DQA10201-DQB10201 DQA10201-DQB10202 DQA10201-DQB10301 DQA10201-DQB10302 DQA10201-DQB10303 DQA10301-DQB10301 DQA10301-DQB10302 DQA10301-DQB10304 DQA10302-DQB10301 DQA10302-DQB10302 DQA10302-DQB10304 DQA10303-DQB10301 DQA10303-DQB10302 DQA10303-DQB10304 DQA10401-DQB10201 DQA10401-DQB10301 DQA10401-DQB10319 DQA10401-DQB10402 DQA10402-DQB10402 DQA10501-DQB10201 DQA10501-DQB10203 DQA10501-DQB10301 DQA10501-DQB10319 DQA10503-DQB10301 DQA10505-DQB10201 DQA10505-DQB10202 DQA10505-DQB10301 DQA10505-DQB10302 DQA10505-DQB10309 DQA10505-DQB10319 DQA10506-DQB10303 DQA10508-DQB10301 DQA10509-DQB10301 DQA10601-DQB10301
HVASGYIEAEVIPAETGQE

SEQ ID NO: 3761 - protein, 20 aa, Human immunodeficiency virus 1
  source 1..20: note = HLAs: DRB1_0101 DRB1_0401 DRB1_0404 DRB1_0405 DRB1_0408 DRB1_0802 DRB1_0809 DRB1_0813 DRB1_0901 DRB1_1001 DPA10301-DPB10101 DPA10301-DPB10201 DPA10301-DPB110601 DPA10301-DPB16501 DPA10401-DPB10101 DPA10401-DPB11401 DQA10102-DQB10501 DQA10102-DQB10502 DQA10102-DQB10503 DQA10102-DQB10601 DQA10102-DQB10602 DQA10102-DQB10604 DQA10102-DQB10609 DQA10102-DQB10611 DQA10103-DQB10501 DQA10103-DQB10601 DQA10103-DQB10609 DQA10201-DQB10201 DQA10201-DQB10202 DQA10201-DQB10301 DQA10201-DQB10302 DQA10201-DQB10303 DQA10301-DQB10301 DQA10301-DQB10302 DQA10301-DQB10304 DQA10302-DQB10301 DQA10302-DQB10302 DQA10302-DQB10304 DQA10303-DQB10301 DQA10303-DQB10302 DQA10303-DQB10304 DQA10401-DQB10301 DQA10401-DQB10319 DQA10401-DQB10402 DQA10402-DQB10402 DQA10501-DQB10201 DQA10501-DQB10203 DQA10501-DQB10301 DQA10501-DQB10319 DQA10503-DQB10301 DQA10505-DQB10201 DQA10505-DQB10202 DQA10505-DQB10301 DQA10505-DQB10302 DQA10505-DQB10309 DQA10505-DQB10319 DQA10506-DQB10303 DQA10508-DQB10301 DQA10509-DQB10301; note = HLAs: DQA10601-DQB10301
HVASGYIEAEVIPAETGQET

SEQ ID NO: 3762 - protein, 21 aa, Human immunodeficiency virus 1
  source 1..21: note = HLAs: DRB1_0101 DRB1_0401 DRB1_0405 DRB1_0408 DRB1_0901 DRB1_1001 DPA10301-DPB10101 DPA10401-DPB10101 DQA10102-DQB10501 DQA10102-DQB10503 DQA10102-DQB10601 DQA10102-DQB10609 DQA10103-DQB10609 DQA10201-DQB10301 DQA10201-DQB10302 DQA10301-DQB10304 DQA10302-DQB10304 DQA10303-DQB10304 DQA10401-DQB10301 DQA10401-DQB10319 DQA10501-DQB10201 DQA10501-DQB10203 DQA10501-DQB10301 DQA10501-DQB10319 DQA10503-DQB10301 DQA10505-DQB10201 DQA10505-DQB10202 DQA10505-DQB10301 DQA10505-DQB10302 DQA10505-DQB10309 DQA10505-DQB10319 DQA10508-DQB10301 DQA10509-DQB10301 DQA10601-DQB10301
HVASGYIEAEVIPAETGQETA

SEQ ID NO: 3763 - protein, 22 aa, Human immunodeficiency virus 1
  source 1..22: note = HLAs: DRB1_0101 DRB1_0401 DRB1_0405 DRB1_0408 DRB1_0901 DRB1_1001 DPA10301-DPB10101 DPA10401-DPB10101 DQA10102-DQB10501 DQA10102-DQB10503 DQA10102-DQB10601 DQA10102-DQB10609 DQA10103-DQB10609 DQA10201-DQB10301 DQA10201-DQB10302 DQA10301-DQB10304 DQA10302-DQB10304 DQA10303-DQB10304 DQA10401-DQB10301 DQA10401-DQB10319 DQA10501-DQB10201 DQA10501-DQB10203 DQA10501-DQB10301 DQA10501-DQB10319 DQA10503-DQB10301 DQA10505-DQB10201 DQA10505-DQB10202 DQA10505-DQB10301 DQA10505-DQB10302 DQA10505-DQB10309 DQA10505-DQB10319 DQA10508-DQB10301 DQA10509-DQB10301 DQA10601-DQB10301
HVASGYIEAEVIPAETGQETAY

SEQ ID NO: 3764 - protein, 23 aa, Human immunodeficiency virus 1
  source 1..23: note = HLAs: DRB1_0101 DRB1_0401 DRB1_0405 DRB1_0408 DRB1_0901 DRB1_1001 DPA10301-DPB10101 DPA10401-DPB10101 DQA10102-DQB10501 DQA10102-DQB10503 DQA10102-DQB10601 DQA10102-DQB10609 DQA10103-DQB10609 DQA10201-DQB10301 DQA10201-DQB10302 DQA10301-DQB10304 DQA10302-DQB10304 DQA10303-DQB10304 DQA10401-DQB10301 DQA10401-DQB10319 DQA10501-DQB10201 DQA10501-DQB10203 DQA10501-DQB10301 DQA10501-DQB10319 DQA10503-DQB10301 DQA10505-DQB10201 DQA10505-DQB10202 DQA10505-DQB10301 DQA10505-DQB10302 DQA10505-DQB10309 DQA10505-DQB10319 DQA10508-DQB10301 DQA10509-DQB10301 DQA10601-DQB10301
HVASGYIEAEVIPAETGQETAYF

SEQ ID NO: 3765 - protein, 14 aa, Human immunodeficiency virus 1
  source 1..14: note = HLAs: DQA10102-DQB10501
IGCTLNFPISPIET

SEQ ID NO: 3766 - protein, 15 aa, Human immunodeficiency virus 1
  source 1..15: note = HLAs: DRB1_0101 DRB1_1001 DPA10301-DPB10101 DPA10301-DPB10201 DPA10301-DPB10202 DPA10401-DPB10101 DQA10102-DQB10501 DQA10103-DQB10501 DQA10103-DQB10609 DQA10505-DQB10402
IGCTLNFPISPIETV

SEQ ID NO: 3767 - protein, 16 aa, Human immunodeficiency virus 1
  source 1..16: note = HLAs: DPA10301-DPB10101 DPA10301-DPB10201 DPA10301-DPB10202 DPA10401-DPB10101 DQA10102-DQB10501 DQA10102-DQB10609 DQA10103-DQB10501
IGCTLNFPISPIETVP

SEQ ID NO: 3768 - protein, 17 aa, Human immunodeficiency virus 1
  source 1..17: note = HLAs: DRB1_0701 DRB1_0813 DRB1_0901 DRB1_1001 DPA10103-DPB11501 DPA10104-DPB11501 DPA10202-DPB10101 DPA10301-DPB10101 DPA10301-DPB10201 DPA10301-DPB10202 DPA10301-DPB10401 DPA10301-DPB11801 DPA10301-DPB12301 DPA10301-DPB13901 DPA10301-DPB14001 DPA10301-DPB16501 DPA10401-DPB10101 DQA10102-DQB10501 DQA10102-DQB10609 DQA10103-DQB10501 DQA10103-DQB10601 DQA10103-DQB10609
IGCTLNFPISPIETVPV

SEQ ID NO: 3769 - protein, 18 aa, Human immunodeficiency virus 1
  source 1..18: note = HLAs: DPA10301-DPB10101 DQA10102-DQB10501 DQA10102-DQB10609 DQA10103-DQB10501 DQA10103-DQB10609
IGCTLNFPISPIETVPVK

SEQ ID NO: 3770 - protein, 19 aa, Human immunodeficiency virus 1
  source 1..19: note = HLAs: DRB1_0101 DRB1_0102 DRB1_0401 DRB1_0404 DRB1_0405 DRB1_0408 DRB1_0410 DRB1_0701 DRB1_0813 DRB1_0901 DRB1_1001 DRB1_1114 DRB1_1302 DRB1_1404 DRB1_1406 DRB1_1501 DRB1_1502 DRB1_1602 DPA10103-DPB10101 DPA10103-DPB11501 DPA10104-DPB10101 DPA10104-DPB11501 DPA10105-DPB10101 DPA10202-DPB10101 DPA10301-DPB10101 DPA10301-DPB10201 DPA10301-DPB10202 DPA10301-DPB10401 DPA10301-DPB110601 DPA10301-DPB11801 DPA10301-DPB12301 DPA10301-DPB13901 DPA10301-DPB14001 DPA10301-DPB16501 DPA10401-DPB10101 DQA10102-DQB10501 DQA10102-DQB10503 DQA10102-DQB10601 DQA10102-DQB10609 DQA10103-DQB10501 DQA10103-DQB10601 DQA10103-DQB10604 DQA10103-DQB10609 DQA10201-DQB10303 DQA10505-DQB10402
IGCTLNFPISPIETVPVKL

SEQ ID NO: 3771 - protein, 20 aa, Human immunodeficiency virus 1
  source 1..20: note = HLAs: DRB1_0101 DRB1_0102 DRB1_0401 DRB1_0404 DRB1_0405 DRB1_0408 DRB1_0410 DRB1_0701 DRB1_0801 DRB1_0802 DRB1_0803 DRB1_0804 DRB1_0806 DRB1_0809 DRB1_0813 DRB1_0901 DRB1_1001 DRB1_1102 DRB1_1114 DRB1_1201 DRB1_1301 DRB1_1302 DRB1_1304 DRB1_1312 DRB1_1401 DRB1_1402 DRB1_1403 DRB1_1404 DRB1_1406 DRB1_1454 DRB1_1501 DRB1_1502 DRB1_1503 DRB1_1601 DRB1_1602 DPA10103-DPB10101 DPA10103-DPB11501 DPA10103-DPB13101 DPA10103-DPB15001 DPA10104-DPB10101 DPA10104-DPB11501 DPA10105-DPB10101 DPA10105-DPB15001 DPA10106-DPB10101 DPA10201-DPB10101 DPA10201-DPB11501 DPA10202-DPB10101 DPA10202-DPB10201 DPA10202-DPB10202 DPA10202-DPB10501 DPA10202-DPB110601 DPA10202-DPB11801 DPA10202-DPB11901 DPA10202-DPB13101 DPA10202-DPB13801 DPA10202-DPB15501 DPA10202-DPB16501 DPA10301-DPB10101 DPA10301-DPB10201 DPA10301-DPB10202 DPA10301-DPB10401 DPA10301-DPB10402 DPA10301-DPB110501 DPA10301-DPB110601 DPA10301-DPB11801 DPA10301-DPB12301 DPA10301-DPB13901 DPA10301-DPB14001 DPA10301-DPB14901 DPA10301-DPB15501; note = HLAs: DPA10301-DPB16501 DPA10301-DPB17501 DPA10301-DPB18001 DPA10401-DPB10101 DPA10401-DPB10201 DPA10401-DPB10202 DPA10401-DPB10501 DPA10401-DPB11401 DQA10102-DQB10501 DQA10102-DQB10503 DQA10102-DQB10601 DQA10102-DQB10609 DQA10103-DQB10501 DQA10103-DQB10601 DQA10103-DQB10602 DQA10103-DQB10604 DQA10103-DQB10608 DQA10103-DQB10609 DQA10201-DQB10301 DQA10201-DQB10303 DQA10505-DQB10402 DQA10506-DQB10303
IGCTLNFPISPIETVPVKLK

SEQ ID NO: 3772 - protein, 21 aa, Human immunodeficiency virus 1
  source 1..21: note = HLAs: DRB1_0101 DRB1_0102 DRB1_0401 DRB1_0404 DRB1_0405 DRB1_0408 DRB1_0410 DRB1_0701 DRB1_0802 DRB1_0803 DRB1_0804 DRB1_0806 DRB1_0809 DRB1_0813 DRB1_0901 DRB1_1001 DRB1_1102 DRB1_1114 DRB1_1201 DRB1_1301 DRB1_1302 DRB1_1304 DRB1_1401 DRB1_1402 DRB1_1404 DRB1_1406 DRB1_1454 DRB1_1501 DRB1_1502 DRB1_1602 DPA10103-DPB10101 DPA10103-DPB11501 DPA10104-DPB10101 DPA10104-DPB11501 DPA10105-DPB10101 DPA10202-DPB10101 DPA10202-DPB13101 DPA10301-DPB10101 DPA10301-DPB10201 DPA10301-DPB10202 DPA10301-DPB10401 DPA10301-DPB110601 DPA10301-DPB11801 DPA10301-DPB12301 DPA10301-DPB13901 DPA10301-DPB14001 DPA10301-DPB16501 DPA10401-DPB10101 DQA10102-DQB10501 DQA10102-DQB10601 DQA10102-DQB10609 DQA10103-DQB10501 DQA10103-DQB10601 DQA10103-DQB10609 DQA10505-DQB10402
IGCTLNFPISPIETVPVKLKP

SEQ ID NO: 3773 - protein, 22 aa, Human immunodeficiency virus 1
  source 1..22: note = HLAs: DRB1_0101 DRB1_0102 DRB1_0401 DRB1_0404 DRB1_0405 DRB1_0408 DRB1_0410 DRB1_0701 DRB1_0801 DRB1_0802 DRB1_0803 DRB1_0804 DRB1_0806 DRB1_0809 DRB1_0813 DRB1_0901 DRB1_1001 DRB1_1102 DRB1_1103 DRB1_1114 DRB1_1201 DRB1_1301 DRB1_1302 DRB1_1304 DRB1_1401 DRB1_1402 DRB1_1404 DRB1_1406 DRB1_1454 DRB1_1501 DRB1_1502 DRB1_1602 DPA10103-DPB10101 DPA10103-DPB11501 DPA10104-DPB10101 DPA10104-DPB11501 DPA10105-DPB10101 DPA10202-DPB10101 DPA10202-DPB13101 DPA10301-DPB10101 DPA10301-DPB10201 DPA10301-DPB10202 DPA10301-DPB10401 DPA10301-DPB110601 DPA10301-DPB11801 DPA10301-DPB12301 DPA10301-DPB13901 DPA10301-DPB14001 DPA10301-DPB16501 DPA10401-DPB10101 DQA10102-DQB10501 DQA10102-DQB10601 DQA10102-DQB10609 DQA10103-DQB10501 DQA10103-DQB10601 DQA10103-DQB10609 DQA10505-DQB10402
IGCTLNFPISPIETVPVKLKPG

SEQ ID NO: 3774 - protein, 23 aa, Human immunodeficiency virus 1
  source 1..23: note = HLAs: DRB1_0101 DRB1_0102 DRB1_0401 DRB1_0404 DRB1_0405 DRB1_0408 DRB1_0410 DRB1_0701 DRB1_0801 DRB1_0802 DRB1_0803 DRB1_0804 DRB1_0806 DRB1_0809 DRB1_0813 DRB1_0901 DRB1_1001 DRB1_1102 DRB1_1103 DRB1_1104 DRB1_1114 DRB1_1201 DRB1_1301 DRB1_1302 DRB1_1304 DRB1_1401 DRB1_1402 DRB1_1404 DRB1_1406 DRB1_1454 DRB1_1501 DRB1_1502 DRB1_1602 DPA10103-DPB10101 DPA10103-DPB11501 DPA10104-DPB10101 DPA10104-DPB11501 DPA10105-DPB10101 DPA10202-DPB10101 DPA10202-DPB13101 DPA10301-DPB10101 DPA10301-DPB10201 DPA10301-DPB10202 DPA10301-DPB10401 DPA10301-DPB110601 DPA10301-DPB11801 DPA10301-DPB12301 DPA10301-DPB13901 DPA10301-DPB14001 DPA10301-DPB16501 DPA10401-DPB10101 DQA10102-DQB10501 DQA10102-DQB10503 DQA10102-DQB10601 DQA10102-DQB10609 DQA10103-DQB10501 DQA10103-DQB10601 DQA10103-DQB10609 DQA10505-DQB10402
IGCTLNFPISPIETVPVKLKPGM

SEQ ID NO: 3775 - protein, 24 aa, Human immunodeficiency virus 1
  source 1..24: note = HLAs: DRB1_0101 DRB1_0102 DRB1_0401 DRB1_0404 DRB1_0405 DRB1_0408 DRB1_0410 DRB1_0701 DRB1_0801 DRB1_0802 DRB1_0803 DRB1_0804 DRB1_0806 DRB1_0809 DRB1_0813 DRB1_0901 DRB1_1001 DRB1_1102 DRB1_1103 DRB1_1104 DRB1_1114 DRB1_1201 DRB1_1301 DRB1_1302 DRB1_1304 DRB1_1401 DRB1_1402 DRB1_1404 DRB1_1406 DRB1_1454 DRB1_1501 DRB1_1502 DRB1_1503 DRB1_1602 DPA10103-DPB10101 DPA10103-DPB11501 DPA10104-DPB10101 DPA10104-DPB11501 DPA10105-DPB10101 DPA10202-DPB10101 DPA10202-DPB110601 DPA10202-DPB11901 DPA10202-DPB13101 DPA10301-DPB10101 DPA10301-DPB10201 DPA10301-DPB10202 DPA10301-DPB10401 DPA10301-DPB110601 DPA10301-DPB11801 DPA10301-DPB12301 DPA10301-DPB13901 DPA10301-DPB14001 DPA10301-DPB16501 DPA10401-DPB10101 DPA10401-DPB10202 DQA10102-DQB10501 DQA10102-DQB10503 DQA10102-DQB10601 DQA10102-DQB10609 DQA10103-DQB10501 DQA10103-DQB10601 DQA10103-DQB10609 DQA10505-DQB10402
IGCTLNFPISPIETVPVKLKPGMD

SEQ ID NO: 3776 - protein, 25 aa, Human immunodeficiency virus 1
  source 1..25: note = HLAs: DRB1_0101 DRB1_0102 DRB1_0401 DRB1_0404 DRB1_0405 DRB1_0408 DRB1_0410 DRB1_0701 DRB1_0801 DRB1_0802 DRB1_0803 DRB1_0804 DRB1_0806 DRB1_0809 DRB1_0813 DRB1_0901 DRB1_1001 DRB1_1102 DRB1_1103 DRB1_1104 DRB1_1114 DRB1_1201 DRB1_1301 DRB1_1302 DRB1_1304 DRB1_1401 DRB1_1402 DRB1_1404 DRB1_1406 DRB1_1454 DRB1_1501 DRB1_1502 DRB1_1503 DRB1_1601 DRB1_1602 DPA10103-DPB10101 DPA10103-DPB11501 DPA10104-DPB10101 DPA10104-DPB11501 DPA10105-DPB10101 DPA10202-DPB10101 DPA10202-DPB110601 DPA10202-DPB11901 DPA10202-DPB13101 DPA10301-DPB10101 DPA10301-DPB10201 DPA10301-DPB10202 DPA10301-DPB10401 DPA10301-DPB110601 DPA10301-DPB11801 DPA10301-DPB12301 DPA10301-DPB13901 DPA10301-DPB14001 DPA10301-DPB16501 DPA10401-DPB10101 DPA10401-DPB10201 DPA10401-DPB10202 DQA10102-DQB10501 DQA10102-DQB10503 DQA10102-DQB10601 DQA10102-DQB10609 DQA10103-DQB10501 DQA10103-DQB10601 DQA10103-DQB10609 DQA10505-DQB10402
IGCTLNFPISPIETVPVKLKPGMDG

SEQ ID NO: 3777 - protein, 14 aa, Human immunodeficiency virus 1
  source 1..14: note = HLAs: DRB1_0806 DRB1_1103 DRB1_1104 DRB1_1304
IGGIGGFIKVRQYD

SEQ ID NO: 3778 - protein, 15 aa, Human immunodeficiency virus 1
  source 1..15: note = HLAs: DRB1_0801 DRB1_0804 DRB1_0806 DRB1_1101 DRB1_1102 DRB1_1103 DRB1_1104 DRB1_1301 DRB1_1304 DRB1_1305 DRB1_1406 DRB1_1501
IGGIGGFIKVRQYDQ

SEQ ID NO: 3779 - protein, 15 aa, Human immunodeficiency virus 1
  source 1..15: note = HLAs: DRB1_0101
IGGNEQVDKLVSSGI

SEQ ID NO: 3780 - protein, 17 aa, Human immunodeficiency virus 1
  source 1..17: note = HLAs: DRB1_0101 DRB1_0102
IGGNEQVDKLVSSGIRK

SEQ ID NO: 3781 - protein, 18 aa, Human immunodeficiency virus 1
  source 1..18: note = HLAs: DPA10301-DPB10201 DPA10301-DPB10202 DQA10103-DQB10601
IGGNEQVDKLVSSGIRKV

SEQ ID NO: 3782 - protein, 19 aa, Human immunodeficiency virus 1
  source 1..19: note = HLAs: DRB1_0101 DRB1_0102 DRB1_0701 DRB1_0806 DRB1_0901 DRB1_1001 DRB1_1102 DRB1_1103 DRB1_1104 DRB1_1114 DRB1_1301 DRB1_1302 DRB1_1304 DRB1_1401 DRB1_1406 DRB1_1454 DRB1_1501 DRB1_1602 DPA10103-DPB10201 DPA10103-DPB10202 DPA10103-DPB11501 DPA10103-DPB13401 DPA10103-DPB14801 DPA10103-DPB15001 DPA10104-DPB11501 DPA10105-DPB15001 DPA10202-DPB10101 DPA10202-DPB10201 DPA10202-DPB10202 DPA10202-DPB110601 DPA10202-DPB11801 DPA10202-DPB11901 DPA10202-DPB13101 DPA10202-DPB16501 DPA10301-DPB10101 DPA10301-DPB10201 DPA10301-DPB10202 DPA10301-DPB10401 DPA10301-DPB10402 DPA10301-DPB110501 DPA10301-DPB110601 DPA10301-DPB11801 DPA10301-DPB12301 DPA10301-DPB13901 DPA10301-DPB14001 DPA10301-DPB14901 DPA10301-DPB16501 DPA10301-DPB17501 DPA10301-DPB18001 DPA10401-DPB10101 DPA10401-DPB10201 DPA10401-DPB10202 DQA10102-DQB10501 DQA10102-DQB10601 DQA10102-DQB10609 DQA10103-DQB10501 DQA10103-DQB10601 DQA10103-DQB10602 DQA10103-DQB10609 DQA10201-DQB10301 DQA10505-DQB10402
IGGNEQVDKLVSSGIRKVL

SEQ ID NO: 3783 - protein, 20 aa, Human immunodeficiency virus 1
  source 1..20: note = HLAs: DRB1_0101 DRB1_0102 DRB1_0404 DRB1_0410 DRB1_0701 DRB1_0801 DRB1_0802 DRB1_0803 DRB1_0804 DRB1_0806 DRB1_0809 DRB1_0813 DRB1_0901 DRB1_1001 DRB1_1101 DRB1_1102 DRB1_1103 DRB1_1104 DRB1_1114 DRB1_1201 DRB1_1301 DRB1_1302 DRB1_1303 DRB1_1304 DRB1_1305 DRB1_1312 DRB1_1401 DRB1_1402 DRB1_1403 DRB1_1404 DRB1_1405 DRB1_1406 DRB1_1454 DRB1_1501 DRB1_1502 DRB1_1503 DRB1_1601 DRB1_1602 DPA10103-DPB10101 DPA10103-DPB10201 DPA10103-DPB10202 DPA10103-DPB10401 DPA10103-DPB10501 DPA10103-DPB112601 DPA10103-DPB11501 DPA10103-DPB11601 DPA10103-DPB11801 DPA10103-DPB11901 DPA10103-DPB12301 DPA10103-DPB13101 DPA10103-DPB13401 DPA10103-DPB13901 DPA10103-DPB14001 DPA10103-DPB14101 DPA10103-DPB14801 DPA10103-DPB15001 DPA10103-DPB15901 DPA10104-DPB10101 DPA10104-DPB11501 DPA10105-DPB10101 DPA10105-DPB10401 DPA10105-DPB11801 DPA10105-DPB15001 DPA10106-DPB10101 DPA10201-DPB10101 DPA10201-DPB10201 DPA10201-DPB110601 DPA10201-DPB11501 DPA10201-DPB11601 DPA10201-DPB11901 DPA10202-DPB10101 DPA10202-DPB10201; note = HLAs: DPA10202-DPB10202 DPA10202-DPB10401 DPA10202-DPB10501 DPA10202-DPB10901 DPA10202-DPB110601 DPA10202-DPB11301 DPA10202-DPB11401 DPA10202-DPB11801 DPA10202-DPB11901 DPA10202-DPB12101 DPA10202-DPB13001 DPA10202-DPB13101 DPA10202-DPB13801 DPA10202-DPB15501 DPA10202-DPB16501 DPA10301-DPB10101 DPA10301-DPB10201 DPA10301-DPB10202 DPA10301-DPB10401 DPA10301-DPB10402 DPA10301-DPB110501 DPA10301-DPB110601 DPA10301-DPB11301 DPA10301-DPB11701 DPA10301-DPB11801 DPA10301-DPB12301 DPA10301-DPB13901 DPA10301-DPB14001 DPA10301-DPB14901 DPA10301-DPB15501 DPA10301-DPB16501 DPA10301-DPB17501 DPA10301-DPB18001 DPA10401-DPB10101 DPA10401-DPB10201 DPA10401-DPB10202 DPA10401-DPB10301 DPA10401-DPB10402 DPA10401-DPB10501 DPA10401-DPB110501 DPA10401-DPB11301 DPA10401-DPB113301 DPA10401-DPB11401 DPA10401-DPB14901 DQA10102-DQB10501 DQA10102-DQB10503 DQA10102-DQB10601 DQA10102-DQB10602 DQA10102-DQB10609 DQA10102-DQB10611 DQA10103-DQB10501 DQA10103-DQB10601 DQA10103-DQB10602 DQA10103-DQB10608; note = HLAs: DQA10103-DQB10609 DQA10201-DQB10301 DQA10201-DQB10303 DQA10505-DQB10402
IGGNEQVDKLVSSGIRKVLF

SEQ ID NO: 3784 - protein, 21 aa, Human immunodeficiency virus 1
  source 1..21: note = HLAs: DRB1_0101 DRB1_0102 DRB1_0404 DRB1_0410 DRB1_0701 DRB1_0801 DRB1_0804 DRB1_0806 DRB1_0813 DRB1_0901 DRB1_1001 DRB1_1101 DRB1_1102 DRB1_1103 DRB1_1104 DRB1_1114 DRB1_1201 DRB1_1301 DRB1_1302 DRB1_1303 DRB1_1304 DRB1_1305 DRB1_1312 DRB1_1401 DRB1_1402 DRB1_1404 DRB1_1405 DRB1_1406 DRB1_1454 DRB1_1501 DRB1_1502 DRB1_1602 DPA10103-DPB10101 DPA10103-DPB10201 DPA10103-DPB10202 DPA10103-DPB11501 DPA10103-DPB11601 DPA10103-DPB11801 DPA10103-DPB11901 DPA10103-DPB13101 DPA10103-DPB13401 DPA10103-DPB14001 DPA10103-DPB14801 DPA10103-DPB15001 DPA10104-DPB10101 DPA10104-DPB11501 DPA10105-DPB10101 DPA10105-DPB11801 DPA10105-DPB15001 DPA10106-DPB10101 DPA10201-DPB10101 DPA10201-DPB110601 DPA10201-DPB11501 DPA10201-DPB11901 DPA10202-DPB10101 DPA10202-DPB10201 DPA10202-DPB10202 DPA10202-DPB10501 DPA10202-DPB110601 DPA10202-DPB11801 DPA10202-DPB11901 DPA10202-DPB13101 DPA10202-DPB13801 DPA10202-DPB16501 DPA10301-DPB10101 DPA10301-DPB10201 DPA10301-DPB10202 DPA10301-DPB10401 DPA10301-DPB10402; note = HLAs: DPA10301-DPB110501 DPA10301-DPB110601 DPA10301-DPB11801 DPA10301-DPB12301 DPA10301-DPB13901 DPA10301-DPB14001 DPA10301-DPB14901 DPA10301-DPB15501 DPA10301-DPB16501 DPA10301-DPB17501 DPA10301-DPB18001 DPA10401-DPB10101 DPA10401-DPB10201 DPA10401-DPB10202 DPA10401-DPB10402 DPA10401-DPB10501 DPA10401-DPB110501 DPA10401-DPB14901 DQA10102-DQB10501 DQA10102-DQB10601 DQA10102-DQB10602 DQA10102-DQB10609 DQA10103-DQB10501 DQA10103-DQB10601 DQA10103-DQB10602 DQA10103-DQB10609 DQA10201-DQB10301 DQA10505-DQB10402
IGGNEQVDKLVSSGIRKVLFL

SEQ ID NO: 3785 - protein, 22 aa, Human immunodeficiency virus 1
  source 1..22: note = HLAs: DRB1_0101 DRB1_0102 DRB1_0404 DRB1_0410 DRB1_0701 DRB1_0801 DRB1_0804 DRB1_0806 DRB1_0813 DRB1_0901 DRB1_1001 DRB1_1101 DRB1_1102 DRB1_1103 DRB1_1104 DRB1_1114 DRB1_1201 DRB1_1301 DRB1_1302 DRB1_1303 DRB1_1304 DRB1_1305 DRB1_1312 DRB1_1401 DRB1_1402 DRB1_1404 DRB1_1405 DRB1_1406 DRB1_1454 DRB1_1501 DRB1_1502 DRB1_1503 DRB1_1601 DRB1_1602 DPA10103-DPB10101 DPA10103-DPB10201 DPA10103-DPB10202 DPA10103-DPB11501 DPA10103-DPB11601 DPA10103-DPB11801 DPA10103-DPB11901 DPA10103-DPB13101 DPA10103-DPB13401 DPA10103-DPB14001 DPA10103-DPB14101 DPA10103-DPB14801 DPA10103-DPB15001 DPA10104-DPB10101 DPA10104-DPB11501 DPA10105-DPB10101 DPA10105-DPB11801 DPA10105-DPB15001 DPA10106-DPB10101 DPA10201-DPB10101 DPA10201-DPB110601 DPA10201-DPB11501 DPA10201-DPB11901 DPA10202-DPB10101 DPA10202-DPB10201 DPA10202-DPB10202 DPA10202-DPB10501 DPA10202-DPB110601 DPA10202-DPB11801 DPA10202-DPB11901 DPA10202-DPB13101 DPA10202-DPB13801 DPA10202-DPB16501 DPA10301-DPB10101 DPA10301-DPB10201 DPA10301-DPB10202; note = HLAs: DPA10301-DPB10401 DPA10301-DPB10402 DPA10301-DPB110501 DPA10301-DPB110601 DPA10301-DPB11801 DPA10301-DPB12301 DPA10301-DPB13901 DPA10301-DPB14001 DPA10301-DPB14901 DPA10301-DPB15501 DPA10301-DPB16501 DPA10301-DPB17501 DPA10301-DPB18001 DPA10401-DPB10101 DPA10401-DPB10201 DPA10401-DPB10202 DPA10401-DPB10402 DPA10401-DPB10501 DPA10401-DPB110501 DPA10401-DPB14901 DQA10102-DQB10501 DQA10102-DQB10601 DQA10102-DQB10602 DQA10102-DQB10609 DQA10103-DQB10501 DQA10103-DQB10601 DQA10103-DQB10602 DQA10103-DQB10609 DQA10201-DQB10301 DQA10505-DQB10402
IGGNEQVDKLVSSGIRKVLFLD

SEQ ID NO: 3786 - protein, 23 aa, Human immunodeficiency virus 1
  source 1..23: note = HLAs: DRB1_0101 DRB1_0102 DRB1_0404 DRB1_0410 DRB1_0701 DRB1_0801 DRB1_0804 DRB1_0806 DRB1_0813 DRB1_0901 DRB1_1001 DRB1_1101 DRB1_1102 DRB1_1103 DRB1_1104 DRB1_1114 DRB1_1201 DRB1_1301 DRB1_1302 DRB1_1303 DRB1_1304 DRB1_1305 DRB1_1312 DRB1_1401 DRB1_1402 DRB1_1404 DRB1_1405 DRB1_1406 DRB1_1454 DRB1_1501 DRB1_1502 DRB1_1503 DRB1_1601 DRB1_1602 DPA10103-DPB10101 DPA10103-DPB10201 DPA10103-DPB10202 DPA10103-DPB10501 DPA10103-DPB11501 DPA10103-DPB11601 DPA10103-DPB11801 DPA10103-DPB11901 DPA10103-DPB13101 DPA10103-DPB13401 DPA10103-DPB14001 DPA10103-DPB14101 DPA10103-DPB14801 DPA10103-DPB15001 DPA10104-DPB10101 DPA10104-DPB11501 DPA10105-DPB10101 DPA10105-DPB11801 DPA10105-DPB15001 DPA10106-DPB10101 DPA10201-DPB10101 DPA10201-DPB110601 DPA10201-DPB11501 DPA10201-DPB11601 DPA10201-DPB11901 DPA10202-DPB10101 DPA10202-DPB10201 DPA10202-DPB10202 DPA10202-DPB10501 DPA10202-DPB110601 DPA10202-DPB11801 DPA10202-DPB11901 DPA10202-DPB13101 DPA10202-DPB13801 DPA10202-DPB15501 DPA10202-DPB16501; note = HLAs: DPA10301-DPB10101 DPA10301-DPB10201 DPA10301-DPB10202 DPA10301-DPB10401 DPA10301-DPB10402 DPA10301-DPB110501 DPA10301-DPB110601 DPA10301-DPB11801 DPA10301-DPB12301 DPA10301-DPB13901 DPA10301-DPB14001 DPA10301-DPB14901 DPA10301-DPB15501 DPA10301-DPB16501 DPA10301-DPB17501 DPA10301-DPB18001 DPA10401-DPB10101 DPA10401-DPB10201 DPA10401-DPB10202 DPA10401-DPB10402 DPA10401-DPB10501 DPA10401-DPB110501 DPA10401-DPB14901 DQA10102-DQB10501 DQA10102-DQB10601 DQA10102-DQB10602 DQA10102-DQB10609 DQA10103-DQB10501 DQA10103-DQB10601 DQA10103-DQB10602 DQA10103-DQB10609 DQA10201-DQB10301 DQA10505-DQB10402
IGGNEQVDKLVSSGIRKVLFLDG

SEQ ID NO: 3787 - protein, 24 aa, Human immunodeficiency virus 1
  source 1..24: note = HLAs: DRB1_0101 DRB1_0102 DRB1_0404 DRB1_0410 DRB1_0701 DRB1_0801 DRB1_0804 DRB1_0806 DRB1_0813 DRB1_0901 DRB1_1001 DRB1_1101 DRB1_1102 DRB1_1103 DRB1_1104 DRB1_1114 DRB1_1201 DRB1_1301 DRB1_1302 DRB1_1303 DRB1_1304 DRB1_1305 DRB1_1312 DRB1_1401 DRB1_1402 DRB1_1404 DRB1_1405 DRB1_1406 DRB1_1454 DRB1_1501 DRB1_1502 DRB1_1503 DRB1_1601 DRB1_1602 DPA10103-DPB10101 DPA10103-DPB10201 DPA10103-DPB10202 DPA10103-DPB10401 DPA10103-DPB10501 DPA10103-DPB112601 DPA10103-DPB11501 DPA10103-DPB11601 DPA10103-DPB11801 DPA10103-DPB11901 DPA10103-DPB12301 DPA10103-DPB13101 DPA10103-DPB13401 DPA10103-DPB13901 DPA10103-DPB14001 DPA10103-DPB14101 DPA10103-DPB14801 DPA10103-DPB15001 DPA10104-DPB10101 DPA10104-DPB11501 DPA10105-DPB10101 DPA10105-DPB10401 DPA10105-DPB11801 DPA10105-DPB15001 DPA10106-DPB10101 DPA10201-DPB10101 DPA10201-DPB110601 DPA10201-DPB11501 DPA10201-DPB11601 DPA10201-DPB11901 DPA10202-DPB10101 DPA10202-DPB10201 DPA10202-DPB10202 DPA10202-DPB10501 DPA10202-DPB110601 DPA10202-DPB11801; note = HLAs: DPA10202-DPB11901 DPA10202-DPB13101 DPA10202-DPB13801 DPA10202-DPB15501 DPA10202-DPB16501 DPA10301-DPB10101 DPA10301-DPB10201 DPA10301-DPB10202 DPA10301-DPB10401 DPA10301-DPB10402 DPA10301-DPB110501 DPA10301-DPB110601 DPA10301-DPB11801 DPA10301-DPB12301 DPA10301-DPB13901 DPA10301-DPB14001 DPA10301-DPB14901 DPA10301-DPB15501 DPA10301-DPB16501 DPA10301-DPB17501 DPA10301-DPB18001 DPA10401-DPB10101 DPA10401-DPB10201 DPA10401-DPB10202 DPA10401-DPB10402 DPA10401-DPB10501 DPA10401-DPB110501 DPA10401-DPB14901 DQA10102-DQB10501 DQA10102-DQB10601 DQA10102-DQB10602 DQA10102-DQB10609 DQA10103-DQB10501 DQA10103-DQB10601 DQA10103-DQB10602 DQA10103-DQB10608 DQA10103-DQB10609 DQA10201-DQB10301 DQA10505-DQB10402
IGGNEQVDKLVSSGIRKVLFLDGI

SEQ ID NO: 3788 - protein, 15 aa, Human immunodeficiency virus 1
  source 1..15: note = HLAs: DRB1_1303 DRB1_1312 DQA10102-DQB10609
IGGYSAGERIIDIIA

SEQ ID NO: 3789 - protein, 20 aa, Human immunodeficiency virus 1
  source 1..20: note = HLAs: DRB1_0804 DRB1_0806 DRB1_1101 DRB1_1103 DRB1_1104 DRB1_1304 DRB1_1305 DPA10401-DPB10101 DQA10103-DQB10601
IGPENPYNTPVFAIKKKDST

SEQ ID NO: 3790 - protein, 21 aa, Human immunodeficiency virus 1
  source 1..21: note = HLAs: DRB1_0804 DRB1_0806 DRB1_1101 DRB1_1103 DRB1_1104 DRB1_1304 DRB1_1305
IGPENPYNTPVFAIKKKDSTK

SEQ ID NO: 3791 - protein, 22 aa, Human immunodeficiency virus 1
  source 1..22: note = HLAs: DRB1_0801 DRB1_0804 DRB1_0806 DRB1_1101 DRB1_1102 DRB1_1103 DRB1_1104 DRB1_1301 DRB1_1304 DRB1_1305 DRB1_1406
IGPENPYNTPVFAIKKKDSTKW

SEQ ID NO: 3792 - protein, 23 aa, Human immunodeficiency virus 1
  source 1..23: note = HLAs: DRB1_0801 DRB1_0804 DRB1_0806 DRB1_1101 DRB1_1102 DRB1_1103 DRB1_1104 DRB1_1301 DRB1_1304 DRB1_1305 DRB1_1406
IGPENPYNTPVFAIKKKDSTKWR

SEQ ID NO: 3793 - protein, 24 aa, Human immunodeficiency virus 1
  source 1..24: note = HLAs: DRB1_0801 DRB1_0804 DRB1_0806 DRB1_1101 DRB1_1102 DRB1_1103 DRB1_1104 DRB1_1301 DRB1_1304 DRB1_1305 DRB1_1406
IGPENPYNTPVFAIKKKDSTKWRK

SEQ ID NO: 3794 - protein, 25 aa, Human immunodeficiency virus 1
  source 1..25: note = HLAs: DRB1_0801 DRB1_0804 DRB1_0806 DRB1_1101 DRB1_1102 DRB1_1103 DRB1_1104 DRB1_1301 DRB1_1304 DRB1_1305 DRB1_1406 DPA10103-DPB15001 DPA10105-DPB15001 DPA10401-DPB10101
IGPENPYNTPVFAIKKKDSTKWRKL

SEQ ID NO: 3795 - protein, 19 aa, Human immunodeficiency virus 1
  source 1..19: note = HLAs: DPA10301-DPB10101 DPA10401-DPB10101 DQA10102-DQB10501
IGQVRDQAEHLKTAVQMAV

SEQ ID NO: 3796 - protein, 20 aa, Human immunodeficiency virus 1
  source 1..20: note = HLAs: DRB1_0101 DRB1_1001 DPA10103-DPB11501 DPA10103-DPB15001 DPA10104-DPB11501 DPA10105-DPB15001 DPA10202-DPB10101 DPA10301-DPB10101 DPA10301-DPB10201 DPA10301-DPB10202 DPA10301-DPB10401 DPA10301-DPB110601 DPA10301-DPB11801 DPA10301-DPB12301 DPA10301-DPB13901 DPA10301-DPB14001 DPA10301-DPB16501 DPA10401-DPB10101 DPA10401-DPB10501 DPA10401-DPB11401 DQA10102-DQB10501 DQA10102-DQB10601 DQA10102-DQB10602 DQA10102-DQB10609 DQA10102-DQB10611 DQA10103-DQB10501 DQA10103-DQB10601 DQA10103-DQB10602 DQA10103-DQB10609
IGQVRDQAEHLKTAVQMAVF

SEQ ID NO: 3797 - protein, 21 aa, Human immunodeficiency virus 1
  source 1..21: note = HLAs: DRB1_0101 DRB1_1001 DPA10301-DPB10101 DPA10301-DPB10201 DPA10301-DPB10202 DPA10301-DPB110601 DPA10301-DPB11801 DPA10401-DPB10101 DQA10102-DQB10501 DQA10103-DQB10609
IGQVRDQAEHLKTAVQMAVFI

SEQ ID NO: 3798 - protein, 22 aa, Human immunodeficiency virus 1
  source 1..22: note = HLAs: DRB1_0101 DRB1_1001 DPA10103-DPB11501 DPA10104-DPB11501 DPA10301-DPB10101 DPA10301-DPB10201 DPA10301-DPB10202 DPA10301-DPB110601 DPA10301-DPB11801 DPA10301-DPB14001 DPA10301-DPB16501 DPA10401-DPB10101 DQA10102-DQB10501 DQA10102-DQB10609 DQA10103-DQB10501 DQA10103-DQB10601 DQA10103-DQB10609
IGQVRDQAEHLKTAVQMAVFIH

SEQ ID NO: 3799 - protein, 23 aa, Human immunodeficiency virus 1
  source 1..23: note = HLAs: DRB1_0101 DRB1_1001 DPA10103-DPB10101 DPA10103-DPB11501 DPA10103-DPB11901 DPA10103-DPB15001 DPA10104-DPB10101 DPA10104-DPB11501 DPA10105-DPB10101 DPA10105-DPB15001 DPA10202-DPB10101 DPA10301-DPB10101 DPA10301-DPB10201 DPA10301-DPB10202 DPA10301-DPB10401 DPA10301-DPB10402 DPA10301-DPB110501 DPA10301-DPB110601 DPA10301-DPB11801 DPA10301-DPB12301 DPA10301-DPB13901 DPA10301-DPB14001 DPA10301-DPB14901 DPA10301-DPB16501 DPA10301-DPB18001 DPA10401-DPB10101 DPA10401-DPB10201 DPA10401-DPB10202 DPA10401-DPB10501 DQA10102-DQB10501 DQA10102-DQB10601 DQA10102-DQB10609 DQA10103-DQB10501 DQA10103-DQB10601 DQA10103-DQB10609
IGQVRDQAEHLKTAVQMAVFIHN

SEQ ID NO: 3800 - protein, 24 aa, Human immunodeficiency virus 1
  source 1..24: note = HLAs: DRB1_0101 DRB1_1001 DRB1_1406 DPA10103-DPB10101 DPA10103-DPB10202 DPA10103-DPB11501 DPA10103-DPB11901 DPA10103-DPB15001 DPA10104-DPB10101 DPA10104-DPB11501 DPA10105-DPB10101 DPA10105-DPB15001 DPA10202-DPB10101 DPA10202-DPB110601 DPA10202-DPB11901 DPA10301-DPB10101 DPA10301-DPB10201 DPA10301-DPB10202 DPA10301-DPB10401 DPA10301-DPB10402 DPA10301-DPB110501 DPA10301-DPB110601 DPA10301-DPB11101 DPA10301-DPB11801 DPA10301-DPB12301 DPA10301-DPB13901 DPA10301-DPB14001 DPA10301-DPB14901 DPA10301-DPB15501 DPA10301-DPB16501 DPA10301-DPB17501 DPA10301-DPB18001 DPA10401-DPB10101 DPA10401-DPB10201 DPA10401-DPB10202 DPA10401-DPB10501 DPA10401-DPB11401 DQA10102-DQB10501 DQA10102-DQB10601 DQA10102-DQB10609 DQA10103-DQB10501 DQA10103-DQB10601 DQA10103-DQB10609
IGQVRDQAEHLKTAVQMAVFIHNF

SEQ ID NO: 3801 - protein, 25 aa, Human immunodeficiency virus 1
  source 1..25: note = HLAs: DRB1_0101 DRB1_0701 DRB1_1001 DRB1_1406 DPA10103-DPB10101 DPA10103-DPB10201 DPA10103-DPB10202 DPA10103-DPB10501 DPA10103-DPB11501 DPA10103-DPB11601 DPA10103-DPB11801 DPA10103-DPB11901 DPA10103-DPB13101 DPA10103-DPB13401 DPA10103-DPB14001 DPA10103-DPB14801 DPA10103-DPB15001 DPA10104-DPB10101 DPA10104-DPB11501 DPA10105-DPB10101 DPA10105-DPB11801 DPA10105-DPB15001 DPA10106-DPB10101 DPA10201-DPB10101 DPA10201-DPB11501 DPA10202-DPB10101 DPA10202-DPB10202 DPA10202-DPB110601 DPA10202-DPB11901 DPA10202-DPB16501 DPA10301-DPB10101 DPA10301-DPB10201 DPA10301-DPB10202 DPA10301-DPB10401 DPA10301-DPB10402 DPA10301-DPB110501 DPA10301-DPB110601 DPA10301-DPB11101 DPA10301-DPB11801 DPA10301-DPB12301 DPA10301-DPB13901 DPA10301-DPB14001 DPA10301-DPB14901 DPA10301-DPB15501 DPA10301-DPB16501 DPA10301-DPB17501 DPA10301-DPB18001 DPA10401-DPB10101 DPA10401-DPB10201 DPA10401-DPB10202 DPA10401-DPB10301 DPA10401-DPB10402 DPA10401-DPB10501 DPA10401-DPB110501 DPA10401-DPB11301 DPA10401-DPB113301; note = HLAs: DPA10401-DPB11401 DPA10401-DPB14901 DQA10102-DQB10501 DQA10102-DQB10503 DQA10102-DQB10601 DQA10102-DQB10602 DQA10102-DQB10609 DQA10102-DQB10611 DQA10103-DQB10501 DQA10103-DQB10601 DQA10103-DQB10609
IGQVRDQAEHLKTAVQMAVFIHNFK

SEQ ID NO: 3802 - protein, 14 aa, Human immunodeficiency virus 1
  source 1..14: note = HLAs: DQA10201-DQB10301 DQA10201-DQB10303 DQA10501-DQB10301 DQA10501-DQB10319 DQA10503-DQB10301 DQA10505-DQB10301 DQA10505-DQB10309 DQA10505-DQB10319 DQA10506-DQB10303 DQA10508-DQB10301 DQA10509-DQB10301
IGTVLVGPTPVNII

SEQ ID NO: 3803 - protein, 15 aa, Human immunodeficiency virus 1
  source 1..15: note = HLAs: DRB1_0101 DRB1_0701 DRB1_0901 DRB1_1001 DRB1_1114 DRB1_1302 DQA10102-DQB10501 DQA10102-DQB10601 DQA10103-DQB10601 DQA10103-DQB10609 DQA10201-DQB10301 DQA10201-DQB10303 DQA10501-DQB10301 DQA10501-DQB10319 DQA10503-DQB10301 DQA10505-DQB10301 DQA10505-DQB10309 DQA10505-DQB10319 DQA10505-DQB10402 DQA10506-DQB10303 DQA10508-DQB10301 DQA10509-DQB10301 DQA10601-DQB10301
IGTVLVGPTPVNIIG

SEQ ID NO: 3804 - protein, 16 aa, Human immunodeficiency virus 1
  source 1..16: note = HLAs: DRB1_0101 DQA10102-DQB10501 DQA10102-DQB10601 DQA10103-DQB10601 DQA10201-DQB10301 DQA10201-DQB10303 DQA10501-DQB10301 DQA10501-DQB10319 DQA10503-DQB10301 DQA10505-DQB10301 DQA10505-DQB10309 DQA10505-DQB10319 DQA10506-DQB10303 DQA10508-DQB10301 DQA10509-DQB10301 DQA10601-DQB10301
IGTVLVGPTPVNIIGR

SEQ ID NO: 3805 - protein, 17 aa, Human immunodeficiency virus 1
  source 1..17: note = HLAs: DRB1_0101 DRB1_1001 DQA10102-DQB10501 DQA10102-DQB10601 DQA10103-DQB10601 DQA10201-DQB10301 DQA10201-DQB10303
IGTVLVGPTPVNIIGRN

SEQ ID NO: 3806 - protein, 15 aa, Human immunodeficiency virus 1
  source 1..15: note = HLAs: DRB1_0101 DRB1_1103 DRB1_1104
IHNFKRKGGIGGYSA

SEQ ID NO: 3807 - protein, 20 aa, Human immunodeficiency virus 1
  source 1..20: note = HLAs: DQA10201-DQB10301
IHNFKRKGGIGGYSAGERII

SEQ ID NO: 3808 - protein, 15 aa, Human immunodeficiency virus 1
  source 1..15: note = HLAs: DRB1_0301 DPA10301-DPB11801
IIATDIQTKELQKQI

SEQ ID NO: 3809 - protein, 20 aa, Human immunodeficiency virus 1
  source 1..20: note = HLAs: DRB1_0101 DRB1_1001 DPA10103-DPB15001 DPA10105-DPB15001 DPA10301-DPB10101 DPA10301-DPB10201 DPA10301-DPB10202 DPA10301-DPB11801 DPA10401-DPB10101 DQA10102-DQB10501 DQA10102-DQB10601 DQA10102-DQB10609 DQA10103-DQB10501 DQA10103-DQB10601 DQA10103-DQB10609
IIGQVRDQAEHLKTAVQMAV

SEQ ID NO: 3810 - protein, 21 aa, Human immunodeficiency virus 1
  source 1..21: note = HLAs: DRB1_1001 DPA10301-DPB10101 DPA10301-DPB10202 DPA10401-DPB10101 DQA10102-DQB10501 DQA10102-DQB10609 DQA10103-DQB10609
IIGQVRDQAEHLKTAVQMAVF

SEQ ID NO: 3811 - protein, 22 aa, Human immunodeficiency virus 1
  source 1..22: note = HLAs: DRB1_0101 DRB1_1001 DPA10301-DPB10101 DPA10301-DPB10201 DPA10301-DPB10202 DPA10301-DPB110601 DPA10301-DPB11801 DPA10301-DPB16501 DPA10401-DPB10101 DQA10102-DQB10501 DQA10102-DQB10609 DQA10103-DQB10501 DQA10103-DQB10609
IIGQVRDQAEHLKTAVQMAVFI

SEQ ID NO: 3812 - protein, 23 aa, Human immunodeficiency virus 1
  source 1..23: note = HLAs: DRB1_0101 DRB1_1001 DPA10103-DPB10101 DPA10103-DPB11501 DPA10103-DPB15001 DPA10104-DPB10101 DPA10104-DPB11501 DPA10105-DPB10101 DPA10105-DPB15001 DPA10301-DPB10101 DPA10301-DPB10201 DPA10301-DPB10202 DPA10301-DPB110601 DPA10301-DPB11801 DPA10301-DPB14001 DPA10301-DPB16501 DPA10401-DPB10101 DPA10401-DPB10501 DQA10102-DQB10501 DQA10102-DQB10601 DQA10102-DQB10609 DQA10103-DQB10501 DQA10103-DQB10601 DQA10103-DQB10609
IIGQVRDQAEHLKTAVQMAVFIH

SEQ ID NO: 3813 - protein, 24 aa, Human immunodeficiency virus 1
  source 1..24: note = HLAs: DRB1_0101 DRB1_1001 DRB1_1406 DPA10103-DPB10101 DPA10103-DPB11501 DPA10103-DPB11901 DPA10103-DPB15001 DPA10104-DPB10101 DPA10104-DPB11501 DPA10105-DPB10101 DPA10105-DPB15001 DPA10202-DPB10101 DPA10301-DPB10101 DPA10301-DPB10201 DPA10301-DPB10202 DPA10301-DPB10401 DPA10301-DPB10402 DPA10301-DPB110501 DPA10301-DPB110601 DPA10301-DPB11801 DPA10301-DPB12301 DPA10301-DPB13901 DPA10301-DPB14001 DPA10301-DPB14901 DPA10301-DPB16501 DPA10301-DPB18001 DPA10401-DPB10101 DPA10401-DPB10201 DPA10401-DPB10202 DPA10401-DPB10501 DQA10102-DQB10501 DQA10102-DQB10601 DQA10102-DQB10609 DQA10103-DQB10501 DQA10103-DQB10601 DQA10103-DQB10609
IIGQVRDQAEHLKTAVQMAVFIHN

SEQ ID NO: 3814 - protein, 25 aa, Human immunodeficiency virus 1
  source 1..25: note = HLAs: DRB1_0101 DRB1_0701 DRB1_1001 DRB1_1406 DPA10103-DPB10101 DPA10103-DPB10202 DPA10103-DPB11501 DPA10103-DPB11901 DPA10103-DPB15001 DPA10104-DPB10101 DPA10104-DPB11501 DPA10105-DPB10101 DPA10105-DPB15001 DPA10202-DPB10101 DPA10202-DPB110601 DPA10202-DPB11901 DPA10301-DPB10101 DPA10301-DPB10201 DPA10301-DPB10202 DPA10301-DPB10401 DPA10301-DPB10402 DPA10301-DPB110501 DPA10301-DPB110601 DPA10301-DPB11101 DPA10301-DPB11801 DPA10301-DPB12301 DPA10301-DPB13901 DPA10301-DPB14001 DPA10301-DPB14901 DPA10301-DPB15501 DPA10301-DPB16501 DPA10301-DPB17501 DPA10301-DPB18001 DPA10401-DPB10101 DPA10401-DPB10201 DPA10401-DPB10202 DPA10401-DPB10501 DPA10401-DPB11401 DQA10102-DQB10501 DQA10102-DQB10503 DQA10102-DQB10601 DQA10102-DQB10609 DQA10102-DQB10611 DQA10103-DQB10501 DQA10103-DQB10601 DQA10103-DQB10609
IIGQVRDQAEHLKTAVQMAVFIHNF

SEQ ID NO: 3815 - protein, 13 aa, Human immunodeficiency virus 1
  source 1..13: note = HLAs: DRB1_0101 DRB1_0804 DRB1_0806 DRB1_0813 DRB1_1101 DRB1_1102 DRB1_1103 DRB1_1104 DRB1_1114 DRB1_1301 DRB1_1302 DRB1_1304 DRB1_1305 DRB1_1402 DRB1_1406 DPA10301-DPB10201 DPA10301-DPB11801 DQA10102-DQB10501 DQA10103-DQB10501
IILGLNKIVRMYS

SEQ ID NO: 3816 - protein, 14 aa, Human immunodeficiency virus 1
  source 1..14: note = HLAs: DRB1_0101 DRB1_0102 DRB1_0404 DRB1_0801 DRB1_0802 DRB1_0804 DRB1_0806 DRB1_0809 DRB1_0813 DRB1_1001 DRB1_1101 DRB1_1102 DRB1_1103 DRB1_1104 DRB1_1114 DRB1_1201 DRB1_1202 DRB1_1301 DRB1_1302 DRB1_1304 DRB1_1305 DRB1_1401 DRB1_1402 DRB1_1403 DRB1_1404 DRB1_1405 DRB1_1406 DRB1_1454 DRB1_1501 DRB1_1502 DPA10103-DPB11501 DPA10104-DPB11501 DPA10202-DPB10101 DPA10301-DPB10101 DPA10301-DPB10201 DPA10301-DPB10202 DPA10301-DPB110601 DPA10301-DPB11801 DPA10301-DPB14001 DPA10401-DPB10101 DQA10102-DQB10501 DQA10103-DQB10501 DQA10103-DQB10601 DQA10103-DQB10609
IILGLNKIVRMYSP

SEQ ID NO: 3817 - protein, 15 aa, Human immunodeficiency virus 1
  source 1..15: note = HLAs: DRB1_0101 DRB1_0102 DRB1_0301 DRB1_0404 DRB1_0410 DRB1_0701 DRB1_0801 DRB1_0802 DRB1_0803 DRB1_0804 DRB1_0806 DRB1_0809 DRB1_0813 DRB1_0901 DRB1_1001 DRB1_1101 DRB1_1102 DRB1_1103 DRB1_1104 DRB1_1114 DRB1_1201 DRB1_1202 DRB1_1301 DRB1_1302 DRB1_1303 DRB1_1304 DRB1_1305 DRB1_1312 DRB1_1401 DRB1_1402 DRB1_1403 DRB1_1404 DRB1_1405 DRB1_1406 DRB1_1407 DRB1_1418 DRB1_1454 DRB1_1501 DRB1_1502 DRB1_1503 DRB1_1601 DRB1_1602 DPA10103-DPB11501 DPA10103-DPB11801 DPA10103-DPB13401 DPA10104-DPB11501 DPA10105-DPB11801 DPA10202-DPB10101 DPA10202-DPB10501 DPA10202-DPB110601 DPA10202-DPB11801 DPA10202-DPB11901 DPA10202-DPB13101 DPA10202-DPB13801 DPA10301-DPB10101 DPA10301-DPB10201 DPA10301-DPB10202 DPA10301-DPB110601 DPA10301-DPB11801 DPA10301-DPB14001 DPA10301-DPB16501 DPA10401-DPB10101 DPA10401-DPB10201 DPA10401-DPB10202 DPA10401-DPB10501 DQA10102-DQB10501 DQA10102-DQB10503 DQA10102-DQB10601 DQA10102-DQB10602 DQA10102-DQB10609 DQA10103-DQB10501 DQA10103-DQB10601 DQA10103-DQB10602; note = HLAs: DQA10103-DQB10609
IILGLNKIVRMYSPV

SEQ ID NO: 3818 - protein, 16 aa, Human immunodeficiency virus 1
  source 1..16: note = HLAs: DRB1_0101 DRB1_0102 DRB1_0401 DRB1_0404 DRB1_0405 DRB1_0408 DRB1_0410 DRB1_0701 DRB1_0801 DRB1_0802 DRB1_0803 DRB1_0804 DRB1_0806 DRB1_0809 DRB1_0813 DRB1_0901 DRB1_1001 DRB1_1101 DRB1_1102 DRB1_1103 DRB1_1104 DRB1_1114 DRB1_1201 DRB1_1202 DRB1_1301 DRB1_1302 DRB1_1303 DRB1_1304 DRB1_1305 DRB1_1312 DRB1_1401 DRB1_1402 DRB1_1403 DRB1_1404 DRB1_1405 DRB1_1406 DRB1_1454 DRB1_1501 DRB1_1502 DRB1_1503 DRB1_1601 DRB1_1602 DPA10103-DPB11501 DPA10104-DPB11501 DPA10202-DPB10101 DPA10202-DPB10501 DPA10202-DPB110601 DPA10202-DPB11801 DPA10202-DPB11901 DPA10202-DPB13101 DPA10202-DPB13801 DPA10301-DPB10101 DPA10301-DPB10201 DPA10301-DPB10202 DPA10301-DPB110601 DPA10301-DPB11801 DPA10301-DPB14001 DPA10301-DPB16501 DPA10401-DPB10101 DPA10401-DPB10201 DPA10401-DPB10202 DPA10401-DPB10501 DQA10102-DQB10501 DQA10102-DQB10503 DQA10102-DQB10601 DQA10102-DQB10602 DQA10102-DQB10609 DQA10102-DQB10611 DQA10103-DQB10501 DQA10103-DQB10503 DQA10103-DQB10601 DQA10103-DQB10602 DQA10103-DQB10608; note = HLAs: DQA10103-DQB10609 DQA10505-DQB10402
IILGLNKIVRMYSPVS

SEQ ID NO: 3819 - protein, 17 aa, Human immunodeficiency virus 1
  source 1..17: note = HLAs: DRB1_0101 DRB1_0102 DRB1_0401 DRB1_0402 DRB1_0403 DRB1_0404 DRB1_0405 DRB1_0406 DRB1_0407 DRB1_0408 DRB1_0410 DRB1_0701 DRB1_0801 DRB1_0802 DRB1_0803 DRB1_0804 DRB1_0806 DRB1_0809 DRB1_0813 DRB1_0901 DRB1_1001 DRB1_1101 DRB1_1102 DRB1_1103 DRB1_1104 DRB1_1114 DRB1_1201 DRB1_1202 DRB1_1301 DRB1_1302 DRB1_1303 DRB1_1304 DRB1_1305 DRB1_1312 DRB1_1401 DRB1_1402 DRB1_1403 DRB1_1404 DRB1_1405 DRB1_1406 DRB1_1407 DRB1_1418 DRB1_1454 DRB1_1501 DRB1_1502 DRB1_1503 DRB1_1601 DRB1_1602 DPA10103-DPB11501 DPA10103-DPB11801 DPA10103-DPB11901 DPA10103-DPB13401 DPA10103-DPB15001 DPA10104-DPB11501 DPA10105-DPB11801 DPA10105-DPB15001 DPA10202-DPB10101 DPA10202-DPB10201 DPA10202-DPB10202 DPA10202-DPB10501 DPA10202-DPB110601 DPA10202-DPB11801 DPA10202-DPB11901 DPA10202-DPB13101 DPA10202-DPB13801 DPA10202-DPB15501 DPA10202-DPB16501 DPA10301-DPB10101 DPA10301-DPB10201 DPA10301-DPB10202 DPA10301-DPB10401 DPA10301-DPB10402 DPA10301-DPB110501 DPA10301-DPB110601 DPA10301-DPB11801 DPA10301-DPB12301; note = HLAs: DPA10301-DPB13901 DPA10301-DPB14001 DPA10301-DPB14901 DPA10301-DPB16501 DPA10301-DPB18001 DPA10401-DPB10101 DPA10401-DPB10201 DPA10401-DPB10202 DPA10401-DPB10301 DPA10401-DPB10501 DPA10401-DPB11401 DQA10102-DQB10501 DQA10102-DQB10503 DQA10102-DQB10601 DQA10102-DQB10602 DQA10102-DQB10609 DQA10102-DQB10611 DQA10103-DQB10501 DQA10103-DQB10503 DQA10103-DQB10601 DQA10103-DQB10602 DQA10103-DQB10604 DQA10103-DQB10608 DQA10103-DQB10609 DQA10505-DQB10402
IILGLNKIVRMYSPVSI

SEQ ID NO: 3820 - protein, 18 aa, Human immunodeficiency virus 1
  source 1..18: note = HLAs: DRB1_0101 DRB1_0102 DRB1_0401 DRB1_0404 DRB1_0405 DRB1_0408 DRB1_0410 DRB1_0701 DRB1_0801 DRB1_0802 DRB1_0803 DRB1_0804 DRB1_0806 DRB1_0809 DRB1_0813 DRB1_0901 DRB1_1001 DRB1_1101 DRB1_1102 DRB1_1103 DRB1_1104 DRB1_1114 DRB1_1301 DRB1_1302 DRB1_1304 DRB1_1305 DRB1_1401 DRB1_1402 DRB1_1404 DRB1_1406 DRB1_1454 DRB1_1501 DRB1_1502 DRB1_1503 DRB1_1601 DRB1_1602 DPA10103-DPB10101 DPA10103-DPB10301 DPA10103-DPB10601 DPA10103-DPB112401 DPA10103-DPB11401 DPA10103-DPB11501 DPA10103-DPB11901 DPA10103-DPB12001 DPA10103-DPB12901 DPA10103-DPB13101 DPA10103-DPB15001 DPA10103-DPB15501 DPA10104-DPB10101 DPA10104-DPB10301 DPA10104-DPB11501 DPA10105-DPB10101 DPA10105-DPB10301 DPA10105-DPB15001 DPA10202-DPB10101 DPA10202-DPB110601 DPA10202-DPB11301 DPA10202-DPB11901 DPA10202-DPB13101 DPA10202-DPB15501 DPA10301-DPB10101 DPA10301-DPB10201 DPA10301-DPB10202 DPA10301-DPB10301 DPA10301-DPB10401 DPA10301-DPB10901 DPA10301-DPB110601 DPA10301-DPB11301 DPA10301-DPB11701 DPA10301-DPB11801 DPA10301-DPB12301; note = HLAs: DPA10301-DPB13901 DPA10301-DPB14001 DPA10301-DPB15501 DPA10301-DPB16501 DPA10401-DPB10101 DPA10401-DPB10201 DPA10401-DPB10202 DPA10401-DPB10301 DPA10401-DPB10501 DPA10401-DPB11301 DPA10401-DPB113301 DPA10401-DPB11401 DQA10102-DQB10501 DQA10102-DQB10503 DQA10102-DQB10609 DQA10103-DQB10501 DQA10103-DQB10503 DQA10103-DQB10601 DQA10103-DQB10602 DQA10103-DQB10609 DQA10505-DQB10402
IILGLNKIVRMYSPVSIL

SEQ ID NO: 3821 - protein, 19 aa, Human immunodeficiency virus 1
  source 1..19: note = HLAs: DRB1_0101 DRB1_0102 DRB1_0401 DRB1_0402 DRB1_0404 DRB1_0405 DRB1_0407 DRB1_0408 DRB1_0410 DRB1_0701 DRB1_0801 DRB1_0802 DRB1_0803 DRB1_0804 DRB1_0806 DRB1_0809 DRB1_0813 DRB1_0901 DRB1_1001 DRB1_1101 DRB1_1102 DRB1_1103 DRB1_1104 DRB1_1114 DRB1_1201 DRB1_1202 DRB1_1301 DRB1_1302 DRB1_1303 DRB1_1304 DRB1_1305 DRB1_1312 DRB1_1401 DRB1_1402 DRB1_1403 DRB1_1404 DRB1_1405 DRB1_1406 DRB1_1454 DRB1_1501 DRB1_1502 DRB1_1503 DRB1_1601 DRB1_1602 DPA10103-DPB10101 DPA10103-DPB10201 DPA10103-DPB10202 DPA10103-DPB10301 DPA10103-DPB10501 DPA10103-DPB10601 DPA10103-DPB10901 DPA10103-DPB11001 DPA10103-DPB11101 DPA10103-DPB112401 DPA10103-DPB11301 DPA10103-DPB113101 DPA10103-DPB113301 DPA10103-DPB11401 DPA10103-DPB11501 DPA10103-DPB11601 DPA10103-DPB11701 DPA10103-DPB11801 DPA10103-DPB11901 DPA10103-DPB12001 DPA10103-DPB12101 DPA10103-DPB12901 DPA10103-DPB13001 DPA10103-DPB13101 DPA10103-DPB13401 DPA10103-DPB14801 DPA10103-DPB15001 DPA10103-DPB15501 DPA10104-DPB10101 DPA10104-DPB10301; note = HLAs: DPA10104-DPB11001 DPA10104-DPB11301 DPA10104-DPB11501 DPA10105-DPB10101 DPA10105-DPB10301 DPA10105-DPB11801 DPA10105-DPB15001 DPA10106-DPB10101 DPA10201-DPB10101 DPA10201-DPB110601 DPA10201-DPB11401 DPA10201-DPB11501 DPA10201-DPB11901 DPA10201-DPB15501 DPA10202-DPB10101 DPA10202-DPB10201 DPA10202-DPB10202 DPA10202-DPB10301 DPA10202-DPB10501 DPA10202-DPB10901 DPA10202-DPB110601 DPA10202-DPB11101 DPA10202-DPB11301 DPA10202-DPB113101 DPA10202-DPB11401 DPA10202-DPB11701 DPA10202-DPB11801 DPA10202-DPB11901 DPA10202-DPB12101 DPA10202-DPB12901 DPA10202-DPB13001 DPA10202-DPB13101 DPA10202-DPB13801 DPA10202-DPB14501 DPA10202-DPB15501 DPA10202-DPB16501 DPA10202-DPB18501 DPA10301-DPB10101 DPA10301-DPB10201 DPA10301-DPB10202 DPA10301-DPB10301 DPA10301-DPB10401 DPA10301-DPB10402 DPA10301-DPB10901 DPA10301-DPB110501 DPA10301-DPB110601 DPA10301-DPB11101 DPA10301-DPB11301 DPA10301-DPB11701 DPA10301-DPB11801 DPA10301-DPB12301 DPA10301-DPB13901 DPA10301-DPB14001 DPA10301-DPB14901; note = HLAs: DPA10301-DPB15501 DPA10301-DPB16501 DPA10301-DPB17501 DPA10301-DPB18001 DPA10401-DPB10101 DPA10401-DPB10201 DPA10401-DPB10202 DPA10401-DPB10301 DPA10401-DPB10402 DPA10401-DPB10501 DPA10401-DPB110501 DPA10401-DPB11301 DPA10401-DPB113301 DPA10401-DPB11401 DPA10401-DPB14901 DQA10102-DQB10501 DQA10102-DQB10503 DQA10102-DQB10601 DQA10102-DQB10602 DQA10102-DQB10609 DQA10102-DQB10611 DQA10103-DQB10501 DQA10103-DQB10503 DQA10103-DQB10601 DQA10103-DQB10602 DQA10103-DQB10604 DQA10103-DQB10608 DQA10103-DQB10609 DQA10501-DQB10501 DQA10505-DQB10402 DQA10505-DQB10501
IILGLNKIVRMYSPVSILD

SEQ ID NO: 3822 - protein, 20 aa, Human immunodeficiency virus 1
  source 1..20: note = HLAs: DRB1_0101 DRB1_0102 DRB1_0103 DRB1_0401 DRB1_0402 DRB1_0403 DRB1_0404 DRB1_0405 DRB1_0406 DRB1_0407 DRB1_0408 DRB1_0410 DRB1_0701 DRB1_0801 DRB1_0802 DRB1_0803 DRB1_0804 DRB1_0806 DRB1_0809 DRB1_0813 DRB1_0901 DRB1_1001 DRB1_1101 DRB1_1102 DRB1_1103 DRB1_1104 DRB1_1114 DRB1_1201 DRB1_1202 DRB1_1301 DRB1_1302 DRB1_1303 DRB1_1304 DRB1_1305 DRB1_1312 DRB1_1401 DRB1_1402 DRB1_1403 DRB1_1404 DRB1_1405 DRB1_1406 DRB1_1407 DRB1_1418 DRB1_1454 DRB1_1501 DRB1_1502 DRB1_1503 DRB1_1601 DRB1_1602 DPA10103-DPB10101 DPA10103-DPB10201 DPA10103-DPB10202 DPA10103-DPB10301 DPA10103-DPB10401 DPA10103-DPB10402 DPA10103-DPB10501 DPA10103-DPB10601 DPA10103-DPB10901 DPA10103-DPB11001 DPA10103-DPB110501 DPA10103-DPB11101 DPA10103-DPB112401 DPA10103-DPB112601 DPA10103-DPB11301 DPA10103-DPB113101 DPA10103-DPB113301 DPA10103-DPB11401 DPA10103-DPB11501 DPA10103-DPB11601 DPA10103-DPB11701 DPA10103-DPB11801 DPA10103-DPB11901 DPA10103-DPB12001 DPA10103-DPB12101 DPA10103-DPB12301 DPA10103-DPB12901; note = HLAs: DPA10103-DPB13001 DPA10103-DPB13101 DPA10103-DPB13401 DPA10103-DPB13901 DPA10103-DPB14001 DPA10103-DPB14101 DPA10103-DPB14801 DPA10103-DPB14901 DPA10103-DPB15001 DPA10103-DPB15101 DPA10103-DPB15501 DPA10103-DPB15901 DPA10103-DPB18001 DPA10104-DPB10101 DPA10104-DPB10301 DPA10104-DPB11001 DPA10104-DPB11301 DPA10104-DPB11501 DPA10105-DPB10101 DPA10105-DPB10301 DPA10105-DPB10401 DPA10105-DPB11801 DPA10105-DPB15001 DPA10106-DPB10101 DPA10106-DPB11101 DPA10201-DPB10101 DPA10201-DPB10201 DPA10201-DPB10202 DPA10201-DPB10301 DPA10201-DPB10501 DPA10201-DPB10601 DPA10201-DPB10901 DPA10201-DPB11001 DPA10201-DPB110601 DPA10201-DPB11101 DPA10201-DPB11301 DPA10201-DPB113101 DPA10201-DPB113301 DPA10201-DPB11401 DPA10201-DPB11501 DPA10201-DPB11601 DPA10201-DPB11701 DPA10201-DPB11901 DPA10201-DPB12601 DPA10201-DPB13001 DPA10201-DPB13401 DPA10201-DPB14501 DPA10201-DPB15501 DPA10201-DPB19101 DPA10202-DPB10101 DPA10202-DPB10201 DPA10202-DPB10202 DPA10202-DPB10301 DPA10202-DPB10401 DPA10202-DPB10402; note = HLAs: DPA10202-DPB10501 DPA10202-DPB10901 DPA10202-DPB110001 DPA10202-DPB110501 DPA10202-DPB110601 DPA10202-DPB11101 DPA10202-DPB11301 DPA10202-DPB113101 DPA10202-DPB11401 DPA10202-DPB11701 DPA10202-DPB11801 DPA10202-DPB11901 DPA10202-DPB12101 DPA10202-DPB12901 DPA10202-DPB13001 DPA10202-DPB13101 DPA10202-DPB13801 DPA10202-DPB14501 DPA10202-DPB15501 DPA10202-DPB16501 DPA10202-DPB18501 DPA10301-DPB10101 DPA10301-DPB10201 DPA10301-DPB10202 DPA10301-DPB10301 DPA10301-DPB10401 DPA10301-DPB10402 DPA10301-DPB10901 DPA10301-DPB110501 DPA10301-DPB110601 DPA10301-DPB11101 DPA10301-DPB11301 DPA10301-DPB11701 DPA10301-DPB11801 DPA10301-DPB12301 DPA10301-DPB13901 DPA10301-DPB14001 DPA10301-DPB14901 DPA10301-DPB15501 DPA10301-DPB16501 DPA10301-DPB17501 DPA10301-DPB18001 DPA10401-DPB10101 DPA10401-DPB10201 DPA10401-DPB10202 DPA10401-DPB10301 DPA10401-DPB10402 DPA10401-DPB10501 DPA10401-DPB110501 DPA10401-DPB11301 DPA10401-DPB113301 DPA10401-DPB11401 DPA10401-DPB14901 DQA10102-DQB10501; note = HLAs: DQA10102-DQB10503 DQA10102-DQB10601 DQA10102-DQB10602 DQA10102-DQB10604 DQA10102-DQB10609 DQA10102-DQB10611 DQA10103-DQB10501 DQA10103-DQB10502 DQA10103-DQB10503 DQA10103-DQB10601 DQA10103-DQB10602 DQA10103-DQB10603 DQA10103-DQB10604 DQA10103-DQB10608 DQA10103-DQB10609 DQA10201-DQB10301 DQA10201-DQB10303 DQA10501-DQB10501 DQA10505-DQB10402 DQA10505-DQB10501 DQA10506-DQB10303
IILGLNKIVRMYSPVSILDI

SEQ ID NO: 3823 - protein, 15 aa, Human immunodeficiency virus 1
  source 1..15: note = HLAs: DRB1_1103 DRB1_1304
IIRDYGKQMAGDDCV

SEQ ID NO: 3824 - protein, 15 aa, Human immunodeficiency virus 1
  source 1..15: note = HLAs: DRB1_1102 DRB1_1103 DRB1_1104 DRB1_1301 DRB1_1304 DPA10103-DPB11501 DPA10104-DPB11501 DPA10202-DPB110601 DPA10202-DPB11901
IKKKDSTKWRKLVDF

SEQ ID NO: 3825 - protein, 17 aa, Human immunodeficiency virus 1
  source 1..17: note = HLAs: DRB1_1103 DRB1_1304 DPA10202-DPB13101
IKKKDSTKWRKLVDFRE

SEQ ID NO: 3826 - protein, 18 aa, Human immunodeficiency virus 1
  source 1..18: note = HLAs: DPA10103-DPB11501 DPA10103-DPB13101 DPA10104-DPB11501 DPA10202-DPB110601 DPA10202-DPB11901 DPA10202-DPB13101 DPA10301-DPB10101 DPA10301-DPB10201 DPA10301-DPB10202 DPA10301-DPB110601 DPA10301-DPB14001 DPA10301-DPB16501 DPA10401-DPB10101
IKKKDSTKWRKLVDFREL

SEQ ID NO: 3827 - protein, 19 aa, Human immunodeficiency virus 1
  source 1..19: note = HLAs: DRB1_0405 DRB1_1304 DPA10103-DPB10101 DPA10103-DPB10201 DPA10103-DPB10202 DPA10103-DPB11501 DPA10103-DPB11601 DPA10103-DPB11901 DPA10103-DPB13101 DPA10103-DPB13401 DPA10103-DPB14101 DPA10103-DPB14801 DPA10103-DPB15001 DPA10104-DPB10101 DPA10104-DPB11501 DPA10105-DPB10101 DPA10105-DPB15001 DPA10201-DPB110601 DPA10201-DPB11501 DPA10201-DPB11601 DPA10201-DPB11901 DPA10202-DPB10101 DPA10202-DPB110601 DPA10202-DPB11901 DPA10202-DPB13101 DPA10202-DPB16501 DPA10301-DPB10101 DPA10301-DPB10201 DPA10301-DPB10202 DPA10301-DPB10401 DPA10301-DPB110601 DPA10301-DPB11801 DPA10301-DPB12301 DPA10301-DPB13901 DPA10301-DPB14001 DPA10301-DPB16501 DPA10401-DPB10101 DPA10401-DPB10201 DPA10401-DPB10202 DPA10401-DPB10501
IKKKDSTKWRKLVDFRELN

SEQ ID NO: 3828 - protein, 20 aa, Human immunodeficiency virus 1
  source 1..20: note = HLAs: DRB1_0405 DRB1_0410 DRB1_0801 DRB1_0806 DRB1_1001 DRB1_1103 DRB1_1304 DPA10103-DPB10101 DPA10103-DPB10201 DPA10103-DPB10202 DPA10103-DPB10501 DPA10103-DPB11501 DPA10103-DPB11601 DPA10103-DPB11901 DPA10103-DPB13101 DPA10103-DPB13401 DPA10103-DPB14001 DPA10103-DPB14101 DPA10103-DPB14801 DPA10103-DPB15001 DPA10103-DPB15501 DPA10104-DPB10101 DPA10104-DPB11501 DPA10105-DPB10101 DPA10105-DPB15001 DPA10106-DPB10101 DPA10201-DPB10101 DPA10201-DPB10501 DPA10201-DPB110601 DPA10201-DPB11501 DPA10201-DPB11601 DPA10201-DPB11901 DPA10201-DPB13401 DPA10202-DPB10101 DPA10202-DPB10201 DPA10202-DPB10202 DPA10202-DPB10501 DPA10202-DPB110601 DPA10202-DPB11801 DPA10202-DPB11901 DPA10202-DPB13101 DPA10202-DPB13801 DPA10202-DPB15501 DPA10202-DPB16501 DPA10301-DPB10101 DPA10301-DPB10201 DPA10301-DPB10202 DPA10301-DPB10401 DPA10301-DPB10402 DPA10301-DPB110501 DPA10301-DPB110601 DPA10301-DPB11101 DPA10301-DPB11801 DPA10301-DPB12301 DPA10301-DPB13901 DPA10301-DPB14001 DPA10301-DPB14901 DPA10301-DPB15501; note = HLAs: DPA10301-DPB16501 DPA10301-DPB18001 DPA10401-DPB10101 DPA10401-DPB10201 DPA10401-DPB10202 DPA10401-DPB10501 DQA10102-DQB10501
IKKKDSTKWRKLVDFRELNK

SEQ ID NO: 3829 - protein, 21 aa, Human immunodeficiency virus 1
  source 1..21: note = HLAs: DRB1_0405 DRB1_0410 DRB1_0806 DRB1_1001 DRB1_1103 DRB1_1304 DPA10103-DPB10101 DPA10103-DPB10201 DPA10103-DPB10202 DPA10103-DPB10501 DPA10103-DPB11501 DPA10103-DPB11601 DPA10103-DPB11901 DPA10103-DPB13101 DPA10103-DPB13401 DPA10103-DPB14001 DPA10103-DPB14101 DPA10103-DPB14801 DPA10103-DPB15001 DPA10104-DPB10101 DPA10104-DPB11501 DPA10105-DPB10101 DPA10105-DPB15001 DPA10106-DPB10101 DPA10201-DPB10101 DPA10201-DPB10501 DPA10201-DPB110601 DPA10201-DPB11501 DPA10201-DPB11601 DPA10201-DPB11901 DPA10202-DPB10101 DPA10202-DPB10201 DPA10202-DPB10202 DPA10202-DPB10501 DPA10202-DPB110601 DPA10202-DPB11901 DPA10202-DPB13101 DPA10202-DPB13801 DPA10202-DPB16501 DPA10301-DPB10101 DPA10301-DPB10201 DPA10301-DPB10202 DPA10301-DPB10401 DPA10301-DPB10402 DPA10301-DPB110501 DPA10301-DPB110601 DPA10301-DPB11801 DPA10301-DPB12301 DPA10301-DPB13901 DPA10301-DPB14001 DPA10301-DPB14901 DPA10301-DPB15501 DPA10301-DPB16501 DPA10301-DPB18001 DPA10401-DPB10101 DPA10401-DPB10201 DPA10401-DPB10202; note = HLAs: DPA10401-DPB10501
IKKKDSTKWRKLVDFRELNKR

SEQ ID NO: 3830 - protein, 22 aa, Human immunodeficiency virus 1
  source 1..22: note = HLAs: DRB1_0405 DRB1_0410 DRB1_0806 DRB1_1001 DRB1_1102 DRB1_1103 DRB1_1104 DRB1_1301 DRB1_1304 DPA10103-DPB10101 DPA10103-DPB10201 DPA10103-DPB10202 DPA10103-DPB10501 DPA10103-DPB11501 DPA10103-DPB11601 DPA10103-DPB11801 DPA10103-DPB11901 DPA10103-DPB13101 DPA10103-DPB13401 DPA10103-DPB14001 DPA10103-DPB14101 DPA10103-DPB14801 DPA10103-DPB15001 DPA10104-DPB10101 DPA10104-DPB11501 DPA10105-DPB10101 DPA10105-DPB11801 DPA10105-DPB15001 DPA10106-DPB10101 DPA10201-DPB10101 DPA10201-DPB10501 DPA10201-DPB110601 DPA10201-DPB11501 DPA10201-DPB11601 DPA10201-DPB11901 DPA10202-DPB10101 DPA10202-DPB10201 DPA10202-DPB10202 DPA10202-DPB10501 DPA10202-DPB110601 DPA10202-DPB11901 DPA10202-DPB13101 DPA10202-DPB13801 DPA10202-DPB16501 DPA10301-DPB10101 DPA10301-DPB10201 DPA10301-DPB10202 DPA10301-DPB10401 DPA10301-DPB10402 DPA10301-DPB110501 DPA10301-DPB110601 DPA10301-DPB11801 DPA10301-DPB12301 DPA10301-DPB13901 DPA10301-DPB14001 DPA10301-DPB14901 DPA10301-DPB15501 DPA10301-DPB16501 DPA10301-DPB18001; note = HLAs: DPA10401-DPB10101 DPA10401-DPB10201 DPA10401-DPB10202 DPA10401-DPB10501
IKKKDSTKWRKLVDFRELNKRT

SEQ ID NO: 3831 - protein, 23 aa, Human immunodeficiency virus 1
  source 1..23: note = HLAs: DRB1_0405 DRB1_0410 DRB1_0801 DRB1_0806 DRB1_1001 DRB1_1101 DRB1_1102 DRB1_1103 DRB1_1104 DRB1_1301 DRB1_1304 DRB1_1305 DPA10103-DPB10101 DPA10103-DPB10201 DPA10103-DPB10202 DPA10103-DPB10501 DPA10103-DPB11501 DPA10103-DPB11601 DPA10103-DPB11801 DPA10103-DPB11901 DPA10103-DPB13101 DPA10103-DPB13401 DPA10103-DPB14001 DPA10103-DPB14101 DPA10103-DPB14801 DPA10103-DPB15001 DPA10104-DPB10101 DPA10104-DPB11501 DPA10105-DPB10101 DPA10105-DPB11801 DPA10105-DPB15001 DPA10106-DPB10101 DPA10201-DPB10101 DPA10201-DPB10501 DPA10201-DPB110601 DPA10201-DPB11501 DPA10201-DPB11601 DPA10201-DPB11901 DPA10202-DPB10101 DPA10202-DPB10201 DPA10202-DPB10202 DPA10202-DPB10501 DPA10202-DPB110601 DPA10202-DPB11901 DPA10202-DPB13101 DPA10202-DPB13801 DPA10202-DPB16501 DPA10301-DPB10101 DPA10301-DPB10201 DPA10301-DPB10202 DPA10301-DPB10401 DPA10301-DPB10402 DPA10301-DPB110501 DPA10301-DPB110601 DPA10301-DPB11801 DPA10301-DPB12301 DPA10301-DPB13901 DPA10301-DPB14001 DPA10301-DPB14901 DPA10301-DPB15501; note = HLAs: DPA10301-DPB16501 DPA10301-DPB18001 DPA10401-DPB10101 DPA10401-DPB10201 DPA10401-DPB10202 DPA10401-DPB10501
IKKKDSTKWRKLVDFRELNKRTQ

SEQ ID NO: 3832 - protein, 24 aa, Human immunodeficiency virus 1
  source 1..24: note = HLAs: DRB1_0405 DRB1_0410 DRB1_0801 DRB1_0806 DRB1_1001 DRB1_1101 DRB1_1102 DRB1_1103 DRB1_1104 DRB1_1301 DRB1_1304 DRB1_1305 DPA10103-DPB10101 DPA10103-DPB10201 DPA10103-DPB10202 DPA10103-DPB10501 DPA10103-DPB11501 DPA10103-DPB11601 DPA10103-DPB11801 DPA10103-DPB11901 DPA10103-DPB13101 DPA10103-DPB13401 DPA10103-DPB14001 DPA10103-DPB14101 DPA10103-DPB14801 DPA10103-DPB15001 DPA10104-DPB10101 DPA10104-DPB11501 DPA10105-DPB10101 DPA10105-DPB11801 DPA10105-DPB15001 DPA10106-DPB10101 DPA10201-DPB10101 DPA10201-DPB10501 DPA10201-DPB110601 DPA10201-DPB11501 DPA10201-DPB11601 DPA10201-DPB11901 DPA10201-DPB13401 DPA10202-DPB10101 DPA10202-DPB10201 DPA10202-DPB10202 DPA10202-DPB10501 DPA10202-DPB110601 DPA10202-DPB11901 DPA10202-DPB13101 DPA10202-DPB13801 DPA10202-DPB15501 DPA10202-DPB16501 DPA10301-DPB10101 DPA10301-DPB10201 DPA10301-DPB10202 DPA10301-DPB10401 DPA10301-DPB10402 DPA10301-DPB110501 DPA10301-DPB110601 DPA10301-DPB11801 DPA10301-DPB12301 DPA10301-DPB13901 DPA10301-DPB14001; note = HLAs: DPA10301-DPB14901 DPA10301-DPB15501 DPA10301-DPB16501 DPA10301-DPB18001 DPA10401-DPB10101 DPA10401-DPB10201 DPA10401-DPB10202 DPA10401-DPB10501
IKKKDSTKWRKLVDFRELNKRTQD

SEQ ID NO: 3833 - protein, 25 aa, Human immunodeficiency virus 1
  source 1..25: note = HLAs: DRB1_0405 DRB1_0410 DRB1_0801 DRB1_0806 DRB1_1001 DRB1_1101 DRB1_1102 DRB1_1103 DRB1_1104 DRB1_1301 DRB1_1304 DRB1_1305 DPA10103-DPB10101 DPA10103-DPB10201 DPA10103-DPB10202 DPA10103-DPB10501 DPA10103-DPB11501 DPA10103-DPB11601 DPA10103-DPB11801 DPA10103-DPB11901 DPA10103-DPB13101 DPA10103-DPB13401 DPA10103-DPB14001 DPA10103-DPB14101 DPA10103-DPB14801 DPA10103-DPB15001 DPA10103-DPB15901 DPA10104-DPB10101 DPA10104-DPB11501 DPA10105-DPB10101 DPA10105-DPB11801 DPA10105-DPB15001 DPA10106-DPB10101 DPA10201-DPB10101 DPA10201-DPB10501 DPA10201-DPB110601 DPA10201-DPB11501 DPA10201-DPB11601 DPA10201-DPB11901 DPA10201-DPB13401 DPA10202-DPB10101 DPA10202-DPB10201 DPA10202-DPB10202 DPA10202-DPB10501 DPA10202-DPB110601 DPA10202-DPB11801 DPA10202-DPB11901 DPA10202-DPB13101 DPA10202-DPB13801 DPA10202-DPB15501 DPA10202-DPB16501 DPA10301-DPB10101 DPA10301-DPB10201 DPA10301-DPB10202 DPA10301-DPB10401 DPA10301-DPB10402 DPA10301-DPB110501 DPA10301-DPB110601 DPA10301-DPB11801 DPA10301-DPB12301; note = HLAs: DPA10301-DPB13901 DPA10301-DPB14001 DPA10301-DPB14901 DPA10301-DPB15501 DPA10301-DPB16501 DPA10301-DPB18001 DPA10401-DPB10101 DPA10401-DPB10201 DPA10401-DPB10202 DPA10401-DPB10501
IKKKDSTKWRKLVDFRELNKRTQDF

SEQ ID NO: 3834 - protein, 13 aa, Human immunodeficiency virus 1
  source 1..13: note = HLAs: DRB1_0804 DRB1_0806 DRB1_1101 DRB1_1102 DRB1_1103 DRB1_1104 DRB1_1301 DRB1_1304 DRB1_1305 DRB1_1406
IKVVPRRKAKIIR

SEQ ID NO: 3835 - protein, 14 aa, Human immunodeficiency virus 1
  source 1..14: note = HLAs: DRB1_0804 DRB1_0806 DRB1_1101 DRB1_1102 DRB1_1103 DRB1_1104 DRB1_1301 DRB1_1304 DRB1_1305 DRB1_1406
IKVVPRRKAKIIRD

SEQ ID NO: 3836 - protein, 15 aa, Human immunodeficiency virus 1
  source 1..15: note = HLAs: DRB1_0101 DRB1_0801 DRB1_0802 DRB1_0804 DRB1_0806 DRB1_0809 DRB1_1101 DRB1_1102 DRB1_1103 DRB1_1104 DRB1_1114 DRB1_1202 DRB1_1301 DRB1_1302 DRB1_1304 DRB1_1305 DRB1_1405 DRB1_1406 DRB1_1501 DPA10103-DPB15001 DPA10105-DPB15001 DPA10401-DPB10301
IKVVPRRKAKIIRDY

SEQ ID NO: 3837 - protein, 16 aa, Human immunodeficiency virus 1
  source 1..16: note = HLAs: DRB1_0801 DRB1_0804 DRB1_0806 DRB1_1101 DRB1_1102 DRB1_1103 DRB1_1104 DRB1_1301 DRB1_1304 DRB1_1305 DRB1_1406 DPA10103-DPB15001 DPA10105-DPB15001
IKVVPRRKAKIIRDYG

SEQ ID NO: 3838 - protein, 17 aa, Human immunodeficiency virus 1
  source 1..17: note = HLAs: DRB1_0801 DRB1_0804 DRB1_0806 DRB1_1101 DRB1_1102 DRB1_1103 DRB1_1104 DRB1_1202 DRB1_1301 DRB1_1304 DRB1_1305 DRB1_1406 DPA10103-DPB15001 DPA10105-DPB15001 DPA10401-DPB10301
IKVVPRRKAKIIRDYGK

SEQ ID NO: 3839 - protein, 18 aa, Human immunodeficiency virus 1
  source 1..18: note = HLAs: DRB1_0806 DRB1_1101 DRB1_1102 DRB1_1103 DRB1_1104 DRB1_1301 DRB1_1304 DRB1_1305
IKVVPRRKAKIIRDYGKQ

SEQ ID NO: 3840 - protein, 19 aa, Human immunodeficiency virus 1
  source 1..19: note = HLAs: DRB1_0301 DRB1_0804 DRB1_0806 DRB1_1101 DRB1_1102 DRB1_1103 DRB1_1104 DRB1_1301 DRB1_1304 DRB1_1305 DRB1_1406 DPA10103-DPB15001 DPA10105-DPB15001
IKVVPRRKAKIIRDYGKQM

SEQ ID NO: 3841 - protein, 20 aa, Human immunodeficiency virus 1
  source 1..20: note = HLAs: DRB1_0101 DRB1_0301 DRB1_0801 DRB1_0802 DRB1_0804 DRB1_0806 DRB1_0809 DRB1_1001 DRB1_1101 DRB1_1102 DRB1_1103 DRB1_1104 DRB1_1114 DRB1_1202 DRB1_1301 DRB1_1302 DRB1_1304 DRB1_1305 DRB1_1402 DRB1_1406 DRB1_1501 DRB1_1503 DPA10103-DPB10301 DPA10103-DPB10601 DPA10103-DPB112401 DPA10103-DPB11901 DPA10103-DPB12001 DPA10103-DPB15001 DPA10104-DPB10301 DPA10105-DPB10301 DPA10105-DPB15001 DPA10202-DPB10501 DPA10202-DPB110601 DPA10202-DPB11901 DPA10202-DPB13801 DPA10301-DPB110601 DPA10401-DPB10101 DPA10401-DPB10301 DPA10401-DPB10501 DPA10401-DPB11401 DQA10102-DQB10501
IKVVPRRKAKIIRDYGKQMA

SEQ ID NO: 3842 - protein, 21 aa, Human immunodeficiency virus 1
  source 1..21: note = HLAs: DRB1_0301 DRB1_0801 DRB1_0804 DRB1_0806 DRB1_1101 DRB1_1102 DRB1_1103 DRB1_1104 DRB1_1114 DRB1_1301 DRB1_1302 DRB1_1304 DRB1_1305 DRB1_1406 DRB1_1501 DPA10103-DPB15001 DPA10105-DPB15001 DPA10401-DPB10301
IKVVPRRKAKIIRDYGKQMAG

SEQ ID NO: 3843 - protein, 22 aa, Human immunodeficiency virus 1
  source 1..22: note = HLAs: DRB1_0301 DRB1_0801 DRB1_0804 DRB1_0806 DRB1_1101 DRB1_1102 DRB1_1103 DRB1_1104 DRB1_1114 DRB1_1301 DRB1_1302 DRB1_1304 DRB1_1305 DRB1_1406 DRB1_1501 DPA10103-DPB15001 DPA10105-DPB15001 DPA10401-DPB10101 DPA10401-DPB10301
IKVVPRRKAKIIRDYGKQMAGD

SEQ ID NO: 3844 - protein, 23 aa, Human immunodeficiency virus 1
  source 1..23: note = HLAs: DRB1_0301 DRB1_0801 DRB1_0804 DRB1_0806 DRB1_1101 DRB1_1102 DRB1_1103 DRB1_1104 DRB1_1114 DRB1_1301 DRB1_1302 DRB1_1304 DRB1_1305 DRB1_1406 DRB1_1501 DPA10103-DPB15001 DPA10105-DPB15001 DPA10401-DPB10101 DPA10401-DPB10301
IKVVPRRKAKIIRDYGKQMAGDD

SEQ ID NO: 3845 - protein, 24 aa, Human immunodeficiency virus 1
  source 1..24: note = HLAs: DRB1_0301 DRB1_0801 DRB1_0804 DRB1_0806 DRB1_1101 DRB1_1102 DRB1_1103 DRB1_1104 DRB1_1114 DRB1_1301 DRB1_1302 DRB1_1304 DRB1_1305 DRB1_1406 DRB1_1501 DPA10103-DPB15001 DPA10105-DPB15001 DPA10401-DPB10101 DPA10401-DPB10301 DQA10102-DQB10501
IKVVPRRKAKIIRDYGKQMAGDDC

SEQ ID NO: 3846 - protein, 25 aa, Human immunodeficiency virus 1
  source 1..25: note = HLAs: DRB1_0301 DRB1_0801 DRB1_0804 DRB1_0806 DRB1_1101 DRB1_1102 DRB1_1103 DRB1_1104 DRB1_1114 DRB1_1301 DRB1_1302 DRB1_1304 DRB1_1305 DRB1_1406 DRB1_1501 DPA10103-DPB15001 DPA10105-DPB15001 DPA10401-DPB10101 DPA10401-DPB10301 DQA10102-DQB10501
IKVVPRRKAKIIRDYGKQMAGDDCV

SEQ ID NO: 3847 - protein, 13 aa, Human immunodeficiency virus 1
  source 1..13: note = HLAs: DRB1_0806 DRB1_1101 DRB1_1102 DRB1_1103 DRB1_1104 DRB1_1114 DRB1_1301 DRB1_1302 DRB1_1304 DRB1_1305 DRB1_1406 DQA10102-DQB10501
ILGLNKIVRMYSP

SEQ ID NO: 3848 - protein, 14 aa, Human immunodeficiency virus 1
  source 1..14: note = HLAs: DRB1_0101 DRB1_0802 DRB1_0804 DRB1_0806 DRB1_0809 DRB1_0813 DRB1_1101 DRB1_1102 DRB1_1103 DRB1_1104 DRB1_1114 DRB1_1301 DRB1_1302 DRB1_1304 DRB1_1305 DRB1_1402 DRB1_1406 DPA10301-DPB11801 DQA10102-DQB10501 DQA10103-DQB10501
ILGLNKIVRMYSPV

SEQ ID NO: 3849 - protein, 15 aa, Human immunodeficiency virus 1
  source 1..15: note = HLAs: DRB1_0101 DRB1_0102 DRB1_0401 DRB1_0402 DRB1_0404 DRB1_0405 DRB1_0408 DRB1_0410 DRB1_0701 DRB1_0801 DRB1_0802 DRB1_0803 DRB1_0804 DRB1_0806 DRB1_0809 DRB1_0813 DRB1_0901 DRB1_1001 DRB1_1101 DRB1_1102 DRB1_1103 DRB1_1104 DRB1_1114 DRB1_1201 DRB1_1202 DRB1_1301 DRB1_1302 DRB1_1303 DRB1_1304 DRB1_1305 DRB1_1312 DRB1_1401 DRB1_1402 DRB1_1403 DRB1_1404 DRB1_1405 DRB1_1406 DRB1_1418 DRB1_1454 DRB1_1501 DRB1_1502 DRB1_1503 DRB1_1601 DRB1_1602 DPA10103-DPB11501 DPA10104-DPB11501 DPA10301-DPB10201 DPA10301-DPB10202 DPA10301-DPB11801 DPA10301-DPB14001 DPA10401-DPB10101 DPA10401-DPB10201 DQA10102-DQB10501 DQA10102-DQB10503 DQA10102-DQB10601 DQA10102-DQB10602 DQA10103-DQB10501 DQA10103-DQB10601 DQA10103-DQB10602 DQA10103-DQB10609 DQA10505-DQB10402
ILGLNKIVRMYSPVS

SEQ ID NO: 3850 - protein, 16 aa, Human immunodeficiency virus 1
  source 1..16: note = HLAs: DRB1_0101 DRB1_0102 DRB1_0401 DRB1_0402 DRB1_0404 DRB1_0405 DRB1_0408 DRB1_0410 DRB1_0701 DRB1_0801 DRB1_0802 DRB1_0803 DRB1_0804 DRB1_0806 DRB1_0809 DRB1_0813 DRB1_0901 DRB1_1001 DRB1_1101 DRB1_1102 DRB1_1103 DRB1_1104 DRB1_1114 DRB1_1201 DRB1_1202 DRB1_1301 DRB1_1302 DRB1_1303 DRB1_1304 DRB1_1305 DRB1_1312 DRB1_1401 DRB1_1402 DRB1_1403 DRB1_1404 DRB1_1405 DRB1_1406 DRB1_1454 DRB1_1501 DRB1_1502 DRB1_1503 DRB1_1601 DRB1_1602 DPA10103-DPB11501 DPA10104-DPB11501 DPA10202-DPB10101 DPA10202-DPB10501 DPA10202-DPB110601 DPA10202-DPB11901 DPA10202-DPB13101 DPA10202-DPB13801 DPA10202-DPB15501 DPA10301-DPB10101 DPA10301-DPB10201 DPA10301-DPB10202 DPA10301-DPB110601 DPA10301-DPB11801 DPA10301-DPB14001 DPA10301-DPB16501 DPA10401-DPB10101 DPA10401-DPB10201 DPA10401-DPB10202 DPA10401-DPB11301 DPA10401-DPB113301 DPA10401-DPB11401 DQA10102-DQB10501 DQA10102-DQB10503 DQA10102-DQB10601 DQA10102-DQB10602 DQA10102-DQB10609 DQA10102-DQB10611 DQA10103-DQB10501 DQA10103-DQB10503 DQA10103-DQB10601; note = HLAs: DQA10103-DQB10602 DQA10103-DQB10604 DQA10103-DQB10608 DQA10103-DQB10609 DQA10501-DQB10501 DQA10505-DQB10402 DQA10505-DQB10501
ILGLNKIVRMYSPVSI

SEQ ID NO: 3851 - protein, 17 aa, Human immunodeficiency virus 1
  source 1..17: note = HLAs: DRB1_0101 DRB1_0102 DRB1_0401 DRB1_0402 DRB1_0403 DRB1_0404 DRB1_0405 DRB1_0406 DRB1_0407 DRB1_0408 DRB1_0410 DRB1_0701 DRB1_0801 DRB1_0802 DRB1_0803 DRB1_0804 DRB1_0806 DRB1_0809 DRB1_0813 DRB1_0901 DRB1_1001 DRB1_1101 DRB1_1102 DRB1_1103 DRB1_1104 DRB1_1114 DRB1_1201 DRB1_1202 DRB1_1301 DRB1_1302 DRB1_1303 DRB1_1304 DRB1_1305 DRB1_1312 DRB1_1401 DRB1_1402 DRB1_1403 DRB1_1404 DRB1_1405 DRB1_1406 DRB1_1454 DRB1_1501 DRB1_1502 DRB1_1503 DRB1_1601 DRB1_1602 DPA10103-DPB10101 DPA10103-DPB10201 DPA10103-DPB10202 DPA10103-DPB10301 DPA10103-DPB10501 DPA10103-DPB10601 DPA10103-DPB10901 DPA10103-DPB11001 DPA10103-DPB11101 DPA10103-DPB112401 DPA10103-DPB11301 DPA10103-DPB113101 DPA10103-DPB113301 DPA10103-DPB11401 DPA10103-DPB11501 DPA10103-DPB11601 DPA10103-DPB11701 DPA10103-DPB11801 DPA10103-DPB11901 DPA10103-DPB12001 DPA10103-DPB12101 DPA10103-DPB12901 DPA10103-DPB13001 DPA10103-DPB13101 DPA10103-DPB13401 DPA10103-DPB14001 DPA10103-DPB14801 DPA10103-DPB15001 DPA10103-DPB15501; note = HLAs: DPA10104-DPB10101 DPA10104-DPB10301 DPA10104-DPB11001 DPA10104-DPB11301 DPA10104-DPB11501 DPA10105-DPB10101 DPA10105-DPB10301 DPA10105-DPB11801 DPA10105-DPB15001 DPA10201-DPB110601 DPA10201-DPB11401 DPA10201-DPB11501 DPA10201-DPB11901 DPA10201-DPB15501 DPA10202-DPB10101 DPA10202-DPB10201 DPA10202-DPB10202 DPA10202-DPB10301 DPA10202-DPB10501 DPA10202-DPB10901 DPA10202-DPB110601 DPA10202-DPB11101 DPA10202-DPB11301 DPA10202-DPB113101 DPA10202-DPB11401 DPA10202-DPB11701 DPA10202-DPB11801 DPA10202-DPB11901 DPA10202-DPB12101 DPA10202-DPB12901 DPA10202-DPB13001 DPA10202-DPB13101 DPA10202-DPB13801 DPA10202-DPB14501 DPA10202-DPB15501 DPA10202-DPB16501 DPA10202-DPB18501 DPA10301-DPB10101 DPA10301-DPB10201 DPA10301-DPB10202 DPA10301-DPB10301 DPA10301-DPB10401 DPA10301-DPB10402 DPA10301-DPB10901 DPA10301-DPB110501 DPA10301-DPB110601 DPA10301-DPB11101 DPA10301-DPB11301 DPA10301-DPB11701 DPA10301-DPB11801 DPA10301-DPB12301 DPA10301-DPB13901 DPA10301-DPB14001 DPA10301-DPB14901; note = HLAs: DPA10301-DPB15501 DPA10301-DPB16501 DPA10301-DPB17501 DPA10301-DPB18001 DPA10401-DPB10101 DPA10401-DPB10201 DPA10401-DPB10202 DPA10401-DPB10301 DPA10401-DPB10402 DPA10401-DPB10501 DPA10401-DPB110501 DPA10401-DPB11301 DPA10401-DPB113301 DPA10401-DPB11401 DPA10401-DPB14901 DQA10102-DQB10501 DQA10102-DQB10503 DQA10102-DQB10601 DQA10102-DQB10602 DQA10102-DQB10609 DQA10103-DQB10501 DQA10103-DQB10503 DQA10103-DQB10601 DQA10103-DQB10602 DQA10103-DQB10604 DQA10103-DQB10608 DQA10103-DQB10609 DQA10501-DQB10501 DQA10505-DQB10402 DQA10505-DQB10501
ILGLNKIVRMYSPVSIL

SEQ ID NO: 3852 - protein, 18 aa, Human immunodeficiency virus 1
  source 1..18: note = HLAs: DRB1_0101 DRB1_0102 DRB1_0401 DRB1_0404 DRB1_0405 DRB1_0408 DRB1_0410 DRB1_0701 DRB1_0802 DRB1_0804 DRB1_0806 DRB1_0809 DRB1_0813 DRB1_0901 DRB1_1001 DRB1_1101 DRB1_1102 DRB1_1103 DRB1_1104 DRB1_1114 DRB1_1301 DRB1_1302 DRB1_1304 DRB1_1305 DRB1_1402 DRB1_1406 DRB1_1501 DRB1_1502 DRB1_1503 DRB1_1601 DRB1_1602 DPA10103-DPB10101 DPA10103-DPB10301 DPA10103-DPB10601 DPA10103-DPB10901 DPA10103-DPB11101 DPA10103-DPB112401 DPA10103-DPB11401 DPA10103-DPB11501 DPA10103-DPB11901 DPA10103-DPB12001 DPA10103-DPB12901 DPA10103-DPB13101 DPA10103-DPB15001 DPA10103-DPB15501 DPA10104-DPB10101 DPA10104-DPB10301 DPA10104-DPB11501 DPA10105-DPB10101 DPA10105-DPB10301 DPA10105-DPB15001 DPA10202-DPB10101 DPA10202-DPB110601 DPA10202-DPB11301 DPA10202-DPB11901 DPA10202-DPB15501 DPA10301-DPB10101 DPA10301-DPB10201 DPA10301-DPB10202 DPA10301-DPB10301 DPA10301-DPB10401 DPA10301-DPB10901 DPA10301-DPB110601 DPA10301-DPB11101 DPA10301-DPB11301 DPA10301-DPB11701 DPA10301-DPB11801 DPA10301-DPB12301; note = HLAs: DPA10301-DPB13901 DPA10301-DPB14001 DPA10301-DPB15501 DPA10301-DPB16501 DPA10401-DPB10101 DPA10401-DPB10201 DPA10401-DPB10202 DPA10401-DPB10301 DPA10401-DPB10501 DPA10401-DPB11301 DPA10401-DPB113301 DPA10401-DPB11401 DQA10102-DQB10501 DQA10102-DQB10503 DQA10102-DQB10609 DQA10103-DQB10501 DQA10103-DQB10503 DQA10103-DQB10601 DQA10103-DQB10609 DQA10505-DQB10402
ILGLNKIVRMYSPVSILD

SEQ ID NO: 3853 - protein, 19 aa, Human immunodeficiency virus 1
  source 1..19: note = HLAs: DRB1_0101 DRB1_0102 DRB1_0401 DRB1_0402 DRB1_0404 DRB1_0405 DRB1_0407 DRB1_0408 DRB1_0410 DRB1_0701 DRB1_0801 DRB1_0802 DRB1_0803 DRB1_0804 DRB1_0806 DRB1_0809 DRB1_0813 DRB1_0901 DRB1_1001 DRB1_1101 DRB1_1102 DRB1_1103 DRB1_1104 DRB1_1114 DRB1_1201 DRB1_1202 DRB1_1301 DRB1_1302 DRB1_1304 DRB1_1305 DRB1_1312 DRB1_1401 DRB1_1402 DRB1_1403 DRB1_1404 DRB1_1405 DRB1_1406 DRB1_1454 DRB1_1501 DRB1_1502 DRB1_1503 DRB1_1601 DRB1_1602 DPA10103-DPB10101 DPA10103-DPB10201 DPA10103-DPB10202 DPA10103-DPB10301 DPA10103-DPB10401 DPA10103-DPB10501 DPA10103-DPB10601 DPA10103-DPB10901 DPA10103-DPB11001 DPA10103-DPB11101 DPA10103-DPB112401 DPA10103-DPB112601 DPA10103-DPB11301 DPA10103-DPB113101 DPA10103-DPB113301 DPA10103-DPB11401 DPA10103-DPB11501 DPA10103-DPB11601 DPA10103-DPB11701 DPA10103-DPB11801 DPA10103-DPB11901 DPA10103-DPB12001 DPA10103-DPB12101 DPA10103-DPB12301 DPA10103-DPB12901 DPA10103-DPB13001 DPA10103-DPB13101 DPA10103-DPB13401 DPA10103-DPB13901 DPA10103-DPB14001 DPA10103-DPB14101; note = HLAs: DPA10103-DPB14801 DPA10103-DPB15001 DPA10103-DPB15501 DPA10104-DPB10101 DPA10104-DPB10301 DPA10104-DPB11001 DPA10104-DPB11301 DPA10104-DPB11501 DPA10105-DPB10101 DPA10105-DPB10301 DPA10105-DPB10401 DPA10105-DPB11801 DPA10105-DPB15001 DPA10106-DPB10101 DPA10106-DPB11101 DPA10201-DPB10101 DPA10201-DPB10301 DPA10201-DPB10601 DPA10201-DPB10901 DPA10201-DPB110601 DPA10201-DPB11101 DPA10201-DPB11301 DPA10201-DPB113301 DPA10201-DPB11401 DPA10201-DPB11501 DPA10201-DPB11601 DPA10201-DPB11901 DPA10201-DPB13001 DPA10201-DPB14501 DPA10201-DPB15501 DPA10201-DPB19101 DPA10202-DPB10101 DPA10202-DPB10201 DPA10202-DPB10202 DPA10202-DPB10301 DPA10202-DPB10401 DPA10202-DPB10501 DPA10202-DPB10901 DPA10202-DPB110601 DPA10202-DPB11101 DPA10202-DPB11301 DPA10202-DPB113101 DPA10202-DPB11401 DPA10202-DPB11701 DPA10202-DPB11801 DPA10202-DPB11901 DPA10202-DPB12101 DPA10202-DPB12901 DPA10202-DPB13001 DPA10202-DPB13101 DPA10202-DPB13801 DPA10202-DPB14501 DPA10202-DPB15501 DPA10202-DPB16501 DPA10202-DPB18501; note = HLAs: DPA10301-DPB10101 DPA10301-DPB10201 DPA10301-DPB10202 DPA10301-DPB10301 DPA10301-DPB10401 DPA10301-DPB10402 DPA10301-DPB10901 DPA10301-DPB110501 DPA10301-DPB110601 DPA10301-DPB11101 DPA10301-DPB11301 DPA10301-DPB11701 DPA10301-DPB11801 DPA10301-DPB12301 DPA10301-DPB13901 DPA10301-DPB14001 DPA10301-DPB14901 DPA10301-DPB15501 DPA10301-DPB16501 DPA10301-DPB17501 DPA10301-DPB18001 DPA10401-DPB10101 DPA10401-DPB10201 DPA10401-DPB10202 DPA10401-DPB10301 DPA10401-DPB10402 DPA10401-DPB10501 DPA10401-DPB110501 DPA10401-DPB11301 DPA10401-DPB113301 DPA10401-DPB11401 DPA10401-DPB14901 DQA10102-DQB10501 DQA10102-DQB10503 DQA10102-DQB10601 DQA10102-DQB10602 DQA10102-DQB10604 DQA10102-DQB10609 DQA10102-DQB10611 DQA10103-DQB10501 DQA10103-DQB10503 DQA10103-DQB10601 DQA10103-DQB10602 DQA10103-DQB10604 DQA10103-DQB10608 DQA10103-DQB10609 DQA10201-DQB10301 DQA10201-DQB10303 DQA10501-DQB10501 DQA10505-DQB10402 DQA10505-DQB10501
ILGLNKIVRMYSPVSILDI

SEQ ID NO: 3854 - protein, 13 aa, Human immunodeficiency virus 1
  source 1..13: note = HLAs: DRB1_1001 DQA10102-DQB10501
ILVAVHVASGYIE

SEQ ID NO: 3855 - protein, 14 aa, Human immunodeficiency virus 1
  source 1..14: note = HLAs: DRB1_0404 DRB1_0701 DRB1_0901 DRB1_1001 DQA10102-DQB10501 DQA10103-DQB10501 DQA10103-DQB10601 DQA10201-DQB10301 DQA10201-DQB10303 DQA10506-DQB10303
ILVAVHVASGYIEA

SEQ ID NO: 3856 - protein, 15 aa, Human immunodeficiency virus 1
  source 1..15: note = HLAs: DRB1_0101 DRB1_0102 DRB1_0404 DRB1_0408 DRB1_0410 DRB1_0701 DRB1_0802 DRB1_0804 DRB1_0806 DRB1_0809 DRB1_0813 DRB1_0901 DRB1_1001 DRB1_1102 DRB1_1114 DRB1_1301 DRB1_1302 DRB1_1304 DRB1_1401 DRB1_1404 DRB1_1406 DRB1_1454 DRB1_1501 DRB1_1602 DPA10103-DPB11501 DPA10104-DPB11501 DPA10301-DPB10101 DPA10301-DPB10202 DPA10301-DPB11801 DPA10401-DPB10101 DQA10102-DQB10501 DQA10102-DQB10503 DQA10102-DQB10601 DQA10102-DQB10602 DQA10102-DQB10609 DQA10102-DQB10611 DQA10103-DQB10501 DQA10103-DQB10601 DQA10103-DQB10602 DQA10103-DQB10609 DQA10201-DQB10201 DQA10201-DQB10202 DQA10201-DQB10301 DQA10201-DQB10302 DQA10201-DQB10303 DQA10301-DQB10301 DQA10301-DQB10304 DQA10302-DQB10301 DQA10302-DQB10304 DQA10303-DQB10301 DQA10303-DQB10304 DQA10401-DQB10301 DQA10401-DQB10319 DQA10501-DQB10201 DQA10501-DQB10203 DQA10501-DQB10301 DQA10501-DQB10319 DQA10503-DQB10301 DQA10505-DQB10201 DQA10505-DQB10202 DQA10505-DQB10301 DQA10505-DQB10302 DQA10505-DQB10309 DQA10505-DQB10319 DQA10505-DQB10402; note = HLAs: DQA10506-DQB10303 DQA10508-DQB10301 DQA10509-DQB10301 DQA10601-DQB10301
ILVAVHVASGYIEAE

SEQ ID NO: 3857 - protein, 16 aa, Human immunodeficiency virus 1
  source 1..16: note = HLAs: DRB1_0101 DRB1_0404 DRB1_0701 DRB1_0901 DRB1_1001 DRB1_1102 DRB1_1301 DPA10103-DPB11501 DPA10104-DPB11501 DPA10301-DPB10101 DPA10301-DPB10201 DPA10301-DPB10202 DPA10301-DPB11801 DPA10301-DPB14001 DPA10401-DPB10101 DPA10401-DPB10201 DQA10102-DQB10501 DQA10102-DQB10503 DQA10102-DQB10601 DQA10102-DQB10602 DQA10102-DQB10604 DQA10102-DQB10609 DQA10102-DQB10611 DQA10103-DQB10501 DQA10103-DQB10601 DQA10103-DQB10602 DQA10103-DQB10609 DQA10201-DQB10201 DQA10201-DQB10202 DQA10201-DQB10301 DQA10201-DQB10302 DQA10201-DQB10303 DQA10301-DQB10301 DQA10301-DQB10302 DQA10301-DQB10303 DQA10301-DQB10304 DQA10301-DQB10305 DQA10302-DQB10301 DQA10302-DQB10302 DQA10302-DQB10303 DQA10302-DQB10304 DQA10303-DQB10301 DQA10303-DQB10302 DQA10303-DQB10303 DQA10303-DQB10304 DQA10401-DQB10201 DQA10401-DQB10301 DQA10401-DQB10319 DQA10401-DQB10402 DQA10402-DQB10402 DQA10501-DQB10201 DQA10501-DQB10203 DQA10501-DQB10301 DQA10501-DQB10319 DQA10503-DQB10301 DQA10505-DQB10201 DQA10505-DQB10202 DQA10505-DQB10301; note = HLAs: DQA10505-DQB10302 DQA10505-DQB10309 DQA10505-DQB10319 DQA10505-DQB10402 DQA10506-DQB10303 DQA10508-DQB10301 DQA10509-DQB10301 DQA10601-DQB10301
ILVAVHVASGYIEAEV

SEQ ID NO: 3858 - protein, 17 aa, Human immunodeficiency virus 1
  source 1..17: note = HLAs: DRB1_0101 DRB1_0404 DRB1_0701 DRB1_0901 DRB1_1001 DRB1_1102 DRB1_1301 DRB1_1406 DPA10103-DPB11501 DPA10104-DPB11501 DPA10202-DPB10101 DPA10301-DPB10101 DPA10301-DPB10201 DPA10301-DPB10202 DPA10301-DPB110601 DPA10301-DPB11801 DPA10301-DPB14001 DPA10301-DPB16501 DPA10401-DPB10101 DPA10401-DPB10201 DPA10401-DPB10202 DQA10102-DQB10501 DQA10102-DQB10503 DQA10102-DQB10601 DQA10102-DQB10602 DQA10102-DQB10604 DQA10102-DQB10609 DQA10102-DQB10611 DQA10103-DQB10501 DQA10103-DQB10601 DQA10103-DQB10602 DQA10103-DQB10609 DQA10201-DQB10201 DQA10201-DQB10202 DQA10201-DQB10301 DQA10201-DQB10302 DQA10201-DQB10303 DQA10301-DQB10301 DQA10301-DQB10302 DQA10301-DQB10304 DQA10301-DQB10305 DQA10302-DQB10301 DQA10302-DQB10302 DQA10302-DQB10304 DQA10303-DQB10301 DQA10303-DQB10302 DQA10303-DQB10304 DQA10401-DQB10201 DQA10401-DQB10301 DQA10401-DQB10319 DQA10401-DQB10402 DQA10402-DQB10402 DQA10501-DQB10201 DQA10501-DQB10203 DQA10501-DQB10301 DQA10501-DQB10319 DQA10503-DQB10301 DQA10505-DQB10201; note = HLAs: DQA10505-DQB10202 DQA10505-DQB10301 DQA10505-DQB10302 DQA10505-DQB10309 DQA10505-DQB10319 DQA10505-DQB10402 DQA10506-DQB10303 DQA10508-DQB10301 DQA10509-DQB10301 DQA10601-DQB10301
ILVAVHVASGYIEAEVI

SEQ ID NO: 3859 - protein, 18 aa, Human immunodeficiency virus 1
  source 1..18: note = HLAs: DPA10301-DPB10101 DPA10401-DPB10101 DQA10102-DQB10501 DQA10102-DQB10503 DQA10102-DQB10601 DQA10102-DQB10609 DQA10102-DQB10611 DQA10103-DQB10501 DQA10103-DQB10609 DQA10201-DQB10201 DQA10201-DQB10202 DQA10201-DQB10301 DQA10201-DQB10302 DQA10201-DQB10303 DQA10301-DQB10301 DQA10301-DQB10302 DQA10301-DQB10304 DQA10302-DQB10301 DQA10302-DQB10302 DQA10302-DQB10304 DQA10303-DQB10301 DQA10303-DQB10302 DQA10303-DQB10304 DQA10401-DQB10201 DQA10401-DQB10301 DQA10401-DQB10319 DQA10401-DQB10402 DQA10402-DQB10402 DQA10501-DQB10201 DQA10501-DQB10203 DQA10501-DQB10301 DQA10501-DQB10319 DQA10503-DQB10301 DQA10505-DQB10201 DQA10505-DQB10202 DQA10505-DQB10301 DQA10505-DQB10302 DQA10505-DQB10309 DQA10505-DQB10319 DQA10506-DQB10303 DQA10508-DQB10301 DQA10509-DQB10301 DQA10601-DQB10301
ILVAVHVASGYIEAEVIP

SEQ ID NO: 3860 - protein, 19 aa, Human immunodeficiency virus 1
  source 1..19: note = HLAs: DRB1_0101 DRB1_0408 DRB1_0701 DRB1_0901 DRB1_1001 DPA10103-DPB11501 DPA10104-DPB11501 DPA10202-DPB10101 DPA10301-DPB10101 DPA10301-DPB10201 DPA10301-DPB10202 DPA10301-DPB10401 DPA10301-DPB110601 DPA10301-DPB11801 DPA10301-DPB12301 DPA10301-DPB13901 DPA10301-DPB14001 DPA10301-DPB16501 DPA10401-DPB10101 DPA10401-DPB10201 DPA10401-DPB10202 DQA10102-DQB10501 DQA10102-DQB10502 DQA10102-DQB10503 DQA10102-DQB10601 DQA10102-DQB10602 DQA10102-DQB10604 DQA10102-DQB10609 DQA10102-DQB10610 DQA10102-DQB10611 DQA10103-DQB10501 DQA10103-DQB10601 DQA10103-DQB10609 DQA10201-DQB10201 DQA10201-DQB10202 DQA10201-DQB10301 DQA10201-DQB10302 DQA10201-DQB10303 DQA10301-DQB10301 DQA10301-DQB10302 DQA10301-DQB10303 DQA10301-DQB10304 DQA10301-DQB10305 DQA10302-DQB10301 DQA10302-DQB10302 DQA10302-DQB10303 DQA10302-DQB10304 DQA10303-DQB10301 DQA10303-DQB10302 DQA10303-DQB10303 DQA10303-DQB10304 DQA10401-DQB10201 DQA10401-DQB10301 DQA10401-DQB10319 DQA10401-DQB10402 DQA10402-DQB10402 DQA10501-DQB10201; note = HLAs: DQA10501-DQB10203 DQA10501-DQB10301 DQA10501-DQB10319 DQA10503-DQB10301 DQA10505-DQB10201 DQA10505-DQB10202 DQA10505-DQB10301 DQA10505-DQB10302 DQA10505-DQB10309 DQA10505-DQB10319 DQA10505-DQB10402 DQA10506-DQB10303 DQA10508-DQB10301 DQA10509-DQB10301 DQA10601-DQB10301
ILVAVHVASGYIEAEVIPA

SEQ ID NO: 3861 - protein, 20 aa, Human immunodeficiency virus 1
  source 1..20: note = HLAs: DRB1_0101 DRB1_0401 DRB1_0404 DRB1_0405 DRB1_0408 DRB1_0701 DRB1_0813 DRB1_0901 DRB1_1001 DRB1_1102 DRB1_1301 DRB1_1406 DRB1_1602 DPA10103-DPB10101 DPA10103-DPB11501 DPA10103-DPB15001 DPA10104-DPB10101 DPA10104-DPB11501 DPA10105-DPB10101 DPA10105-DPB15001 DPA10201-DPB11501 DPA10202-DPB10101 DPA10202-DPB110601 DPA10202-DPB11901 DPA10301-DPB10101 DPA10301-DPB10201 DPA10301-DPB10202 DPA10301-DPB10401 DPA10301-DPB110601 DPA10301-DPB11101 DPA10301-DPB11801 DPA10301-DPB12301 DPA10301-DPB13901 DPA10301-DPB14001 DPA10301-DPB15501 DPA10301-DPB16501 DPA10401-DPB10101 DPA10401-DPB10201 DPA10401-DPB10202 DPA10401-DPB10301 DPA10401-DPB10501 DPA10401-DPB11301 DPA10401-DPB113301 DPA10401-DPB11401 DQA10101-DQB10501 DQA10101-DQB10601 DQA10102-DQB10501 DQA10102-DQB10502 DQA10102-DQB10503 DQA10102-DQB10601 DQA10102-DQB10602 DQA10102-DQB10604 DQA10102-DQB10609 DQA10102-DQB10610 DQA10102-DQB10611 DQA10103-DQB10501 DQA10103-DQB10503 DQA10103-DQB10601 DQA10103-DQB10602 DQA10103-DQB10604; note = HLAs: DQA10103-DQB10608 DQA10103-DQB10609 DQA10104-DQB10501 DQA10105-DQB10501 DQA10201-DQB10201 DQA10201-DQB10202 DQA10201-DQB10301 DQA10201-DQB10302 DQA10201-DQB10303 DQA10301-DQB10301 DQA10301-DQB10302 DQA10301-DQB10303 DQA10301-DQB10304 DQA10301-DQB10305 DQA10302-DQB10301 DQA10302-DQB10302 DQA10302-DQB10303 DQA10302-DQB10304 DQA10303-DQB10301 DQA10303-DQB10302 DQA10303-DQB10303 DQA10303-DQB10304 DQA10401-DQB10201 DQA10401-DQB10301 DQA10401-DQB10319 DQA10401-DQB10402 DQA10402-DQB10402 DQA10501-DQB10201 DQA10501-DQB10203 DQA10501-DQB10301 DQA10501-DQB10319 DQA10503-DQB10301 DQA10505-DQB10201 DQA10505-DQB10202 DQA10505-DQB10301 DQA10505-DQB10302 DQA10505-DQB10309 DQA10505-DQB10319 DQA10505-DQB10402 DQA10506-DQB10303 DQA10508-DQB10301 DQA10509-DQB10301 DQA10601-DQB10301
ILVAVHVASGYIEAEVIPAE

SEQ ID NO: 3862 - protein, 21 aa, Human immunodeficiency virus 1
  source 1..21: note = HLAs: DRB1_0101 DRB1_0401 DRB1_0404 DRB1_0405 DRB1_0408 DRB1_0701 DRB1_0901 DRB1_1001 DPA10103-DPB10101 DPA10103-DPB11501 DPA10104-DPB10101 DPA10104-DPB11501 DPA10105-DPB10101 DPA10301-DPB10101 DPA10301-DPB10201 DPA10301-DPB10202 DPA10301-DPB10401 DPA10301-DPB110601 DPA10301-DPB11801 DPA10301-DPB12301 DPA10301-DPB13901 DPA10301-DPB14001 DPA10301-DPB16501 DPA10401-DPB10101 DPA10401-DPB10201 DPA10401-DPB10202 DQA10102-DQB10501 DQA10102-DQB10502 DQA10102-DQB10503 DQA10102-DQB10601 DQA10102-DQB10604 DQA10102-DQB10609 DQA10102-DQB10611 DQA10103-DQB10501 DQA10103-DQB10601 DQA10103-DQB10609 DQA10201-DQB10201 DQA10201-DQB10202 DQA10201-DQB10301 DQA10201-DQB10302 DQA10201-DQB10303 DQA10301-DQB10301 DQA10301-DQB10302 DQA10301-DQB10304 DQA10302-DQB10301 DQA10302-DQB10302 DQA10302-DQB10304 DQA10303-DQB10301 DQA10303-DQB10302 DQA10303-DQB10304 DQA10401-DQB10201 DQA10401-DQB10301 DQA10401-DQB10319 DQA10401-DQB10402 DQA10402-DQB10402 DQA10501-DQB10201 DQA10501-DQB10203 DQA10501-DQB10301; note = HLAs: DQA10501-DQB10319 DQA10503-DQB10301 DQA10505-DQB10201 DQA10505-DQB10202 DQA10505-DQB10301 DQA10505-DQB10302 DQA10505-DQB10309 DQA10505-DQB10319 DQA10506-DQB10303 DQA10508-DQB10301 DQA10509-DQB10301 DQA10601-DQB10301
ILVAVHVASGYIEAEVIPAET

SEQ ID NO: 3863 - protein, 22 aa, Human immunodeficiency virus 1
  source 1..22: note = HLAs: DRB1_0101 DRB1_0401 DRB1_0404 DRB1_0405 DRB1_0408 DRB1_0701 DRB1_0813 DRB1_0901 DRB1_1001 DPA10103-DPB10101 DPA10103-DPB11501 DPA10104-DPB10101 DPA10104-DPB11501 DPA10105-DPB10101 DPA10301-DPB10101 DPA10301-DPB10201 DPA10301-DPB10202 DPA10301-DPB110601 DPA10301-DPB11801 DPA10301-DPB14001 DPA10301-DPB16501 DPA10401-DPB10101 DPA10401-DPB10201 DPA10401-DPB10202 DQA10102-DQB10501 DQA10102-DQB10502 DQA10102-DQB10503 DQA10102-DQB10601 DQA10102-DQB10604 DQA10102-DQB10609 DQA10102-DQB10611 DQA10103-DQB10501 DQA10103-DQB10601 DQA10103-DQB10609 DQA10201-DQB10201 DQA10201-DQB10202 DQA10201-DQB10301 DQA10201-DQB10302 DQA10201-DQB10303 DQA10301-DQB10301 DQA10301-DQB10302 DQA10301-DQB10304 DQA10302-DQB10301 DQA10302-DQB10302 DQA10302-DQB10304 DQA10303-DQB10301 DQA10303-DQB10302 DQA10303-DQB10304 DQA10401-DQB10201 DQA10401-DQB10301 DQA10401-DQB10319 DQA10401-DQB10402 DQA10402-DQB10402 DQA10501-DQB10201 DQA10501-DQB10203 DQA10501-DQB10301 DQA10501-DQB10319 DQA10503-DQB10301 DQA10505-DQB10201; note = HLAs: DQA10505-DQB10202 DQA10505-DQB10301 DQA10505-DQB10302 DQA10505-DQB10309 DQA10505-DQB10319 DQA10506-DQB10303 DQA10508-DQB10301 DQA10509-DQB10301 DQA10601-DQB10301
ILVAVHVASGYIEAEVIPAETG

SEQ ID NO: 3864 - protein, 23 aa, Human immunodeficiency virus 1
  source 1..23: note = HLAs: DRB1_0101 DRB1_0401 DRB1_0404 DRB1_0405 DRB1_0408 DRB1_0701 DRB1_0813 DRB1_0901 DRB1_1001 DRB1_1602 DPA10103-DPB10101 DPA10103-DPB11501 DPA10104-DPB10101 DPA10104-DPB11501 DPA10105-DPB10101 DPA10202-DPB10101 DPA10301-DPB10101 DPA10301-DPB10201 DPA10301-DPB10202 DPA10301-DPB10401 DPA10301-DPB110601 DPA10301-DPB11801 DPA10301-DPB12301 DPA10301-DPB13901 DPA10301-DPB14001 DPA10301-DPB16501 DPA10401-DPB10101 DPA10401-DPB10201 DPA10401-DPB10202 DQA10102-DQB10501 DQA10102-DQB10502 DQA10102-DQB10503 DQA10102-DQB10601 DQA10102-DQB10604 DQA10102-DQB10609 DQA10102-DQB10611 DQA10103-DQB10501 DQA10103-DQB10601 DQA10103-DQB10609 DQA10201-DQB10201 DQA10201-DQB10202 DQA10201-DQB10301 DQA10201-DQB10302 DQA10201-DQB10303 DQA10301-DQB10301 DQA10301-DQB10302 DQA10301-DQB10304 DQA10302-DQB10301 DQA10302-DQB10302 DQA10302-DQB10304 DQA10303-DQB10301 DQA10303-DQB10302 DQA10303-DQB10304 DQA10401-DQB10201 DQA10401-DQB10301 DQA10401-DQB10319 DQA10401-DQB10402 DQA10402-DQB10402 DQA10501-DQB10201; note = HLAs: DQA10501-DQB10203 DQA10501-DQB10301 DQA10501-DQB10319 DQA10503-DQB10301 DQA10505-DQB10201 DQA10505-DQB10202 DQA10505-DQB10301 DQA10505-DQB10302 DQA10505-DQB10309 DQA10505-DQB10319 DQA10506-DQB10303 DQA10508-DQB10301 DQA10509-DQB10301 DQA10601-DQB10301
ILVAVHVASGYIEAEVIPAETGQ

SEQ ID NO: 3865 - protein, 24 aa, Human immunodeficiency virus 1
  source 1..24: note = HLAs: DRB1_0101 DRB1_0401 DRB1_0404 DRB1_0405 DRB1_0408 DRB1_0701 DRB1_0813 DRB1_0901 DRB1_1001 DRB1_1602 DPA10103-DPB10101 DPA10103-DPB11501 DPA10104-DPB10101 DPA10104-DPB11501 DPA10105-DPB10101 DPA10202-DPB10101 DPA10301-DPB10101 DPA10301-DPB10201 DPA10301-DPB10202 DPA10301-DPB10401 DPA10301-DPB110601 DPA10301-DPB11801 DPA10301-DPB12301 DPA10301-DPB13901 DPA10301-DPB14001 DPA10301-DPB16501 DPA10401-DPB10101 DPA10401-DPB10201 DPA10401-DPB10202 DQA10101-DQB10501 DQA10102-DQB10501 DQA10102-DQB10502 DQA10102-DQB10503 DQA10102-DQB10601 DQA10102-DQB10604 DQA10102-DQB10609 DQA10102-DQB10611 DQA10103-DQB10501 DQA10103-DQB10601 DQA10103-DQB10609 DQA10104-DQB10501 DQA10105-DQB10501 DQA10201-DQB10201 DQA10201-DQB10202 DQA10201-DQB10301 DQA10201-DQB10302 DQA10201-DQB10303 DQA10301-DQB10301 DQA10301-DQB10302 DQA10301-DQB10304 DQA10302-DQB10301 DQA10302-DQB10302 DQA10302-DQB10304 DQA10303-DQB10301 DQA10303-DQB10302 DQA10303-DQB10304 DQA10401-DQB10201 DQA10401-DQB10301 DQA10401-DQB10319; note = HLAs: DQA10401-DQB10402 DQA10402-DQB10402 DQA10501-DQB10201 DQA10501-DQB10203 DQA10501-DQB10301 DQA10501-DQB10319 DQA10503-DQB10301 DQA10505-DQB10201 DQA10505-DQB10202 DQA10505-DQB10301 DQA10505-DQB10302 DQA10505-DQB10309 DQA10505-DQB10319 DQA10506-DQB10303 DQA10508-DQB10301 DQA10509-DQB10301 DQA10601-DQB10301
ILVAVHVASGYIEAEVIPAETGQE

SEQ ID NO: 3866 - protein, 25 aa, Human immunodeficiency virus 1
  source 1..25: note = HLAs: DRB1_0101 DRB1_0401 DRB1_0404 DRB1_0405 DRB1_0408 DRB1_0701 DRB1_0813 DRB1_0901 DRB1_1001 DRB1_1602 DPA10103-DPB10101 DPA10103-DPB11501 DPA10104-DPB10101 DPA10104-DPB11501 DPA10105-DPB10101 DPA10202-DPB10101 DPA10301-DPB10101 DPA10301-DPB10201 DPA10301-DPB10202 DPA10301-DPB10401 DPA10301-DPB110601 DPA10301-DPB11801 DPA10301-DPB12301 DPA10301-DPB13901 DPA10301-DPB14001 DPA10301-DPB16501 DPA10401-DPB10101 DPA10401-DPB10201 DPA10401-DPB10202 DQA10101-DQB10501 DQA10102-DQB10501 DQA10102-DQB10502 DQA10102-DQB10503 DQA10102-DQB10601 DQA10102-DQB10602 DQA10102-DQB10604 DQA10102-DQB10609 DQA10102-DQB10611 DQA10103-DQB10501 DQA10103-DQB10601 DQA10103-DQB10609 DQA10104-DQB10501 DQA10105-DQB10501 DQA10201-DQB10201 DQA10201-DQB10202 DQA10201-DQB10301 DQA10201-DQB10302 DQA10201-DQB10303 DQA10301-DQB10301 DQA10301-DQB10302 DQA10301-DQB10304 DQA10302-DQB10301 DQA10302-DQB10302 DQA10302-DQB10304 DQA10303-DQB10301 DQA10303-DQB10302 DQA10303-DQB10304 DQA10401-DQB10201 DQA10401-DQB10301; note = HLAs: DQA10401-DQB10319 DQA10401-DQB10402 DQA10402-DQB10402 DQA10501-DQB10201 DQA10501-DQB10203 DQA10501-DQB10301 DQA10501-DQB10319 DQA10503-DQB10301 DQA10505-DQB10201 DQA10505-DQB10202 DQA10505-DQB10301 DQA10505-DQB10302 DQA10505-DQB10309 DQA10505-DQB10319 DQA10506-DQB10303 DQA10508-DQB10301 DQA10509-DQB10301 DQA10601-DQB10301
ILVAVHVASGYIEAEVIPAETGQET

SEQ ID NO: 3867 - protein, 20 aa, Human immunodeficiency virus 1
  source 1..20: note = HLAs: DRB1_0101 DRB1_0901 DQA10103-DQB10601 DQA10201-DQB10301 DQA10501-DQB10301 DQA10501-DQB10319 DQA10503-DQB10301 DQA10505-DQB10301 DQA10505-DQB10309 DQA10505-DQB10319 DQA10508-DQB10301 DQA10509-DQB10301
INLPGKWKPKMIGGIGGFIK

SEQ ID NO: 3868 - protein, 21 aa, Human immunodeficiency virus 1
  source 1..21: note = HLAs: DRB1_0101 DRB1_0901 DQA10201-DQB10301
INLPGKWKPKMIGGIGGFIKV

SEQ ID NO: 3869 - protein, 16 aa, Human immunodeficiency virus 1
  source 1..16: note = HLAs: DRB1_0404 DQA10102-DQB10501
INNETPGIRYQYNVLP

SEQ ID NO: 3870 - protein, 17 aa, Human immunodeficiency virus 1
  source 1..17: note = HLAs: DRB1_0101 DRB1_0401 DRB1_0404 DRB1_0405 DRB1_0408 DRB1_0410 DRB1_1001 DRB1_1501 DQA10102-DQB10501
INNETPGIRYQYNVLPQ

SEQ ID NO: 3871 - protein, 18 aa, Human immunodeficiency virus 1
  source 1..18: note = HLAs: DRB1_0404 DQA10102-DQB10501
INNETPGIRYQYNVLPQG

SEQ ID NO: 3872 - protein, 19 aa, Human immunodeficiency virus 1
  source 1..19: note = HLAs: DRB1_0101 DRB1_0401 DRB1_0404 DRB1_0405 DRB1_0408 DRB1_0410 DRB1_0813 DRB1_1001 DRB1_1114 DRB1_1302 DRB1_1501 DRB1_1602 DPA10301-DPB10101 DPA10301-DPB10201 DPA10301-DPB10202 DPA10401-DPB10101 DQA10102-DQB10501 DQA10102-DQB10503 DQA10103-DQB10501
INNETPGIRYQYNVLPQGW

SEQ ID NO: 3873 - protein, 20 aa, Human immunodeficiency virus 1
  source 1..20: note = HLAs: DRB1_0101 DRB1_0102 DRB1_0401 DRB1_0404 DRB1_0405 DRB1_0408 DRB1_0410 DRB1_0801 DRB1_0802 DRB1_0804 DRB1_0806 DRB1_0809 DRB1_0813 DRB1_1001 DRB1_1101 DRB1_1102 DRB1_1104 DRB1_1114 DRB1_1301 DRB1_1302 DRB1_1304 DRB1_1305 DRB1_1402 DRB1_1403 DRB1_1406 DRB1_1501 DRB1_1502 DRB1_1503 DRB1_1601 DRB1_1602 DPA10103-DPB10101 DPA10103-DPB11501 DPA10103-DPB13101 DPA10103-DPB15001 DPA10104-DPB10101 DPA10104-DPB11501 DPA10105-DPB10101 DPA10105-DPB15001 DPA10202-DPB10101 DPA10202-DPB110601 DPA10202-DPB11901 DPA10202-DPB13101 DPA10301-DPB10101 DPA10301-DPB10201 DPA10301-DPB10202 DPA10301-DPB110601 DPA10301-DPB11801 DPA10301-DPB14001 DPA10301-DPB15501 DPA10301-DPB16501 DPA10401-DPB10101 DPA10401-DPB10201 DPA10401-DPB10202 DPA10401-DPB10501 DQA10102-DQB10501 DQA10102-DQB10503 DQA10103-DQB10501
INNETPGIRYQYNVLPQGWK

SEQ ID NO: 3874 - protein, 21 aa, Human immunodeficiency virus 1
  source 1..21: note = HLAs: DRB1_0101 DRB1_0401 DRB1_0404 DRB1_0405 DRB1_0408 DRB1_0410 DRB1_0801 DRB1_0802 DRB1_0809 DRB1_0813 DRB1_1001 DRB1_1101 DRB1_1114 DRB1_1302 DRB1_1305 DRB1_1406 DRB1_1501 DRB1_1602 DPA10301-DPB10101 DPA10301-DPB10201 DPA10301-DPB10202 DPA10301-DPB110601 DPA10401-DPB10101 DQA10102-DQB10501 DQA10103-DQB10501
INNETPGIRYQYNVLPQGWKG

SEQ ID NO: 3875 - protein, 22 aa, Human immunodeficiency virus 1
  source 1..22: note = HLAs: DRB1_0101 DRB1_0102 DRB1_0401 DRB1_0404 DRB1_0405 DRB1_0408 DRB1_0410 DRB1_0801 DRB1_0802 DRB1_0809 DRB1_0813 DRB1_1001 DRB1_1101 DRB1_1102 DRB1_1104 DRB1_1114 DRB1_1301 DRB1_1302 DRB1_1304 DRB1_1305 DRB1_1402 DRB1_1406 DRB1_1501 DRB1_1601 DRB1_1602 DPA10301-DPB10101 DPA10301-DPB10201 DPA10301-DPB10202 DPA10301-DPB110601 DPA10401-DPB10101 DQA10102-DQB10501 DQA10102-DQB10503 DQA10103-DQB10501
INNETPGIRYQYNVLPQGWKGS

SEQ ID NO: 3876 - protein, 23 aa, Human immunodeficiency virus 1
  source 1..23: note = HLAs: DRB1_0101 DRB1_0102 DRB1_0401 DRB1_0404 DRB1_0405 DRB1_0408 DRB1_0410 DRB1_0801 DRB1_0802 DRB1_0806 DRB1_0809 DRB1_0813 DRB1_1001 DRB1_1101 DRB1_1102 DRB1_1104 DRB1_1114 DRB1_1301 DRB1_1302 DRB1_1304 DRB1_1305 DRB1_1402 DRB1_1406 DRB1_1501 DRB1_1601 DRB1_1602 DPA10301-DPB10101 DPA10301-DPB10201 DPA10301-DPB10202 DPA10301-DPB110601 DPA10301-DPB11801 DPA10401-DPB10101 DQA10102-DQB10501 DQA10102-DQB10503 DQA10103-DQB10501
INNETPGIRYQYNVLPQGWKGSP

SEQ ID NO: 3877 - protein, 24 aa, Human immunodeficiency virus 1
  source 1..24: note = HLAs: DRB1_0101 DRB1_0102 DRB1_0401 DRB1_0404 DRB1_0405 DRB1_0408 DRB1_0410 DRB1_0801 DRB1_0802 DRB1_0806 DRB1_0809 DRB1_0813 DRB1_1001 DRB1_1101 DRB1_1102 DRB1_1104 DRB1_1114 DRB1_1301 DRB1_1302 DRB1_1304 DRB1_1305 DRB1_1402 DRB1_1406 DRB1_1501 DRB1_1502 DRB1_1601 DRB1_1602 DPA10301-DPB10101 DPA10301-DPB10201 DPA10301-DPB10202 DPA10301-DPB110601 DPA10301-DPB11801 DPA10401-DPB10101 DQA10102-DQB10501 DQA10102-DQB10503 DQA10103-DQB10501
INNETPGIRYQYNVLPQGWKGSPA

SEQ ID NO: 3878 - protein, 25 aa, Human immunodeficiency virus 1
  source 1..25: note = HLAs: DRB1_0101 DRB1_0102 DRB1_0401 DRB1_0404 DRB1_0405 DRB1_0408 DRB1_0410 DRB1_0801 DRB1_0802 DRB1_0804 DRB1_0806 DRB1_0809 DRB1_0813 DRB1_1001 DRB1_1101 DRB1_1102 DRB1_1104 DRB1_1114 DRB1_1301 DRB1_1302 DRB1_1304 DRB1_1305 DRB1_1402 DRB1_1406 DRB1_1501 DRB1_1502 DRB1_1601 DRB1_1602 DPA10301-DPB10101 DPA10301-DPB10201 DPA10301-DPB10202 DPA10301-DPB110601 DPA10301-DPB11801 DPA10401-DPB10101 DQA10102-DQB10501 DQA10102-DQB10503 DQA10103-DQB10501
INNETPGIRYQYNVLPQGWKGSPAI

SEQ ID NO: 3879 - protein, 14 aa, Human immunodeficiency virus 1
  source 1..14: note = HLAs: DRB1_0101 DRB1_0401 DRB1_0405 DRB1_0408 DRB1_0701 DRB1_0813 DRB1_0901 DRB1_1001 DRB1_1114 DRB1_1302 DRB1_1601 DRB1_1602 DPA10202-DPB10101 DPA10301-DPB10101 DPA10301-DPB10201 DPA10401-DPB10101 DQA10102-DQB10501
IPEWEFVNTPPLVK

SEQ ID NO: 3880 - protein, 15 aa, Human immunodeficiency virus 1
  source 1..15: note = HLAs: DRB1_0101 DRB1_0102 DRB1_0401 DRB1_0404 DRB1_0405 DRB1_0407 DRB1_0408 DRB1_0410 DRB1_0701 DRB1_0801 DRB1_0802 DRB1_0803 DRB1_0806 DRB1_0809 DRB1_0813 DRB1_0901 DRB1_1001 DRB1_1101 DRB1_1102 DRB1_1103 DRB1_1104 DRB1_1114 DRB1_1301 DRB1_1302 DRB1_1303 DRB1_1304 DRB1_1305 DRB1_1312 DRB1_1401 DRB1_1402 DRB1_1403 DRB1_1404 DRB1_1406 DRB1_1407 DRB1_1454 DRB1_1501 DRB1_1502 DRB1_1601 DRB1_1602 DPA10103-DPB10101 DPA10103-DPB11501 DPA10103-DPB13101 DPA10103-DPB13401 DPA10103-DPB15001 DPA10104-DPB10101 DPA10104-DPB11501 DPA10105-DPB10101 DPA10105-DPB15001 DPA10106-DPB10101 DPA10201-DPB10101 DPA10201-DPB11501 DPA10202-DPB10101 DPA10202-DPB10201 DPA10202-DPB10202 DPA10202-DPB10501 DPA10202-DPB110601 DPA10202-DPB11801 DPA10202-DPB11901 DPA10202-DPB13101 DPA10202-DPB13801 DPA10202-DPB15501 DPA10202-DPB16501 DPA10301-DPB10101 DPA10301-DPB10201 DPA10301-DPB10202 DPA10301-DPB10401 DPA10301-DPB10402 DPA10301-DPB110501 DPA10301-DPB110601 DPA10301-DPB11801 DPA10301-DPB12301 DPA10301-DPB13901; note = HLAs: DPA10301-DPB14001 DPA10301-DPB14901 DPA10301-DPB15501 DPA10301-DPB16501 DPA10301-DPB17501 DPA10301-DPB18001 DPA10401-DPB10101 DPA10401-DPB10201 DPA10401-DPB10202 DPA10401-DPB10501 DQA10102-DQB10501 DQA10102-DQB10609 DQA10103-DQB10501 DQA10103-DQB10609
IPEWEFVNTPPLVKL

SEQ ID NO: 3881 - protein, 16 aa, Human immunodeficiency virus 1
  source 1..16: note = HLAs: DRB1_0101 DRB1_0401 DRB1_0405 DRB1_0408 DRB1_0701 DRB1_0801 DRB1_0813 DRB1_0901 DRB1_1001 DRB1_1101 DRB1_1114 DRB1_1302 DRB1_1305 DRB1_1402 DRB1_1406 DRB1_1502 DRB1_1601 DRB1_1602 DPA10103-DPB10101 DPA10103-DPB11501 DPA10103-DPB13101 DPA10103-DPB15001 DPA10104-DPB10101 DPA10104-DPB11501 DPA10105-DPB10101 DPA10105-DPB15001 DPA10106-DPB10101 DPA10201-DPB10101 DPA10201-DPB11501 DPA10202-DPB10101 DPA10202-DPB10201 DPA10202-DPB10202 DPA10202-DPB10501 DPA10202-DPB110601 DPA10202-DPB11901 DPA10202-DPB13101 DPA10202-DPB13801 DPA10202-DPB15501 DPA10202-DPB16501 DPA10301-DPB10101 DPA10301-DPB10201 DPA10301-DPB10202 DPA10301-DPB10401 DPA10301-DPB10402 DPA10301-DPB110501 DPA10301-DPB110601 DPA10301-DPB11801 DPA10301-DPB12301 DPA10301-DPB13901 DPA10301-DPB14001 DPA10301-DPB14901 DPA10301-DPB15501 DPA10301-DPB16501 DPA10301-DPB17501 DPA10301-DPB18001 DPA10401-DPB10101 DPA10401-DPB10201 DPA10401-DPB10202 DPA10401-DPB10501 DPA10401-DPB11401 DQA10102-DQB10501 DQA10102-DQB10609 DQA10103-DQB10501; note = HLAs: DQA10103-DQB10609
IPEWEFVNTPPLVKLW

SEQ ID NO: 3882 - protein, 17 aa, Human immunodeficiency virus 1
  source 1..17: note = HLAs: DRB1_0101 DRB1_0401 DRB1_0404 DRB1_0405 DRB1_0408 DRB1_0410 DRB1_0701 DRB1_0801 DRB1_0802 DRB1_0809 DRB1_0813 DRB1_0901 DRB1_1001 DRB1_1101 DRB1_1102 DRB1_1103 DRB1_1104 DRB1_1114 DRB1_1301 DRB1_1302 DRB1_1303 DRB1_1304 DRB1_1305 DRB1_1312 DRB1_1402 DRB1_1406 DRB1_1502 DRB1_1601 DRB1_1602 DPA10103-DPB10101 DPA10103-DPB10201 DPA10103-DPB11501 DPA10103-DPB13101 DPA10103-DPB13401 DPA10103-DPB14101 DPA10103-DPB14801 DPA10103-DPB15001 DPA10104-DPB10101 DPA10104-DPB11501 DPA10105-DPB10101 DPA10105-DPB15001 DPA10106-DPB10101 DPA10201-DPB10101 DPA10201-DPB11501 DPA10202-DPB10101 DPA10202-DPB10201 DPA10202-DPB10202 DPA10202-DPB10501 DPA10202-DPB110601 DPA10202-DPB11801 DPA10202-DPB11901 DPA10202-DPB13101 DPA10202-DPB13801 DPA10202-DPB15501 DPA10202-DPB16501 DPA10301-DPB10101 DPA10301-DPB10201 DPA10301-DPB10202 DPA10301-DPB10401 DPA10301-DPB10402 DPA10301-DPB110501 DPA10301-DPB110601 DPA10301-DPB11801 DPA10301-DPB12301 DPA10301-DPB13901 DPA10301-DPB14001 DPA10301-DPB14901; note = HLAs: DPA10301-DPB15501 DPA10301-DPB16501 DPA10301-DPB17501 DPA10301-DPB18001 DPA10401-DPB10101 DPA10401-DPB10201 DPA10401-DPB10202 DPA10401-DPB10501 DPA10401-DPB11401 DQA10102-DQB10501 DQA10102-DQB10609 DQA10103-DQB10501
IPEWEFVNTPPLVKLWY

SEQ ID NO: 3883 - protein, 18 aa, Human immunodeficiency virus 1
  source 1..18: note = HLAs: DRB1_0101 DRB1_0408 DRB1_0701 DRB1_0901 DRB1_1001 DRB1_1602 DPA10103-DPB10101 DPA10103-DPB11501 DPA10104-DPB10101 DPA10104-DPB11501 DPA10105-DPB10101 DPA10202-DPB10101 DPA10202-DPB13101 DPA10301-DPB10101 DPA10301-DPB10201 DPA10301-DPB10202 DPA10301-DPB10401 DPA10301-DPB11801 DPA10301-DPB12301 DPA10301-DPB13901 DPA10301-DPB14001 DPA10401-DPB10101 DQA10102-DQB10501
IPEWEFVNTPPLVKLWYQ

SEQ ID NO: 3884 - protein, 19 aa, Human immunodeficiency virus 1
  source 1..19: note = HLAs: DRB1_0101 DRB1_0401 DRB1_0405 DRB1_0408 DRB1_0701 DRB1_0813 DRB1_0901 DRB1_1001 DRB1_1101 DRB1_1114 DRB1_1302 DRB1_1304 DRB1_1305 DRB1_1402 DRB1_1406 DRB1_1502 DRB1_1601 DRB1_1602 DPA10103-DPB10101 DPA10103-DPB11501 DPA10103-DPB13101 DPA10103-DPB13401 DPA10103-DPB15001 DPA10104-DPB10101 DPA10104-DPB11501 DPA10105-DPB10101 DPA10105-DPB15001 DPA10106-DPB10101 DPA10201-DPB10101 DPA10201-DPB11501 DPA10202-DPB10101 DPA10202-DPB10201 DPA10202-DPB10202 DPA10202-DPB10501 DPA10202-DPB110601 DPA10202-DPB11901 DPA10202-DPB13101 DPA10202-DPB13801 DPA10202-DPB15501 DPA10202-DPB16501 DPA10301-DPB10101 DPA10301-DPB10201 DPA10301-DPB10202 DPA10301-DPB10401 DPA10301-DPB10402 DPA10301-DPB110501 DPA10301-DPB110601 DPA10301-DPB11801 DPA10301-DPB12301 DPA10301-DPB13901 DPA10301-DPB14001 DPA10301-DPB14901 DPA10301-DPB15501 DPA10301-DPB16501 DPA10301-DPB17501 DPA10301-DPB18001 DPA10401-DPB10101 DPA10401-DPB10201 DPA10401-DPB10202 DPA10401-DPB10501 DQA10102-DQB10501 DQA10102-DQB10609 DQA10103-DQB10501
IPEWEFVNTPPLVKLWYQL

SEQ ID NO: 3885 - protein, 20 aa, Human immunodeficiency virus 1
  source 1..20: note = HLAs: DRB1_0101 DRB1_0401 DRB1_0404 DRB1_0405 DRB1_0408 DRB1_0410 DRB1_0701 DRB1_0801 DRB1_0802 DRB1_0803 DRB1_0809 DRB1_0813 DRB1_0901 DRB1_1001 DRB1_1101 DRB1_1102 DRB1_1114 DRB1_1301 DRB1_1302 DRB1_1303 DRB1_1304 DRB1_1305 DRB1_1312 DRB1_1402 DRB1_1406 DRB1_1501 DRB1_1502 DRB1_1601 DRB1_1602 DPA10103-DPB10101 DPA10103-DPB10201 DPA10103-DPB10202 DPA10103-DPB10401 DPA10103-DPB10501 DPA10103-DPB112601 DPA10103-DPB11501 DPA10103-DPB11601 DPA10103-DPB11801 DPA10103-DPB11901 DPA10103-DPB12301 DPA10103-DPB13101 DPA10103-DPB13401 DPA10103-DPB13901 DPA10103-DPB14001 DPA10103-DPB14101 DPA10103-DPB14801 DPA10103-DPB15001 DPA10103-DPB15901 DPA10104-DPB10101 DPA10104-DPB11501 DPA10105-DPB10101 DPA10105-DPB10401 DPA10105-DPB11801 DPA10105-DPB15001 DPA10106-DPB10101 DPA10201-DPB10101 DPA10201-DPB10501 DPA10201-DPB110601 DPA10201-DPB11501 DPA10201-DPB11601 DPA10201-DPB11901 DPA10202-DPB10101 DPA10202-DPB10201 DPA10202-DPB10202 DPA10202-DPB10401 DPA10202-DPB10501 DPA10202-DPB110601; note = HLAs: DPA10202-DPB11101 DPA10202-DPB11301 DPA10202-DPB11401 DPA10202-DPB11801 DPA10202-DPB11901 DPA10202-DPB12101 DPA10202-DPB13001 DPA10202-DPB13101 DPA10202-DPB13801 DPA10202-DPB15501 DPA10202-DPB16501 DPA10202-DPB18501 DPA10301-DPB10101 DPA10301-DPB10201 DPA10301-DPB10202 DPA10301-DPB10401 DPA10301-DPB10402 DPA10301-DPB110501 DPA10301-DPB110601 DPA10301-DPB11101 DPA10301-DPB11801 DPA10301-DPB12301 DPA10301-DPB13901 DPA10301-DPB14001 DPA10301-DPB14901 DPA10301-DPB15501 DPA10301-DPB16501 DPA10301-DPB17501 DPA10301-DPB18001 DPA10401-DPB10101 DPA10401-DPB10201 DPA10401-DPB10202 DPA10401-DPB10301 DPA10401-DPB10402 DPA10401-DPB10501 DPA10401-DPB110501 DPA10401-DPB11301 DPA10401-DPB113301 DPA10401-DPB11401 DPA10401-DPB14901 DQA10102-DQB10501 DQA10102-DQB10609 DQA10103-DQB10501 DQA10103-DQB10609
IPEWEFVNTPPLVKLWYQLE

SEQ ID NO: 3886 - protein, 15 aa, Human immunodeficiency virus 1
  source 1..15: note = HLAs: DRB1_1102 DRB1_1103 DRB1_1104 DRB1_1301 DRB1_1304
IPHPAGLKKKKSVTV

SEQ ID NO: 3887 - protein, 16 aa, Human immunodeficiency virus 1
  source 1..16: note = HLAs: DRB1_1102 DRB1_1103 DRB1_1301
IPHPAGLKKKKSVTVL

SEQ ID NO: 3888 - protein, 17 aa, Human immunodeficiency virus 1
  source 1..17: note = HLAs: DRB1_1103
IPHPAGLKKKKSVTVLD

SEQ ID NO: 3889 - protein, 18 aa, Human immunodeficiency virus 1
  source 1..18: note = HLAs: DPA10301-DPB10101
IPHPAGLKKKKSVTVLDV

SEQ ID NO: 3890 - protein, 19 aa, Human immunodeficiency virus 1
  source 1..19: note = HLAs: DRB1_1102 DRB1_1301 DPA10103-DPB10101 DPA10103-DPB11501 DPA10103-DPB15001 DPA10104-DPB10101 DPA10104-DPB11501 DPA10105-DPB10101 DPA10105-DPB15001 DPA10202-DPB10101 DPA10301-DPB10101 DPA10301-DPB10201 DPA10301-DPB10202 DPA10301-DPB110601 DPA10301-DPB11801 DPA10301-DPB16501 DPA10401-DPB10101
IPHPAGLKKKKSVTVLDVG

SEQ ID NO: 3891 - protein, 20 aa, Human immunodeficiency virus 1
  source 1..20: note = HLAs: DRB1_0101 DRB1_0701 DRB1_0801 DRB1_0804 DRB1_0806 DRB1_1001 DRB1_1102 DRB1_1103 DRB1_1104 DRB1_1114 DRB1_1301 DRB1_1302 DRB1_1304 DPA10103-DPB10101 DPA10103-DPB11501 DPA10103-DPB11901 DPA10103-DPB13101 DPA10103-DPB15001 DPA10104-DPB10101 DPA10104-DPB11501 DPA10105-DPB10101 DPA10105-DPB15001 DPA10202-DPB10101 DPA10202-DPB110601 DPA10202-DPB11901 DPA10301-DPB10101 DPA10301-DPB10201 DPA10301-DPB10202 DPA10301-DPB10401 DPA10301-DPB110601 DPA10301-DPB11801 DPA10301-DPB12301 DPA10301-DPB13901 DPA10301-DPB14001 DPA10301-DPB16501 DPA10401-DPB10101 DPA10401-DPB10202 DPA10401-DPB10301 DPA10401-DPB10501 DPA10401-DPB11401
IPHPAGLKKKKSVTVLDVGD

SEQ ID NO: 3892 - protein, 21 aa, Human immunodeficiency virus 1
  source 1..21: note = HLAs: DRB1_0101 DRB1_0806 DRB1_1001 DRB1_1102 DRB1_1103 DRB1_1104 DRB1_1301 DRB1_1304 DPA10103-DPB10101 DPA10103-DPB11501 DPA10103-DPB15001 DPA10104-DPB10101 DPA10104-DPB11501 DPA10105-DPB10101 DPA10105-DPB15001 DPA10202-DPB10101 DPA10301-DPB10101 DPA10301-DPB10201 DPA10301-DPB10202 DPA10301-DPB110601 DPA10301-DPB11801 DPA10301-DPB16501 DPA10401-DPB10101
IPHPAGLKKKKSVTVLDVGDA

SEQ ID NO: 3893 - protein, 22 aa, Human immunodeficiency virus 1
  source 1..22: note = HLAs: DRB1_0101 DRB1_0806 DRB1_1001 DRB1_1102 DRB1_1103 DRB1_1104 DRB1_1301 DRB1_1304 DPA10103-DPB10101 DPA10103-DPB11501 DPA10103-DPB15001 DPA10104-DPB10101 DPA10104-DPB11501 DPA10105-DPB10101 DPA10105-DPB15001 DPA10202-DPB10101 DPA10301-DPB10101 DPA10301-DPB10201 DPA10301-DPB10202 DPA10301-DPB110601 DPA10301-DPB11801 DPA10301-DPB16501 DPA10401-DPB10101 DPA10401-DPB10501 DQA10102-DQB10501
IPHPAGLKKKKSVTVLDVGDAY

SEQ ID NO: 3894 - protein, 23 aa, Human immunodeficiency virus 1
  source 1..23: note = HLAs: DRB1_0101 DRB1_0410 DRB1_0806 DRB1_1001 DRB1_1102 DRB1_1103 DRB1_1104 DRB1_1114 DRB1_1301 DRB1_1302 DRB1_1304 DRB1_1406 DPA10103-DPB10101 DPA10103-DPB11501 DPA10103-DPB15001 DPA10104-DPB10101 DPA10104-DPB11501 DPA10105-DPB10101 DPA10105-DPB15001 DPA10202-DPB10101 DPA10202-DPB110601 DPA10202-DPB11901 DPA10301-DPB10101 DPA10301-DPB10201 DPA10301-DPB10202 DPA10301-DPB110601 DPA10301-DPB11801 DPA10301-DPB14001 DPA10301-DPB16501 DPA10401-DPB10101 DPA10401-DPB10202 DPA10401-DPB10501 DQA10102-DQB10501 DQA10102-DQB10604 DQA10102-DQB10609
IPHPAGLKKKKSVTVLDVGDAYF

SEQ ID NO: 3895 - protein, 24 aa, Human immunodeficiency virus 1
  source 1..24: note = HLAs: DRB1_0101 DRB1_0404 DRB1_0410 DRB1_0806 DRB1_1001 DRB1_1102 DRB1_1103 DRB1_1104 DRB1_1114 DRB1_1301 DRB1_1302 DRB1_1304 DRB1_1406 DPA10103-DPB10101 DPA10103-DPB11501 DPA10103-DPB15001 DPA10104-DPB10101 DPA10104-DPB11501 DPA10105-DPB10101 DPA10105-DPB15001 DPA10202-DPB10101 DPA10202-DPB110601 DPA10202-DPB11901 DPA10301-DPB10101 DPA10301-DPB10201 DPA10301-DPB10202 DPA10301-DPB10401 DPA10301-DPB110601 DPA10301-DPB11801 DPA10301-DPB12301 DPA10301-DPB13901 DPA10301-DPB14001 DPA10301-DPB16501 DPA10401-DPB10101 DPA10401-DPB10202 DPA10401-DPB10501 DQA10102-DQB10501 DQA10102-DQB10604 DQA10102-DQB10609 DQA10103-DQB10609
IPHPAGLKKKKSVTVLDVGDAYFS

SEQ ID NO: 3896 - protein, 25 aa, Human immunodeficiency virus 1
  source 1..25: note = HLAs: DRB1_0101 DRB1_0404 DRB1_0410 DRB1_0701 DRB1_0806 DRB1_1001 DRB1_1102 DRB1_1103 DRB1_1104 DRB1_1114 DRB1_1301 DRB1_1302 DRB1_1304 DRB1_1406 DPA10103-DPB10101 DPA10103-DPB11501 DPA10103-DPB15001 DPA10104-DPB10101 DPA10104-DPB11501 DPA10105-DPB10101 DPA10105-DPB15001 DPA10202-DPB10101 DPA10202-DPB110601 DPA10202-DPB11901 DPA10301-DPB10101 DPA10301-DPB10201 DPA10301-DPB10202 DPA10301-DPB10401 DPA10301-DPB110601 DPA10301-DPB11801 DPA10301-DPB12301 DPA10301-DPB13901 DPA10301-DPB14001 DPA10301-DPB16501 DPA10401-DPB10101 DPA10401-DPB10201 DPA10401-DPB10202 DPA10401-DPB10501 DPA10401-DPB11401 DQA10102-DQB10501 DQA10102-DQB10503 DQA10102-DQB10604 DQA10102-DQB10609 DQA10103-DQB10501 DQA10103-DQB10609
IPHPAGLKKKKSVTVLDVGDAYFSV

SEQ ID NO: 3897 - protein, 13 aa, Human immunodeficiency virus 1
  source 1..13: note = HLAs: DRB1_1001 DQA10201-DQB10301
IPMFSALSEGATP

SEQ ID NO: 3898 - protein, 14 aa, Human immunodeficiency virus 1
  source 1..14: note = HLAs: DRB1_0101 DRB1_0901 DRB1_1001 DQA10102-DQB10601 DQA10102-DQB10602 DQA10103-DQB10601 DQA10201-DQB10301 DQA10201-DQB10303 DQA10301-DQB10301 DQA10302-DQB10301 DQA10303-DQB10301 DQA10401-DQB10301 DQA10401-DQB10319 DQA10501-DQB10301 DQA10501-DQB10319 DQA10503-DQB10301 DQA10505-DQB10301 DQA10505-DQB10302 DQA10505-DQB10309 DQA10505-DQB10319 DQA10506-DQB10303 DQA10508-DQB10301 DQA10509-DQB10301 DQA10601-DQB10301
IPMFSALSEGATPQ

SEQ ID NO: 3899 - protein, 15 aa, Human immunodeficiency virus 1
  source 1..15: note = HLAs: DRB1_0101 DRB1_0102 DRB1_0401 DRB1_0404 DRB1_0408 DRB1_0901 DRB1_1001 DQA10102-DQB10501 DQA10102-DQB10601 DQA10102-DQB10602 DQA10102-DQB10611 DQA10103-DQB10601 DQA10103-DQB10602 DQA10103-DQB10609 DQA10201-DQB10301 DQA10201-DQB10303 DQA10301-DQB10301 DQA10302-DQB10301 DQA10303-DQB10301 DQA10401-DQB10301 DQA10401-DQB10319 DQA10501-DQB10203 DQA10501-DQB10301 DQA10501-DQB10319 DQA10503-DQB10301 DQA10505-DQB10301 DQA10505-DQB10302 DQA10505-DQB10309 DQA10505-DQB10319 DQA10505-DQB10402 DQA10506-DQB10303 DQA10508-DQB10301 DQA10509-DQB10301 DQA10601-DQB10301
IPMFSALSEGATPQD

SEQ ID NO: 3900 - protein, 16 aa, Human immunodeficiency virus 1
  source 1..16: note = HLAs: DRB1_0101 DRB1_0901 DRB1_1001 DQA10102-DQB10501 DQA10102-DQB10601 DQA10102-DQB10602 DQA10102-DQB10609 DQA10102-DQB10611 DQA10103-DQB10601 DQA10103-DQB10609 DQA10201-DQB10301 DQA10201-DQB10302 DQA10201-DQB10303 DQA10301-DQB10301 DQA10301-DQB10304 DQA10302-DQB10301 DQA10302-DQB10304 DQA10303-DQB10301 DQA10303-DQB10304 DQA10401-DQB10301 DQA10401-DQB10319 DQA10501-DQB10203 DQA10501-DQB10301 DQA10501-DQB10319 DQA10503-DQB10301 DQA10505-DQB10301 DQA10505-DQB10302 DQA10505-DQB10309 DQA10505-DQB10319 DQA10505-DQB10402 DQA10506-DQB10303 DQA10508-DQB10301 DQA10509-DQB10301 DQA10601-DQB10301
IPMFSALSEGATPQDL

SEQ ID NO: 3901 - protein, 17 aa, Human immunodeficiency virus 1
  source 1..17: note = HLAs: DRB1_0101 DRB1_0901 DRB1_1001 DQA10102-DQB10501 DQA10102-DQB10601 DQA10102-DQB10602 DQA10102-DQB10609 DQA10102-DQB10611 DQA10103-DQB10601 DQA10103-DQB10609 DQA10201-DQB10301 DQA10201-DQB10303 DQA10301-DQB10301 DQA10302-DQB10301 DQA10303-DQB10301 DQA10401-DQB10301 DQA10401-DQB10319 DQA10501-DQB10301 DQA10501-DQB10319 DQA10503-DQB10301 DQA10505-DQB10301 DQA10505-DQB10309 DQA10505-DQB10319 DQA10506-DQB10303 DQA10508-DQB10301 DQA10509-DQB10301 DQA10601-DQB10301
IPMFSALSEGATPQDLN

SEQ ID NO: 3902 - protein, 18 aa, Human immunodeficiency virus 1
  source 1..18: note = HLAs: DQA10102-DQB10601 DQA10201-DQB10301 DQA10401-DQB10301 DQA10401-DQB10319
IPMFSALSEGATPQDLNT

SEQ ID NO: 3903 - protein, 19 aa, Human immunodeficiency virus 1
  source 1..19: note = HLAs: DRB1_0101 DRB1_1001 DQA10102-DQB10601 DQA10102-DQB10609 DQA10103-DQB10601 DQA10103-DQB10609 DQA10201-DQB10301 DQA10201-DQB10303 DQA10401-DQB10301 DQA10401-DQB10319 DQA10501-DQB10301 DQA10501-DQB10319 DQA10503-DQB10301 DQA10505-DQB10301 DQA10505-DQB10309 DQA10505-DQB10319 DQA10506-DQB10303 DQA10508-DQB10301 DQA10509-DQB10301 DQA10601-DQB10301
IPMFSALSEGATPQDLNTM

SEQ ID NO: 3904 - protein, 20 aa, Human immunodeficiency virus 1
  source 1..20: note = HLAs: DRB1_0101 DRB1_0901 DRB1_1001 DQA10102-DQB10501 DQA10102-DQB10601 DQA10102-DQB10602 DQA10102-DQB10609 DQA10102-DQB10611 DQA10103-DQB10601 DQA10103-DQB10609 DQA10201-DQB10301 DQA10201-DQB10303 DQA10301-DQB10301 DQA10302-DQB10301 DQA10303-DQB10301 DQA10501-DQB10301 DQA10501-DQB10319 DQA10503-DQB10301 DQA10505-DQB10301 DQA10505-DQB10309 DQA10505-DQB10319 DQA10506-DQB10303 DQA10508-DQB10301 DQA10509-DQB10301 DQA10601-DQB10301
IPMFSALSEGATPQDLNTML

SEQ ID NO: 3905 - protein, 21 aa, Human immunodeficiency virus 1
  source 1..21: note = HLAs: DRB1_0101 DRB1_1001 DQA10102-DQB10601 DQA10103-DQB10601 DQA10201-DQB10301 DQA10201-DQB10303
IPMFSALSEGATPQDLNTMLN

SEQ ID NO: 3906 - protein, 22 aa, Human immunodeficiency virus 1
  source 1..22: note = HLAs: DRB1_0101 DRB1_1001 DQA10102-DQB10601 DQA10103-DQB10601 DQA10201-DQB10301 DQA10201-DQB10303
IPMFSALSEGATPQDLNTMLNT

SEQ ID NO: 3907 - protein, 23 aa, Human immunodeficiency virus 1
  source 1..23: note = HLAs: DRB1_0101 DRB1_1001 DQA10102-DQB10501 DQA10102-DQB10601 DQA10103-DQB10601 DQA10201-DQB10301 DQA10201-DQB10303
IPMFSALSEGATPQDLNTMLNTV

SEQ ID NO: 3908 - protein, 24 aa, Human immunodeficiency virus 1
  source 1..24: note = HLAs: DRB1_0101 DRB1_1001 DQA10102-DQB10501 DQA10102-DQB10601 DQA10103-DQB10601 DQA10201-DQB10301 DQA10201-DQB10303
IPMFSALSEGATPQDLNTMLNTVG

SEQ ID NO: 3909 - protein, 25 aa, Human immunodeficiency virus 1
  source 1..25: note = HLAs: DRB1_0101 DRB1_1001 DQA10102-DQB10501 DQA10102-DQB10601 DQA10103-DQB10601 DQA10103-DQB10609 DQA10201-DQB10301 DQA10201-DQB10303
IPMFSALSEGATPQDLNTMLNTVGG

SEQ ID NO: 3910 - protein, 15 aa, Human immunodeficiency virus 1
  source 1..15: note = HLAs: DRB1_0301 DRB1_1406
IPSINNETPGIRYQY

SEQ ID NO: 3911 - protein, 20 aa, Human immunodeficiency virus 1
  source 1..20: note = HLAs: DRB1_0101 DRB1_0401 DRB1_0404 DRB1_0405 DRB1_0408 DRB1_0410 DRB1_0813 DRB1_1001 DRB1_1114 DRB1_1302 DRB1_1406 DRB1_1501 DRB1_1602 DQA10102-DQB10501
IPSINNETPGIRYQYNVLPQ

SEQ ID NO: 3912 - protein, 21 aa, Human immunodeficiency virus 1
  source 1..21: note = HLAs: DRB1_0101 DRB1_0401 DRB1_0404 DRB1_0405 DRB1_0408 DRB1_0410 DRB1_1001 DRB1_1114 DRB1_1302 DQA10102-DQB10501
IPSINNETPGIRYQYNVLPQG

SEQ ID NO: 3913 - protein, 22 aa, Human immunodeficiency virus 1
  source 1..22: note = HLAs: DRB1_0101 DRB1_0401 DRB1_0404 DRB1_0405 DRB1_0408 DRB1_0410 DRB1_0813 DRB1_1001 DRB1_1114 DRB1_1302 DRB1_1406 DRB1_1501 DRB1_1602 DPA10301-DPB10101 DPA10401-DPB10101 DQA10102-DQB10501 DQA10103-DQB10501
IPSINNETPGIRYQYNVLPQGW

SEQ ID NO: 3914 - protein, 23 aa, Human immunodeficiency virus 1
  source 1..23: note = HLAs: DRB1_0101 DRB1_0401 DRB1_0404 DRB1_0405 DRB1_0408 DRB1_0410 DRB1_0802 DRB1_0809 DRB1_0813 DRB1_1001 DRB1_1102 DRB1_1114 DRB1_1301 DRB1_1302 DRB1_1304 DRB1_1402 DRB1_1406 DRB1_1501 DRB1_1502 DRB1_1602 DPA10301-DPB10101 DPA10301-DPB10201 DPA10301-DPB10202 DPA10301-DPB110601 DPA10301-DPB11801 DPA10401-DPB10101 DQA10102-DQB10501 DQA10102-DQB10503 DQA10103-DQB10501
IPSINNETPGIRYQYNVLPQGWK

SEQ ID NO: 3915 - protein, 24 aa, Human immunodeficiency virus 1
  source 1..24: note = HLAs: DRB1_0101 DRB1_0102 DRB1_0401 DRB1_0404 DRB1_0405 DRB1_0408 DRB1_0410 DRB1_0801 DRB1_0802 DRB1_0809 DRB1_0813 DRB1_1001 DRB1_1101 DRB1_1102 DRB1_1104 DRB1_1114 DRB1_1301 DRB1_1302 DRB1_1304 DRB1_1305 DRB1_1402 DRB1_1406 DRB1_1501 DRB1_1502 DRB1_1601 DRB1_1602 DPA10301-DPB10101 DPA10301-DPB10201 DPA10301-DPB10202 DPA10301-DPB110601 DPA10301-DPB11801 DPA10401-DPB10101 DQA10102-DQB10501 DQA10102-DQB10503 DQA10103-DQB10501
IPSINNETPGIRYQYNVLPQGWKG

SEQ ID NO: 3916 - protein, 25 aa, Human immunodeficiency virus 1
  source 1..25: note = HLAs: DRB1_0101 DRB1_0102 DRB1_0401 DRB1_0404 DRB1_0405 DRB1_0408 DRB1_0410 DRB1_0801 DRB1_0802 DRB1_0806 DRB1_0809 DRB1_0813 DRB1_1001 DRB1_1101 DRB1_1102 DRB1_1104 DRB1_1114 DRB1_1301 DRB1_1302 DRB1_1304 DRB1_1305 DRB1_1402 DRB1_1406 DRB1_1501 DRB1_1502 DRB1_1601 DRB1_1602 DPA10301-DPB10101 DPA10301-DPB10201 DPA10301-DPB10202 DPA10301-DPB110601 DPA10301-DPB11801 DPA10401-DPB10101 DQA10102-DQB10501 DQA10102-DQB10503 DQA10103-DQB10501
IPSINNETPGIRYQYNVLPQGWKGS

SEQ ID NO: 3917 - protein, 14 aa, Human immunodeficiency virus 1
  source 1..14: note = HLAs: DPA10301-DPB10201
IPVGEIYKRWIILG

SEQ ID NO: 3918 - protein, 15 aa, Human immunodeficiency virus 1
  source 1..15: note = HLAs: DRB1_0806 DRB1_1001 DRB1_1102 DRB1_1103 DRB1_1104 DRB1_1301 DRB1_1304 DRB1_1406 DRB1_1501 DRB1_1503 DPA10103-DPB10201 DPA10103-DPB10202 DPA10103-DPB11501 DPA10103-DPB11601 DPA10103-DPB11901 DPA10103-DPB13401 DPA10103-DPB14001 DPA10103-DPB14101 DPA10103-DPB14801 DPA10104-DPB11501 DPA10201-DPB11501 DPA10202-DPB10202 DPA10202-DPB110601 DPA10202-DPB11901 DPA10301-DPB10101 DPA10301-DPB10201 DPA10301-DPB10202 DPA10301-DPB10401 DPA10301-DPB110601 DPA10301-DPB11801 DPA10301-DPB12301 DPA10301-DPB13901 DPA10301-DPB14001 DPA10301-DPB16501 DPA10401-DPB10201 DPA10401-DPB10202 DQA10102-DQB10501
IPVGEIYKRWIILGL

SEQ ID NO: 3919 - protein, 16 aa, Human immunodeficiency virus 1
  source 1..16: note = HLAs: DRB1_1001 DRB1_1304 DPA10103-DPB10101 DPA10103-DPB10201 DPA10103-DPB10202 DPA10103-DPB10501 DPA10103-DPB11101 DPA10103-DPB11501 DPA10103-DPB11601 DPA10103-DPB11901 DPA10103-DPB12001 DPA10103-DPB13101 DPA10103-DPB13401 DPA10103-DPB14001 DPA10103-DPB14101 DPA10103-DPB14801 DPA10103-DPB15001 DPA10104-DPB10101 DPA10104-DPB11501 DPA10105-DPB10101 DPA10105-DPB15001 DPA10201-DPB110601 DPA10201-DPB11501 DPA10201-DPB11601 DPA10201-DPB11901 DPA10202-DPB10101 DPA10202-DPB10202 DPA10202-DPB110601 DPA10202-DPB11901 DPA10301-DPB10101 DPA10301-DPB10201 DPA10301-DPB10202 DPA10301-DPB10401 DPA10301-DPB110601 DPA10301-DPB11801 DPA10301-DPB12301 DPA10301-DPB13901 DPA10301-DPB14001 DPA10301-DPB15501 DPA10301-DPB16501 DPA10401-DPB10101 DPA10401-DPB10201 DPA10401-DPB10202 DPA10401-DPB10301 DPA10401-DPB10501 DQA10102-DQB10501 DQA10103-DQB10501
IPVGEIYKRWIILGLN

SEQ ID NO: 3920 - protein, 17 aa, Human immunodeficiency virus 1
  source 1..17: note = HLAs: DRB1_0101 DRB1_0410 DRB1_0801 DRB1_0802 DRB1_0804 DRB1_0806 DRB1_0809 DRB1_1001 DRB1_1101 DRB1_1102 DRB1_1103 DRB1_1104 DRB1_1301 DRB1_1304 DRB1_1305 DRB1_1406 DRB1_1501 DRB1_1503 DRB1_1601 DRB1_1602 DPA10103-DPB10101 DPA10103-DPB10201 DPA10103-DPB10202 DPA10103-DPB10301 DPA10103-DPB10501 DPA10103-DPB10601 DPA10103-DPB11101 DPA10103-DPB112401 DPA10103-DPB113101 DPA10103-DPB11401 DPA10103-DPB11501 DPA10103-DPB11601 DPA10103-DPB11701 DPA10103-DPB11801 DPA10103-DPB11901 DPA10103-DPB12001 DPA10103-DPB12101 DPA10103-DPB12901 DPA10103-DPB13001 DPA10103-DPB13101 DPA10103-DPB13401 DPA10103-DPB14001 DPA10103-DPB14101 DPA10103-DPB14801 DPA10103-DPB15001 DPA10103-DPB15501 DPA10103-DPB15901 DPA10104-DPB10101 DPA10104-DPB10301 DPA10104-DPB11501 DPA10105-DPB10101 DPA10105-DPB10301 DPA10105-DPB11801 DPA10105-DPB15001 DPA10106-DPB10101 DPA10201-DPB10101 DPA10201-DPB10501 DPA10201-DPB110601 DPA10201-DPB11501 DPA10201-DPB11601 DPA10201-DPB11901 DPA10201-DPB19101 DPA10202-DPB10101; note = HLAs: DPA10202-DPB10201 DPA10202-DPB10202 DPA10202-DPB10501 DPA10202-DPB110601 DPA10202-DPB11101 DPA10202-DPB11901 DPA10202-DPB13101 DPA10202-DPB13801 DPA10202-DPB15501 DPA10202-DPB16501 DPA10301-DPB10101 DPA10301-DPB10201 DPA10301-DPB10202 DPA10301-DPB10301 DPA10301-DPB10401 DPA10301-DPB10402 DPA10301-DPB110501 DPA10301-DPB110601 DPA10301-DPB11101 DPA10301-DPB11701 DPA10301-DPB11801 DPA10301-DPB12301 DPA10301-DPB13901 DPA10301-DPB14001 DPA10301-DPB14901 DPA10301-DPB15501 DPA10301-DPB16501 DPA10301-DPB17501 DPA10301-DPB18001 DPA10401-DPB10101 DPA10401-DPB10201 DPA10401-DPB10202 DPA10401-DPB10301 DPA10401-DPB10501 DPA10401-DPB11301 DPA10401-DPB113301 DPA10401-DPB11401 DQA10102-DQB10501 DQA10103-DQB10501
IPVGEIYKRWIILGLNK

SEQ ID NO: 3921 - protein, 18 aa, Human immunodeficiency virus 1
  source 1..18: note = HLAs: DRB1_0101 DRB1_1001 DPA10103-DPB10101 DPA10103-DPB10201 DPA10103-DPB10202 DPA10103-DPB10401 DPA10103-DPB10501 DPA10103-DPB10601 DPA10103-DPB11101 DPA10103-DPB112601 DPA10103-DPB11501 DPA10103-DPB11601 DPA10103-DPB11901 DPA10103-DPB12001 DPA10103-DPB12301 DPA10103-DPB13101 DPA10103-DPB13401 DPA10103-DPB13901 DPA10103-DPB14001 DPA10103-DPB14101 DPA10103-DPB14801 DPA10103-DPB15001 DPA10103-DPB15501 DPA10104-DPB10101 DPA10104-DPB11501 DPA10105-DPB10101 DPA10105-DPB10401 DPA10105-DPB15001 DPA10106-DPB10101 DPA10201-DPB10101 DPA10201-DPB110601 DPA10201-DPB11501 DPA10201-DPB11601 DPA10201-DPB11901 DPA10202-DPB10101 DPA10202-DPB10201 DPA10202-DPB10202 DPA10202-DPB10501 DPA10202-DPB110601 DPA10202-DPB11901 DPA10202-DPB13101 DPA10202-DPB13801 DPA10202-DPB16501 DPA10301-DPB10101 DPA10301-DPB10201 DPA10301-DPB10202 DPA10301-DPB10401 DPA10301-DPB10402 DPA10301-DPB110501 DPA10301-DPB110601 DPA10301-DPB11101 DPA10301-DPB11701 DPA10301-DPB11801 DPA10301-DPB12301 DPA10301-DPB13901; note = HLAs: DPA10301-DPB14001 DPA10301-DPB14901 DPA10301-DPB15501 DPA10301-DPB16501 DPA10301-DPB17501 DPA10301-DPB18001 DPA10401-DPB10101 DPA10401-DPB10201 DPA10401-DPB10202 DPA10401-DPB10301 DPA10401-DPB10501 DPA10401-DPB11301 DPA10401-DPB113301 DPA10401-DPB11401 DQA10102-DQB10501 DQA10103-DQB10501
IPVGEIYKRWIILGLNKI

SEQ ID NO: 3922 - protein, 19 aa, Human immunodeficiency virus 1
  source 1..19: note = HLAs: DRB1_0101 DRB1_0102 DRB1_0404 DRB1_0405 DRB1_0408 DRB1_0410 DRB1_0701 DRB1_0801 DRB1_0802 DRB1_0803 DRB1_0804 DRB1_0806 DRB1_0809 DRB1_0813 DRB1_0901 DRB1_1001 DRB1_1101 DRB1_1102 DRB1_1104 DRB1_1114 DRB1_1301 DRB1_1302 DRB1_1304 DRB1_1305 DRB1_1312 DRB1_1402 DRB1_1404 DRB1_1406 DRB1_1501 DRB1_1502 DRB1_1503 DRB1_1601 DRB1_1602 DPA10103-DPB10101 DPA10103-DPB10201 DPA10103-DPB10202 DPA10103-DPB10301 DPA10103-DPB10401 DPA10103-DPB10501 DPA10103-DPB10601 DPA10103-DPB11101 DPA10103-DPB112401 DPA10103-DPB112601 DPA10103-DPB11301 DPA10103-DPB113101 DPA10103-DPB113301 DPA10103-DPB11401 DPA10103-DPB11501 DPA10103-DPB11601 DPA10103-DPB11701 DPA10103-DPB11801 DPA10103-DPB11901 DPA10103-DPB12001 DPA10103-DPB12101 DPA10103-DPB12301 DPA10103-DPB12901 DPA10103-DPB13001 DPA10103-DPB13101 DPA10103-DPB13401 DPA10103-DPB13901 DPA10103-DPB14001 DPA10103-DPB14101 DPA10103-DPB14801 DPA10103-DPB15001 DPA10103-DPB15501 DPA10104-DPB10101 DPA10104-DPB10301 DPA10104-DPB11301 DPA10104-DPB11501; note = HLAs: DPA10105-DPB10101 DPA10105-DPB10301 DPA10105-DPB10401 DPA10105-DPB11801 DPA10105-DPB15001 DPA10106-DPB10101 DPA10106-DPB11101 DPA10201-DPB10101 DPA10201-DPB10201 DPA10201-DPB10202 DPA10201-DPB10501 DPA10201-DPB110601 DPA10201-DPB11101 DPA10201-DPB11501 DPA10201-DPB11601 DPA10201-DPB11901 DPA10201-DPB15501 DPA10202-DPB10101 DPA10202-DPB10201 DPA10202-DPB10202 DPA10202-DPB10401 DPA10202-DPB10501 DPA10202-DPB110601 DPA10202-DPB11101 DPA10202-DPB11301 DPA10202-DPB113101 DPA10202-DPB11701 DPA10202-DPB11801 DPA10202-DPB11901 DPA10202-DPB12101 DPA10202-DPB13001 DPA10202-DPB13101 DPA10202-DPB13801 DPA10202-DPB15501 DPA10202-DPB16501 DPA10202-DPB18501 DPA10301-DPB10101 DPA10301-DPB10201 DPA10301-DPB10202 DPA10301-DPB10301 DPA10301-DPB10401 DPA10301-DPB10402 DPA10301-DPB10901 DPA10301-DPB110501 DPA10301-DPB110601 DPA10301-DPB11101 DPA10301-DPB11301 DPA10301-DPB11701 DPA10301-DPB11801 DPA10301-DPB12301 DPA10301-DPB13901 DPA10301-DPB14001 DPA10301-DPB14901 DPA10301-DPB15501; note = HLAs: DPA10301-DPB16501 DPA10301-DPB17501 DPA10301-DPB18001 DPA10401-DPB10101 DPA10401-DPB10201 DPA10401-DPB10202 DPA10401-DPB10301 DPA10401-DPB10402 DPA10401-DPB10501 DPA10401-DPB110501 DPA10401-DPB11301 DPA10401-DPB113301 DPA10401-DPB11401 DPA10401-DPB14901 DQA10102-DQB10501 DQA10102-DQB10503 DQA10103-DQB10501
IPVGEIYKRWIILGLNKIV

SEQ ID NO: 3923 - protein, 20 aa, Human immunodeficiency virus 1
  source 1..20: note = HLAs: DRB1_0101 DRB1_0102 DRB1_0103 DRB1_0401 DRB1_0404 DRB1_0405 DRB1_0408 DRB1_0410 DRB1_0701 DRB1_0801 DRB1_0802 DRB1_0803 DRB1_0804 DRB1_0806 DRB1_0809 DRB1_0813 DRB1_0901 DRB1_1001 DRB1_1101 DRB1_1102 DRB1_1103 DRB1_1104 DRB1_1114 DRB1_1201 DRB1_1202 DRB1_1301 DRB1_1302 DRB1_1303 DRB1_1304 DRB1_1305 DRB1_1312 DRB1_1401 DRB1_1402 DRB1_1403 DRB1_1404 DRB1_1405 DRB1_1406 DRB1_1407 DRB1_1418 DRB1_1454 DRB1_1501 DRB1_1502 DRB1_1503 DRB1_1601 DRB1_1602 DPA10103-DPB10101 DPA10103-DPB10201 DPA10103-DPB10202 DPA10103-DPB10301 DPA10103-DPB10401 DPA10103-DPB10402 DPA10103-DPB10501 DPA10103-DPB10601 DPA10103-DPB10901 DPA10103-DPB11001 DPA10103-DPB110501 DPA10103-DPB11101 DPA10103-DPB112401 DPA10103-DPB112601 DPA10103-DPB11301 DPA10103-DPB113101 DPA10103-DPB113301 DPA10103-DPB11401 DPA10103-DPB11501 DPA10103-DPB11601 DPA10103-DPB11701 DPA10103-DPB11801 DPA10103-DPB11901 DPA10103-DPB12001 DPA10103-DPB12101 DPA10103-DPB12301 DPA10103-DPB12901 DPA10103-DPB13001 DPA10103-DPB13101; note = HLAs: DPA10103-DPB13401 DPA10103-DPB13901 DPA10103-DPB14001 DPA10103-DPB14101 DPA10103-DPB14801 DPA10103-DPB14901 DPA10103-DPB15001 DPA10103-DPB15101 DPA10103-DPB15501 DPA10103-DPB15901 DPA10103-DPB18001 DPA10104-DPB10101 DPA10104-DPB10301 DPA10104-DPB11001 DPA10104-DPB11301 DPA10104-DPB11501 DPA10105-DPB10101 DPA10105-DPB10301 DPA10105-DPB10401 DPA10105-DPB11801 DPA10105-DPB15001 DPA10106-DPB10101 DPA10106-DPB11101 DPA10201-DPB10101 DPA10201-DPB10201 DPA10201-DPB10202 DPA10201-DPB10501 DPA10201-DPB10601 DPA10201-DPB110601 DPA10201-DPB11101 DPA10201-DPB11301 DPA10201-DPB113101 DPA10201-DPB113301 DPA10201-DPB11501 DPA10201-DPB11601 DPA10201-DPB11701 DPA10201-DPB11801 DPA10201-DPB11901 DPA10201-DPB13001 DPA10201-DPB15501 DPA10201-DPB19101 DPA10202-DPB10101 DPA10202-DPB10201 DPA10202-DPB10202 DPA10202-DPB10301 DPA10202-DPB10401 DPA10202-DPB10402 DPA10202-DPB10501 DPA10202-DPB10901 DPA10202-DPB110001 DPA10202-DPB110501 DPA10202-DPB110601 DPA10202-DPB11101 DPA10202-DPB11301; note = HLAs: DPA10202-DPB113101 DPA10202-DPB11701 DPA10202-DPB11801 DPA10202-DPB11901 DPA10202-DPB12101 DPA10202-DPB12901 DPA10202-DPB13001 DPA10202-DPB13101 DPA10202-DPB13801 DPA10202-DPB14501 DPA10202-DPB15501 DPA10202-DPB16501 DPA10202-DPB18501 DPA10301-DPB10101 DPA10301-DPB10201 DPA10301-DPB10202 DPA10301-DPB10301 DPA10301-DPB10401 DPA10301-DPB10402 DPA10301-DPB10901 DPA10301-DPB110501 DPA10301-DPB110601 DPA10301-DPB11101 DPA10301-DPB11301 DPA10301-DPB11701 DPA10301-DPB11801 DPA10301-DPB12301 DPA10301-DPB13901 DPA10301-DPB14001 DPA10301-DPB14901 DPA10301-DPB15501 DPA10301-DPB16501 DPA10301-DPB17501 DPA10301-DPB18001 DPA10401-DPB10101 DPA10401-DPB10201 DPA10401-DPB10202 DPA10401-DPB10301 DPA10401-DPB10402 DPA10401-DPB10501 DPA10401-DPB110501 DPA10401-DPB11301 DPA10401-DPB113301 DPA10401-DPB11401 DPA10401-DPB14901 DQA10102-DQB10501 DQA10102-DQB10503 DQA10103-DQB10501 DQA10103-DQB10609
IPVGEIYKRWIILGLNKIVR

SEQ ID NO: 3924 - protein, 21 aa, Human immunodeficiency virus 1
  source 1..21: note = HLAs: DRB1_0101 DRB1_0102 DRB1_0404 DRB1_0405 DRB1_0408 DRB1_0410 DRB1_0701 DRB1_0801 DRB1_0802 DRB1_0803 DRB1_0804 DRB1_0806 DRB1_0809 DRB1_0813 DRB1_0901 DRB1_1001 DRB1_1101 DRB1_1102 DRB1_1103 DRB1_1104 DRB1_1114 DRB1_1201 DRB1_1202 DRB1_1301 DRB1_1302 DRB1_1303 DRB1_1304 DRB1_1305 DRB1_1312 DRB1_1401 DRB1_1402 DRB1_1403 DRB1_1404 DRB1_1405 DRB1_1406 DRB1_1407 DRB1_1454 DRB1_1501 DRB1_1502 DRB1_1503 DRB1_1601 DRB1_1602 DPA10103-DPB10101 DPA10103-DPB10201 DPA10103-DPB10202 DPA10103-DPB10301 DPA10103-DPB10501 DPA10103-DPB10601 DPA10103-DPB11101 DPA10103-DPB112401 DPA10103-DPB11301 DPA10103-DPB113101 DPA10103-DPB113301 DPA10103-DPB11501 DPA10103-DPB11601 DPA10103-DPB11701 DPA10103-DPB11801 DPA10103-DPB11901 DPA10103-DPB12001 DPA10103-DPB12101 DPA10103-DPB13001 DPA10103-DPB13101 DPA10103-DPB13401 DPA10103-DPB14001 DPA10103-DPB14101 DPA10103-DPB14801 DPA10103-DPB15001 DPA10103-DPB15501 DPA10104-DPB10101 DPA10104-DPB10301 DPA10104-DPB11301 DPA10104-DPB11501 DPA10105-DPB10101; note = HLAs: DPA10105-DPB10301 DPA10105-DPB11801 DPA10105-DPB15001 DPA10106-DPB10101 DPA10201-DPB10101 DPA10201-DPB10501 DPA10201-DPB110601 DPA10201-DPB11501 DPA10201-DPB11601 DPA10201-DPB11901 DPA10202-DPB10101 DPA10202-DPB10201 DPA10202-DPB10202 DPA10202-DPB10501 DPA10202-DPB110601 DPA10202-DPB11101 DPA10202-DPB11801 DPA10202-DPB11901 DPA10202-DPB12101 DPA10202-DPB13001 DPA10202-DPB13101 DPA10202-DPB13801 DPA10202-DPB15501 DPA10202-DPB16501 DPA10301-DPB10101 DPA10301-DPB10201 DPA10301-DPB10202 DPA10301-DPB10401 DPA10301-DPB10402 DPA10301-DPB10901 DPA10301-DPB110501 DPA10301-DPB110601 DPA10301-DPB11101 DPA10301-DPB11301 DPA10301-DPB11701 DPA10301-DPB11801 DPA10301-DPB12301 DPA10301-DPB13901 DPA10301-DPB14001 DPA10301-DPB14901 DPA10301-DPB15501 DPA10301-DPB16501 DPA10301-DPB17501 DPA10301-DPB18001 DPA10401-DPB10101 DPA10401-DPB10201 DPA10401-DPB10202 DPA10401-DPB10301 DPA10401-DPB10402 DPA10401-DPB10501 DPA10401-DPB110501 DPA10401-DPB11301 DPA10401-DPB113301 DPA10401-DPB11401; note = HLAs: DPA10401-DPB14901 DQA10102-DQB10501 DQA10102-DQB10503 DQA10103-DQB10501 DQA10103-DQB10609
IPVGEIYKRWIILGLNKIVRM

SEQ ID NO: 3925 - protein, 22 aa, Human immunodeficiency virus 1
  source 1..22: note = HLAs: DRB1_0101 DRB1_0102 DRB1_0401 DRB1_0404 DRB1_0405 DRB1_0408 DRB1_0410 DRB1_0701 DRB1_0801 DRB1_0802 DRB1_0803 DRB1_0804 DRB1_0806 DRB1_0809 DRB1_0813 DRB1_0901 DRB1_1001 DRB1_1101 DRB1_1102 DRB1_1103 DRB1_1104 DRB1_1114 DRB1_1201 DRB1_1202 DRB1_1301 DRB1_1302 DRB1_1303 DRB1_1304 DRB1_1305 DRB1_1312 DRB1_1401 DRB1_1402 DRB1_1403 DRB1_1404 DRB1_1405 DRB1_1406 DRB1_1407 DRB1_1418 DRB1_1454 DRB1_1501 DRB1_1502 DRB1_1503 DRB1_1601 DRB1_1602 DPA10103-DPB10101 DPA10103-DPB10201 DPA10103-DPB10202 DPA10103-DPB10301 DPA10103-DPB10501 DPA10103-DPB10601 DPA10103-DPB11101 DPA10103-DPB112401 DPA10103-DPB11301 DPA10103-DPB113101 DPA10103-DPB113301 DPA10103-DPB11401 DPA10103-DPB11501 DPA10103-DPB11601 DPA10103-DPB11701 DPA10103-DPB11801 DPA10103-DPB11901 DPA10103-DPB12001 DPA10103-DPB12101 DPA10103-DPB13001 DPA10103-DPB13101 DPA10103-DPB13401 DPA10103-DPB14001 DPA10103-DPB14101 DPA10103-DPB14801 DPA10103-DPB15001 DPA10103-DPB15501 DPA10104-DPB10101 DPA10104-DPB10301 DPA10104-DPB11301; note = HLAs: DPA10104-DPB11501 DPA10105-DPB10101 DPA10105-DPB10301 DPA10105-DPB11801 DPA10105-DPB15001 DPA10106-DPB10101 DPA10201-DPB10101 DPA10201-DPB10202 DPA10201-DPB10501 DPA10201-DPB110601 DPA10201-DPB11501 DPA10201-DPB11601 DPA10201-DPB11901 DPA10201-DPB15501 DPA10202-DPB10101 DPA10202-DPB10201 DPA10202-DPB10202 DPA10202-DPB10401 DPA10202-DPB10501 DPA10202-DPB110601 DPA10202-DPB11101 DPA10202-DPB11301 DPA10202-DPB11801 DPA10202-DPB11901 DPA10202-DPB12101 DPA10202-DPB13001 DPA10202-DPB13101 DPA10202-DPB13801 DPA10202-DPB15501 DPA10202-DPB16501 DPA10301-DPB10101 DPA10301-DPB10201 DPA10301-DPB10202 DPA10301-DPB10401 DPA10301-DPB10402 DPA10301-DPB10901 DPA10301-DPB110501 DPA10301-DPB110601 DPA10301-DPB11101 DPA10301-DPB11301 DPA10301-DPB11701 DPA10301-DPB11801 DPA10301-DPB12301 DPA10301-DPB13901 DPA10301-DPB14001 DPA10301-DPB14901 DPA10301-DPB15501 DPA10301-DPB16501 DPA10301-DPB17501 DPA10301-DPB18001 DPA10401-DPB10101 DPA10401-DPB10201 DPA10401-DPB10202 DPA10401-DPB10301 DPA10401-DPB10402; note = HLAs: DPA10401-DPB10501 DPA10401-DPB110501 DPA10401-DPB11301 DPA10401-DPB113301 DPA10401-DPB11401 DPA10401-DPB14901 DQA10102-DQB10501 DQA10102-DQB10503 DQA10103-DQB10501 DQA10103-DQB10609
IPVGEIYKRWIILGLNKIVRMY

SEQ ID NO: 3926 - protein, 23 aa, Human immunodeficiency virus 1
  source 1..23: note = HLAs: DRB1_0101 DRB1_0102 DRB1_0301 DRB1_0401 DRB1_0404 DRB1_0405 DRB1_0408 DRB1_0410 DRB1_0701 DRB1_0801 DRB1_0802 DRB1_0803 DRB1_0804 DRB1_0806 DRB1_0809 DRB1_0813 DRB1_0901 DRB1_1001 DRB1_1101 DRB1_1102 DRB1_1103 DRB1_1104 DRB1_1114 DRB1_1201 DRB1_1202 DRB1_1301 DRB1_1302 DRB1_1303 DRB1_1304 DRB1_1305 DRB1_1312 DRB1_1401 DRB1_1402 DRB1_1403 DRB1_1404 DRB1_1405 DRB1_1406 DRB1_1407 DRB1_1418 DRB1_1454 DRB1_1501 DRB1_1502 DRB1_1503 DRB1_1601 DRB1_1602 DPA10103-DPB10101 DPA10103-DPB10201 DPA10103-DPB10202 DPA10103-DPB10301 DPA10103-DPB10501 DPA10103-DPB10601 DPA10103-DPB11101 DPA10103-DPB112401 DPA10103-DPB11301 DPA10103-DPB113101 DPA10103-DPB113301 DPA10103-DPB11401 DPA10103-DPB11501 DPA10103-DPB11601 DPA10103-DPB11701 DPA10103-DPB11801 DPA10103-DPB11901 DPA10103-DPB12001 DPA10103-DPB12101 DPA10103-DPB13001 DPA10103-DPB13101 DPA10103-DPB13401 DPA10103-DPB14001 DPA10103-DPB14101 DPA10103-DPB14801 DPA10103-DPB15001 DPA10103-DPB15501 DPA10104-DPB10101 DPA10104-DPB10301 DPA10104-DPB11301; note = HLAs: DPA10104-DPB11501 DPA10105-DPB10101 DPA10105-DPB10301 DPA10105-DPB11801 DPA10105-DPB15001 DPA10106-DPB10101 DPA10201-DPB10101 DPA10201-DPB10202 DPA10201-DPB10501 DPA10201-DPB110601 DPA10201-DPB11501 DPA10201-DPB11601 DPA10201-DPB11901 DPA10201-DPB15501 DPA10202-DPB10101 DPA10202-DPB10201 DPA10202-DPB10202 DPA10202-DPB10401 DPA10202-DPB10501 DPA10202-DPB110601 DPA10202-DPB11101 DPA10202-DPB11301 DPA10202-DPB113101 DPA10202-DPB11701 DPA10202-DPB11801 DPA10202-DPB11901 DPA10202-DPB12101 DPA10202-DPB13001 DPA10202-DPB13101 DPA10202-DPB13801 DPA10202-DPB15501 DPA10202-DPB16501 DPA10301-DPB10101 DPA10301-DPB10201 DPA10301-DPB10202 DPA10301-DPB10401 DPA10301-DPB10402 DPA10301-DPB10901 DPA10301-DPB110501 DPA10301-DPB110601 DPA10301-DPB11101 DPA10301-DPB11301 DPA10301-DPB11701 DPA10301-DPB11801 DPA10301-DPB12301 DPA10301-DPB13901 DPA10301-DPB14001 DPA10301-DPB14901 DPA10301-DPB15501 DPA10301-DPB16501 DPA10301-DPB17501 DPA10301-DPB18001 DPA10401-DPB10101 DPA10401-DPB10201; note = HLAs: DPA10401-DPB10202 DPA10401-DPB10301 DPA10401-DPB10402 DPA10401-DPB10501 DPA10401-DPB110501 DPA10401-DPB11301 DPA10401-DPB113301 DPA10401-DPB11401 DPA10401-DPB14901 DQA10102-DQB10501 DQA10102-DQB10503 DQA10103-DQB10501 DQA10103-DQB10609
IPVGEIYKRWIILGLNKIVRMYS

SEQ ID NO: 3927 - protein, 24 aa, Human immunodeficiency virus 1
  source 1..24: note = HLAs: DRB1_0101 DRB1_0102 DRB1_0301 DRB1_0401 DRB1_0404 DRB1_0405 DRB1_0408 DRB1_0410 DRB1_0701 DRB1_0801 DRB1_0802 DRB1_0803 DRB1_0804 DRB1_0806 DRB1_0809 DRB1_0813 DRB1_0901 DRB1_1001 DRB1_1101 DRB1_1102 DRB1_1103 DRB1_1104 DRB1_1114 DRB1_1201 DRB1_1202 DRB1_1301 DRB1_1302 DRB1_1303 DRB1_1304 DRB1_1305 DRB1_1312 DRB1_1401 DRB1_1402 DRB1_1403 DRB1_1404 DRB1_1405 DRB1_1406 DRB1_1407 DRB1_1418 DRB1_1454 DRB1_1501 DRB1_1502 DRB1_1503 DRB1_1601 DRB1_1602 DPA10103-DPB10101 DPA10103-DPB10201 DPA10103-DPB10202 DPA10103-DPB10301 DPA10103-DPB10401 DPA10103-DPB10501 DPA10103-DPB10601 DPA10103-DPB11101 DPA10103-DPB112401 DPA10103-DPB112601 DPA10103-DPB11301 DPA10103-DPB113101 DPA10103-DPB113301 DPA10103-DPB11401 DPA10103-DPB11501 DPA10103-DPB11601 DPA10103-DPB11701 DPA10103-DPB11801 DPA10103-DPB11901 DPA10103-DPB12001 DPA10103-DPB12101 DPA10103-DPB12301 DPA10103-DPB12901 DPA10103-DPB13001 DPA10103-DPB13101 DPA10103-DPB13401 DPA10103-DPB13901 DPA10103-DPB14001 DPA10103-DPB14101 DPA10103-DPB14801; note = HLAs: DPA10103-DPB15001 DPA10103-DPB15501 DPA10104-DPB10101 DPA10104-DPB10301 DPA10104-DPB11301 DPA10104-DPB11501 DPA10105-DPB10101 DPA10105-DPB10301 DPA10105-DPB10401 DPA10105-DPB11801 DPA10105-DPB15001 DPA10106-DPB10101 DPA10201-DPB10101 DPA10201-DPB10202 DPA10201-DPB10501 DPA10201-DPB110601 DPA10201-DPB11501 DPA10201-DPB11601 DPA10201-DPB11801 DPA10201-DPB11901 DPA10201-DPB15501 DPA10202-DPB10101 DPA10202-DPB10201 DPA10202-DPB10202 DPA10202-DPB10401 DPA10202-DPB10501 DPA10202-DPB110601 DPA10202-DPB11101 DPA10202-DPB11301 DPA10202-DPB113101 DPA10202-DPB11701 DPA10202-DPB11801 DPA10202-DPB11901 DPA10202-DPB12101 DPA10202-DPB13001 DPA10202-DPB13101 DPA10202-DPB13801 DPA10202-DPB15501 DPA10202-DPB16501 DPA10202-DPB18501 DPA10301-DPB10101 DPA10301-DPB10201 DPA10301-DPB10202 DPA10301-DPB10401 DPA10301-DPB10402 DPA10301-DPB10901 DPA10301-DPB110501 DPA10301-DPB110601 DPA10301-DPB11101 DPA10301-DPB11301 DPA10301-DPB11701 DPA10301-DPB11801 DPA10301-DPB12301 DPA10301-DPB13901; note = HLAs: DPA10301-DPB14001 DPA10301-DPB14901 DPA10301-DPB15501 DPA10301-DPB16501 DPA10301-DPB17501 DPA10301-DPB18001 DPA10401-DPB10101 DPA10401-DPB10201 DPA10401-DPB10202 DPA10401-DPB10301 DPA10401-DPB10402 DPA10401-DPB10501 DPA10401-DPB110501 DPA10401-DPB11301 DPA10401-DPB113301 DPA10401-DPB11401 DPA10401-DPB14901 DQA10102-DQB10501 DQA10102-DQB10503 DQA10102-DQB10609 DQA10103-DQB10501 DQA10103-DQB10503 DQA10103-DQB10601 DQA10103-DQB10602 DQA10103-DQB10608 DQA10103-DQB10609
IPVGEIYKRWIILGLNKIVRMYSP

SEQ ID NO: 3928 - protein, 15 aa, Human immunodeficiency virus 1
  source 1..15: note = HLAs: DQA10201-DQB10301
IPYNPQSQGVVESMN

SEQ ID NO: 3929 - protein, 16 aa, Human immunodeficiency virus 1
  source 1..16: note = HLAs: DQA10201-DQB10301
IPYNPQSQGVVESMNK

SEQ ID NO: 3930 - protein, 17 aa, Human immunodeficiency virus 1
  source 1..17: note = HLAs: DQA10201-DQB10301
IPYNPQSQGVVESMNKE

SEQ ID NO: 3931 - protein, 20 aa, Human immunodeficiency virus 1
  source 1..20: note = HLAs: DQA10201-DQB10301
IPYNPQSQGVVESMNKELKK

SEQ ID NO: 3932 - protein, 22 aa, Human immunodeficiency virus 1
  source 1..22: note = HLAs: DRB1_1102 DRB1_1103 DRB1_1104 DRB1_1301 DRB1_1304 DRB1_1406
IPYNPQSQGVVESMNKELKKII

SEQ ID NO: 3933 - protein, 23 aa, Human immunodeficiency virus 1
  source 1..23: note = HLAs: DRB1_1102 DRB1_1103 DRB1_1104 DRB1_1301 DRB1_1304 DRB1_1406
IPYNPQSQGVVESMNKELKKIIG

SEQ ID NO: 3934 - protein, 24 aa, Human immunodeficiency virus 1
  source 1..24: note = HLAs: DRB1_0806 DRB1_1102 DRB1_1103 DRB1_1104 DRB1_1301 DRB1_1304 DRB1_1406
IPYNPQSQGVVESMNKELKKIIGQ

SEQ ID NO: 3935 - protein, 25 aa, Human immunodeficiency virus 1
  source 1..25: note = HLAs: DRB1_0806 DRB1_1101 DRB1_1102 DRB1_1103 DRB1_1104 DRB1_1301 DRB1_1304 DRB1_1305 DRB1_1406
IPYNPQSQGVVESMNKELKKIIGQV

SEQ ID NO: 3936 - protein, 14 aa, Human immunodeficiency virus 1
  source 1..14: note = HLAs: DRB1_0101 DRB1_0802 DRB1_0804 DRB1_0806 DRB1_0809 DRB1_0813 DRB1_1001 DRB1_1102 DRB1_1104 DRB1_1114 DRB1_1301 DRB1_1302 DRB1_1304 DRB1_1501 DQA10102-DQB10501
IQKLVGKLNWASQI

SEQ ID NO: 3937 - protein, 15 aa, Human immunodeficiency virus 1
  source 1..15: note = HLAs: DRB1_0101 DRB1_0102 DRB1_0401 DRB1_0402 DRB1_0404 DRB1_0408 DRB1_0410 DRB1_0701 DRB1_0801 DRB1_0802 DRB1_0804 DRB1_0806 DRB1_0809 DRB1_0813 DRB1_1001 DRB1_1101 DRB1_1102 DRB1_1103 DRB1_1104 DRB1_1114 DRB1_1202 DRB1_1301 DRB1_1302 DRB1_1304 DRB1_1305 DRB1_1402 DRB1_1406 DRB1_1501 DRB1_1502 DRB1_1503 DRB1_1601 DRB1_1602 DPA10103-DPB11501 DPA10104-DPB11501 DPA10301-DPB11801 DPA10301-DPB14001 DQA10102-DQB10501 DQA10103-DQB10501 DQA10103-DQB10601
IQKLVGKLNWASQIY

SEQ ID NO: 3938 - protein, 16 aa, Human immunodeficiency virus 1
  source 1..16: note = HLAs: DRB1_0101 DRB1_0402 DRB1_0404 DRB1_0801 DRB1_0802 DRB1_0804 DRB1_0806 DRB1_0809 DRB1_0813 DRB1_1001 DRB1_1102 DRB1_1103 DRB1_1104 DRB1_1114 DRB1_1301 DRB1_1302 DRB1_1304 DRB1_1406 DRB1_1501 DQA10102-DQB10501 DQA10102-DQB10503 DQA10103-DQB10501
IQKLVGKLNWASQIYP

SEQ ID NO: 3939 - protein, 17 aa, Human immunodeficiency virus 1
  source 1..17: note = HLAs: DRB1_0101 DRB1_0404 DRB1_0410 DRB1_0801 DRB1_0802 DRB1_0804 DRB1_0806 DRB1_0809 DRB1_0813 DRB1_1001 DRB1_1101 DRB1_1102 DRB1_1103 DRB1_1104 DRB1_1114 DRB1_1301 DRB1_1302 DRB1_1304 DRB1_1305 DRB1_1406 DRB1_1501 DRB1_1503 DPA10301-DPB11801 DQA10101-DQB10601 DQA10102-DQB10501 DQA10102-DQB10503 DQA10102-DQB10601 DQA10102-DQB10602 DQA10102-DQB10609 DQA10102-DQB10610 DQA10102-DQB10611 DQA10103-DQB10501 DQA10103-DQB10601 DQA10103-DQB10602 DQA10103-DQB10609 DQA10201-DQB10301
IQKLVGKLNWASQIYPG

SEQ ID NO: 3940 - protein, 18 aa, Human immunodeficiency virus 1
  source 1..18: note = HLAs: DPA10301-DPB10201 DPA10301-DPB10202 DQA10101-DQB10601 DQA10102-DQB10501 DQA10102-DQB10503 DQA10102-DQB10601 DQA10102-DQB10602 DQA10102-DQB10609 DQA10102-DQB10610 DQA10102-DQB10611 DQA10103-DQB10501 DQA10103-DQB10601 DQA10103-DQB10602 DQA10103-DQB10609 DQA10201-DQB10301
IQKLVGKLNWASQIYPGI

SEQ ID NO: 3941 - protein, 19 aa, Human immunodeficiency virus 1
  source 1..19: note = HLAs: DRB1_0101 DRB1_0804 DRB1_0806 DRB1_1001 DRB1_1102 DRB1_1104 DRB1_1114 DRB1_1301 DRB1_1302 DRB1_1304 DRB1_1501 DPA10103-DPB11501 DPA10104-DPB11501 DPA10202-DPB10101 DPA10301-DPB10101 DPA10301-DPB10201 DPA10301-DPB10202 DPA10301-DPB10401 DPA10301-DPB110601 DPA10301-DPB11801 DPA10301-DPB12301 DPA10301-DPB13901 DPA10301-DPB14001 DPA10301-DPB16501 DPA10401-DPB10101 DPA10401-DPB10201 DPA10401-DPB10202 DQA10101-DQB10601 DQA10101-DQB10602 DQA10102-DQB10501 DQA10102-DQB10503 DQA10102-DQB10601 DQA10102-DQB10602 DQA10102-DQB10603 DQA10102-DQB10609 DQA10102-DQB10610 DQA10102-DQB10611 DQA10102-DQB10614 DQA10103-DQB10501 DQA10103-DQB10503 DQA10103-DQB10601 DQA10103-DQB10602 DQA10103-DQB10603 DQA10103-DQB10609 DQA10103-DQB10614 DQA10104-DQB10602 DQA10105-DQB10602 DQA10201-DQB10301 DQA10201-DQB10303 DQA10301-DQB10301 DQA10302-DQB10301 DQA10303-DQB10301 DQA10501-DQB10301 DQA10501-DQB10319 DQA10503-DQB10301 DQA10505-DQB10301 DQA10505-DQB10309 DQA10505-DQB10319 DQA10508-DQB10301 DQA10509-DQB10301; note = HLAs: DQA10601-DQB10301
IQKLVGKLNWASQIYPGIK

SEQ ID NO: 3942 - protein, 20 aa, Human immunodeficiency virus 1
  source 1..20: note = HLAs: DRB1_0101 DRB1_0102 DRB1_0404 DRB1_0410 DRB1_0701 DRB1_0801 DRB1_0802 DRB1_0804 DRB1_0806 DRB1_0809 DRB1_0813 DRB1_0901 DRB1_1001 DRB1_1102 DRB1_1104 DRB1_1114 DRB1_1301 DRB1_1302 DRB1_1304 DRB1_1406 DRB1_1501 DRB1_1502 DRB1_1503 DRB1_1601 DRB1_1602 DPA10103-DPB10101 DPA10103-DPB10201 DPA10103-DPB10202 DPA10103-DPB10401 DPA10103-DPB112601 DPA10103-DPB11501 DPA10103-DPB11601 DPA10103-DPB11901 DPA10103-DPB12301 DPA10103-DPB13101 DPA10103-DPB13401 DPA10103-DPB13901 DPA10103-DPB14001 DPA10103-DPB14801 DPA10103-DPB15001 DPA10104-DPB10101 DPA10104-DPB11501 DPA10105-DPB10101 DPA10105-DPB10401 DPA10105-DPB15001 DPA10106-DPB10101 DPA10201-DPB10101 DPA10201-DPB11501 DPA10202-DPB10101 DPA10202-DPB10201 DPA10202-DPB10202 DPA10202-DPB110601 DPA10202-DPB11901 DPA10202-DPB13101 DPA10202-DPB15501 DPA10202-DPB16501 DPA10301-DPB10101 DPA10301-DPB10201 DPA10301-DPB10202 DPA10301-DPB10401 DPA10301-DPB10402 DPA10301-DPB110501 DPA10301-DPB110601 DPA10301-DPB11801 DPA10301-DPB12301 DPA10301-DPB13901; note = HLAs: DPA10301-DPB14001 DPA10301-DPB14901 DPA10301-DPB15501 DPA10301-DPB16501 DPA10301-DPB18001 DPA10401-DPB10101 DPA10401-DPB10201 DPA10401-DPB10202 DPA10401-DPB10501 DQA10101-DQB10601 DQA10101-DQB10602 DQA10102-DQB10501 DQA10102-DQB10503 DQA10102-DQB10601 DQA10102-DQB10602 DQA10102-DQB10603 DQA10102-DQB10609 DQA10102-DQB10610 DQA10102-DQB10611 DQA10102-DQB10614 DQA10103-DQB10501 DQA10103-DQB10503 DQA10103-DQB10601 DQA10103-DQB10602 DQA10103-DQB10603 DQA10103-DQB10604 DQA10103-DQB10608 DQA10103-DQB10609 DQA10103-DQB10614 DQA10104-DQB10602 DQA10105-DQB10602 DQA10201-DQB10301 DQA10201-DQB10303 DQA10301-DQB10301 DQA10302-DQB10301 DQA10303-DQB10301 DQA10501-DQB10301 DQA10501-DQB10319 DQA10503-DQB10301 DQA10505-DQB10301 DQA10505-DQB10309 DQA10505-DQB10319 DQA10505-DQB10402 DQA10506-DQB10303 DQA10508-DQB10301 DQA10509-DQB10301 DQA10601-DQB10301
IQKLVGKLNWASQIYPGIKV

SEQ ID NO: 3943 - protein, 14 aa, Human immunodeficiency virus 1
  source 1..14: note = HLAs: DRB1_0806 DRB1_1102 DRB1_1103 DRB1_1104 DRB1_1301 DRB1_1304
IQNFRVYYRDSRDP

SEQ ID NO: 3944 - protein, 13 aa, Human immunodeficiency virus 1
  source 1..13: note = HLAs: DRB1_0301 DPA10103-DPB11501 DPA10104-DPB11501 DPA10301-DPB10101 DPA10301-DPB10201 DPA10301-DPB11801 DPA10301-DPB14001 DPA10401-DPB10101 DQA10102-DQB10501
IRKVLFLDGIDKA

SEQ ID NO: 3945 - protein, 14 aa, Human immunodeficiency virus 1
  source 1..14: note = HLAs: DRB1_0101 DRB1_0102 DRB1_0301 DRB1_0401 DRB1_0404 DRB1_0405 DRB1_0408 DRB1_0410 DRB1_1001 DRB1_1114 DRB1_1302 DRB1_1406 DRB1_1601 DPA10103-DPB10101 DPA10103-DPB11501 DPA10103-DPB15001 DPA10104-DPB10101 DPA10104-DPB11501 DPA10105-DPB10101 DPA10105-DPB15001 DPA10202-DPB10101 DPA10301-DPB10101 DPA10301-DPB10201 DPA10301-DPB10202 DPA10301-DPB10401 DPA10301-DPB110601 DPA10301-DPB11801 DPA10301-DPB12301 DPA10301-DPB13901 DPA10301-DPB14001 DPA10301-DPB16501 DPA10401-DPB10101 DPA10401-DPB10501 DQA10102-DQB10501 DQA10102-DQB10503 DQA10103-DQB10501
IRKVLFLDGIDKAQ

SEQ ID NO: 3946 - protein, 15 aa, Human immunodeficiency virus 1
  source 1..15: note = HLAs: DRB1_0101 DRB1_0102 DRB1_0301 DRB1_0401 DRB1_0404 DRB1_0405 DRB1_0408 DRB1_0410 DRB1_0804 DRB1_0806 DRB1_1001 DRB1_1102 DRB1_1103 DRB1_1104 DRB1_1114 DRB1_1202 DRB1_1301 DRB1_1302 DRB1_1304 DRB1_1402 DRB1_1406 DRB1_1501 DRB1_1503 DRB1_1601 DRB1_1602 DPA10103-DPB10101 DPA10103-DPB11501 DPA10103-DPB11801 DPA10103-DPB13101 DPA10103-DPB13401 DPA10103-DPB14001 DPA10103-DPB15001 DPA10104-DPB10101 DPA10104-DPB11501 DPA10105-DPB10101 DPA10105-DPB11801 DPA10105-DPB15001 DPA10201-DPB11501 DPA10202-DPB10101 DPA10202-DPB10501 DPA10202-DPB110601 DPA10202-DPB11801 DPA10202-DPB11901 DPA10202-DPB13101 DPA10202-DPB13801 DPA10301-DPB10101 DPA10301-DPB10201 DPA10301-DPB10202 DPA10301-DPB10401 DPA10301-DPB110601 DPA10301-DPB11801 DPA10301-DPB12301 DPA10301-DPB13901 DPA10301-DPB14001 DPA10301-DPB16501 DPA10401-DPB10101 DPA10401-DPB10201 DPA10401-DPB10202 DPA10401-DPB10501 DQA10102-DQB10501 DQA10102-DQB10503 DQA10103-DQB10501
IRKVLFLDGIDKAQE

SEQ ID NO: 3947 - protein, 16 aa, Human immunodeficiency virus 1
  source 1..16: note = HLAs: DRB1_0101 DRB1_0102 DRB1_0301 DRB1_0401 DRB1_0404 DRB1_0405 DRB1_0408 DRB1_0410 DRB1_1001 DRB1_1102 DRB1_1104 DRB1_1114 DRB1_1301 DRB1_1302 DRB1_1304 DRB1_1406 DRB1_1601 DPA10103-DPB10101 DPA10103-DPB11501 DPA10103-DPB15001 DPA10104-DPB10101 DPA10104-DPB11501 DPA10105-DPB10101 DPA10105-DPB15001 DPA10201-DPB11501 DPA10202-DPB10101 DPA10202-DPB110601 DPA10202-DPB11901 DPA10301-DPB10101 DPA10301-DPB10201 DPA10301-DPB10202 DPA10301-DPB10401 DPA10301-DPB110601 DPA10301-DPB11801 DPA10301-DPB12301 DPA10301-DPB13901 DPA10301-DPB14001 DPA10301-DPB16501 DPA10401-DPB10101 DPA10401-DPB10501 DQA10102-DQB10501 DQA10102-DQB10502 DQA10102-DQB10503 DQA10103-DQB10501
IRKVLFLDGIDKAQEE

SEQ ID NO: 3948 - protein, 17 aa, Human immunodeficiency virus 1
  source 1..17: note = HLAs: DRB1_0101 DRB1_0102 DRB1_0301 DRB1_0401 DRB1_0404 DRB1_0405 DRB1_0408 DRB1_0410 DRB1_0806 DRB1_1001 DRB1_1102 DRB1_1104 DRB1_1301 DRB1_1304 DRB1_1406 DRB1_1601 DPA10103-DPB10101 DPA10103-DPB11501 DPA10103-DPB15001 DPA10104-DPB10101 DPA10104-DPB11501 DPA10105-DPB10101 DPA10105-DPB15001 DPA10201-DPB11501 DPA10202-DPB10101 DPA10301-DPB10101 DPA10301-DPB10201 DPA10301-DPB10202 DPA10301-DPB10401 DPA10301-DPB110601 DPA10301-DPB11801 DPA10301-DPB12301 DPA10301-DPB13901 DPA10301-DPB14001 DPA10301-DPB16501 DPA10401-DPB10101 DPA10401-DPB10501 DQA10102-DQB10501 DQA10102-DQB10503 DQA10103-DQB10501
IRKVLFLDGIDKAQEEH

SEQ ID NO: 3949 - protein, 18 aa, Human immunodeficiency virus 1
  source 1..18: note = HLAs: DRB1_0301 DRB1_0401 DPA10103-DPB11501 DPA10104-DPB11501 DPA10301-DPB10101 DPA10301-DPB11801 DPA10401-DPB10101 DQA10102-DQB10501
IRKVLFLDGIDKAQEEHE

SEQ ID NO: 3950 - protein, 13 aa, Human immunodeficiency virus 1
  source 1..13: note = HLAs: DRB1_1001 DQA10102-DQB10501
IRYQYNVLPQGWK

SEQ ID NO: 3951 - protein, 14 aa, Human immunodeficiency virus 1
  source 1..14: note = HLAs: DRB1_0101 DRB1_0401 DRB1_0408 DRB1_1001 DPA10401-DPB10101 DQA10102-DQB10501
IRYQYNVLPQGWKG

SEQ ID NO: 3952 - protein, 15 aa, Human immunodeficiency virus 1
  source 1..15: note = HLAs: DRB1_0101 DRB1_0401 DRB1_0404 DRB1_0408 DRB1_0801 DRB1_0802 DRB1_0806 DRB1_0809 DRB1_0813 DRB1_1001 DRB1_1101 DRB1_1103 DRB1_1104 DRB1_1114 DRB1_1302 DRB1_1304 DRB1_1305 DRB1_1402 DRB1_1406 DRB1_1601 DRB1_1602 DPA10401-DPB10101 DQA10102-DQB10501
IRYQYNVLPQGWKGS

SEQ ID NO: 3953 - protein, 16 aa, Human immunodeficiency virus 1
  source 1..16: note = HLAs: DRB1_0101 DRB1_0408 DRB1_0813 DRB1_1001 DRB1_1101 DRB1_1305 DPA10401-DPB10101 DQA10102-DQB10501
IRYQYNVLPQGWKGSP

SEQ ID NO: 3954 - protein, 17 aa, Human immunodeficiency virus 1
  source 1..17: note = HLAs: DRB1_0101 DRB1_1001 DRB1_1101 DRB1_1305 DPA10401-DPB10101 DQA10102-DQB10501
IRYQYNVLPQGWKGSPA

SEQ ID NO: 3955 - protein, 18 aa, Human immunodeficiency virus 1
  source 1..18: note = HLAs: DQA10102-DQB10501
IRYQYNVLPQGWKGSPAI

SEQ ID NO: 3956 - protein, 19 aa, Human immunodeficiency virus 1
  source 1..19: note = HLAs: DRB1_0101 DRB1_1001 DPA10401-DPB10101 DQA10102-DQB10501 DQA10505-DQB10402
IRYQYNVLPQGWKGSPAIF

SEQ ID NO: 3957 - protein, 20 aa, Human immunodeficiency virus 1
  source 1..20: note = HLAs: DRB1_0101 DRB1_0401 DRB1_0408 DRB1_0801 DRB1_0813 DRB1_0901 DRB1_1001 DRB1_1101 DRB1_1114 DRB1_1302 DRB1_1305 DRB1_1602 DPA10301-DPB10101 DPA10301-DPB10201 DPA10301-DPB110601 DPA10401-DPB10101 DPA10401-DPB10501 DQA10102-DQB10501 DQA10102-DQB10601 DQA10103-DQB10501 DQA10103-DQB10601 DQA10201-DQB10301 DQA10505-DQB10402
IRYQYNVLPQGWKGSPAIFQ

SEQ ID NO: 3958 - protein, 20 aa, Human immunodeficiency virus 1
  source 1..20: note = HLAs: DPA10401-DPB10101 DQA10103-DQB10601
ISKIGPENPYNTPVFAIKKK

SEQ ID NO: 3959 - protein, 22 aa, Human immunodeficiency virus 1
  source 1..22: note = HLAs: DRB1_1104
ISKIGPENPYNTPVFAIKKKDS

SEQ ID NO: 3960 - protein, 23 aa, Human immunodeficiency virus 1
  source 1..23: note = HLAs: DRB1_0806 DRB1_1101 DRB1_1103 DRB1_1104 DRB1_1305
ISKIGPENPYNTPVFAIKKKDST

SEQ ID NO: 3961 - protein, 24 aa, Human immunodeficiency virus 1
  source 1..24: note = HLAs: DRB1_0804 DRB1_0806 DRB1_1101 DRB1_1102 DRB1_1103 DRB1_1104 DRB1_1301 DRB1_1304 DRB1_1305
ISKIGPENPYNTPVFAIKKKDSTK

SEQ ID NO: 3962 - protein, 25 aa, Human immunodeficiency virus 1
  source 1..25: note = HLAs: DRB1_0801 DRB1_0804 DRB1_0806 DRB1_1101 DRB1_1102 DRB1_1103 DRB1_1104 DRB1_1301 DRB1_1304 DRB1_1305 DRB1_1406
ISKIGPENPYNTPVFAIKKKDSTKW

SEQ ID NO: 3963 - protein, 15 aa, Human immunodeficiency virus 1
  source 1..15: note = HLAs: DRB1_0101 DRB1_0701 DRB1_0804 DRB1_0806 DRB1_0901 DRB1_1001 DRB1_1102 DRB1_1103 DRB1_1104 DRB1_1301 DRB1_1304 DRB1_1406 DQA10102-DQB10501 DQA10103-DQB10601
ISPIETVPVKLKPGM

SEQ ID NO: 3964 - protein, 16 aa, Human immunodeficiency virus 1
  source 1..16: note = HLAs: DQA10102-DQB10501 DQA10103-DQB10601
ISPIETVPVKLKPGMD

SEQ ID NO: 3965 - protein, 17 aa, Human immunodeficiency virus 1
  source 1..17: note = HLAs: DRB1_1406
ISPIETVPVKLKPGMDG

SEQ ID NO: 3966 - protein, 20 aa, Human immunodeficiency virus 1
  source 1..20: note = HLAs: DRB1_1406 DQA10102-DQB10501
ISPIETVPVKLKPGMDGPKV

SEQ ID NO: 3967 - protein, 13 aa, Human immunodeficiency virus 1
  source 1..13: note = HLAs: DRB1_0101 DRB1_0806 DRB1_1102 DRB1_1103 DRB1_1301 DRB1_1304 DRB1_1406 DRB1_1501 DRB1_1503 DRB1_1601 DRB1_1602 DPA10301-DPB11801 DPA10301-DPB14001 DQA10102-DQB10501
ITKIQNFRVYYRD

SEQ ID NO: 3968 - protein, 13 aa, Human immunodeficiency virus 1
  source 1..13: note = HLAs: DRB1_0101 DRB1_0405 DRB1_0408 DRB1_1001 DPA10103-DPB11501 DPA10104-DPB11501 DPA10301-DPB10101 DPA10301-DPB10201 DPA10301-DPB10202 DPA10301-DPB10401 DPA10301-DPB12301 DPA10301-DPB13901 DPA10301-DPB14001 DQA10101-DQB10501 DQA10102-DQB10501 DQA10102-DQB10502 DQA10102-DQB10503 DQA10103-DQB10501 DQA10104-DQB10501 DQA10105-DQB10501 DQA10501-DQB10201 DQA10505-DQB10201 DQA10505-DQB10202
IVIYQYMDDLYVG

SEQ ID NO: 3969 - protein, 14 aa, Human immunodeficiency virus 1
  source 1..14: note = HLAs: DRB1_0101 DRB1_0401 DRB1_0404 DRB1_0405 DRB1_0408 DRB1_0410 DRB1_1001 DRB1_1501 DRB1_1601 DRB1_1602 DPA10103-DPB10101 DPA10103-DPB11501 DPA10104-DPB10101 DPA10104-DPB11501 DPA10105-DPB10101 DPA10201-DPB11501 DPA10202-DPB10101 DPA10301-DPB10101 DPA10301-DPB10201 DPA10301-DPB10202 DPA10301-DPB10401 DPA10301-DPB110601 DPA10301-DPB11801 DPA10301-DPB12301 DPA10301-DPB13901 DPA10301-DPB14001 DPA10301-DPB16501 DPA10401-DPB10101 DPA10401-DPB10202 DQA10101-DQB10501 DQA10101-DQB10503 DQA10102-DQB10501 DQA10102-DQB10502 DQA10102-DQB10503 DQA10102-DQB10609 DQA10103-DQB10501 DQA10104-DQB10501 DQA10104-DQB10503 DQA10105-DQB10501 DQA10107-DQB10503 DQA10501-DQB10201 DQA10505-DQB10201 DQA10505-DQB10202
IVIYQYMDDLYVGS

SEQ ID NO: 3970 - protein, 15 aa, Human immunodeficiency virus 1
  source 1..15: note = HLAs: DRB1_0101 DRB1_0102 DRB1_0401 DRB1_0404 DRB1_0405 DRB1_0408 DRB1_0410 DRB1_1001 DRB1_1501 DRB1_1502 DRB1_1503 DRB1_1601 DRB1_1602 DPA10103-DPB10101 DPA10103-DPB10202 DPA10103-DPB11501 DPA10104-DPB10101 DPA10104-DPB11501 DPA10105-DPB10101 DPA10106-DPB10101 DPA10201-DPB10101 DPA10201-DPB11501 DPA10202-DPB10101 DPA10301-DPB10101 DPA10301-DPB10201 DPA10301-DPB10202 DPA10301-DPB10401 DPA10301-DPB10402 DPA10301-DPB110501 DPA10301-DPB110601 DPA10301-DPB11801 DPA10301-DPB12301 DPA10301-DPB13901 DPA10301-DPB14001 DPA10301-DPB14901 DPA10301-DPB16501 DPA10301-DPB18001 DPA10401-DPB10101 DPA10401-DPB10201 DPA10401-DPB10202 DQA10101-DQB10501 DQA10101-DQB10503 DQA10102-DQB10501 DQA10102-DQB10502 DQA10102-DQB10503 DQA10102-DQB10604 DQA10102-DQB10609 DQA10103-DQB10501 DQA10104-DQB10501 DQA10104-DQB10503 DQA10105-DQB10501 DQA10107-DQB10503 DQA10501-DQB10201 DQA10505-DQB10201 DQA10505-DQB10202
IVIYQYMDDLYVGSD

SEQ ID NO: 3971 - protein, 16 aa, Human immunodeficiency virus 1
  source 1..16: note = HLAs: DRB1_0101 DRB1_0401 DRB1_0404 DRB1_0405 DRB1_0408 DRB1_0410 DRB1_1001 DRB1_1501 DRB1_1601 DRB1_1602 DPA10103-DPB10101 DPA10103-DPB11501 DPA10104-DPB10101 DPA10104-DPB11501 DPA10105-DPB10101 DPA10106-DPB10101 DPA10201-DPB10101 DPA10201-DPB11501 DPA10202-DPB10101 DPA10301-DPB10101 DPA10301-DPB10201 DPA10301-DPB10202 DPA10301-DPB10401 DPA10301-DPB10402 DPA10301-DPB110501 DPA10301-DPB110601 DPA10301-DPB11801 DPA10301-DPB12301 DPA10301-DPB13901 DPA10301-DPB14001 DPA10301-DPB14901 DPA10301-DPB16501 DPA10301-DPB18001 DPA10401-DPB10101 DPA10401-DPB10201 DPA10401-DPB10202 DQA10101-DQB10501 DQA10101-DQB10503 DQA10102-DQB10501 DQA10102-DQB10502 DQA10102-DQB10503 DQA10102-DQB10604 DQA10102-DQB10609 DQA10103-DQB10501 DQA10104-DQB10501 DQA10104-DQB10503 DQA10105-DQB10501 DQA10107-DQB10503 DQA10501-DQB10201 DQA10505-DQB10201 DQA10505-DQB10202
IVIYQYMDDLYVGSDL

SEQ ID NO: 3972 - protein, 17 aa, Human immunodeficiency virus 1
  source 1..17: note = HLAs: DRB1_0101 DRB1_0401 DRB1_0404 DRB1_0405 DRB1_0408 DRB1_0410 DRB1_1001 DRB1_1501 DRB1_1602 DPA10103-DPB10101 DPA10103-DPB11501 DPA10104-DPB10101 DPA10104-DPB11501 DPA10105-DPB10101 DPA10201-DPB11501 DPA10202-DPB10101 DPA10301-DPB10101 DPA10301-DPB10201 DPA10301-DPB10202 DPA10301-DPB10401 DPA10301-DPB110601 DPA10301-DPB11801 DPA10301-DPB12301 DPA10301-DPB13901 DPA10301-DPB14001 DPA10301-DPB16501 DPA10401-DPB10101 DPA10401-DPB10201 DPA10401-DPB10202 DQA10101-DQB10501 DQA10101-DQB10503 DQA10102-DQB10501 DQA10102-DQB10502 DQA10102-DQB10503 DQA10102-DQB10604 DQA10102-DQB10609 DQA10103-DQB10501 DQA10104-DQB10501 DQA10104-DQB10503 DQA10105-DQB10501 DQA10107-DQB10503
IVIYQYMDDLYVGSDLE

SEQ ID NO: 3973 - protein, 18 aa, Human immunodeficiency virus 1
  source 1..18: note = HLAs: DRB1_0405 DRB1_0408 DRB1_1001 DPA10103-DPB11501 DPA10104-DPB11501 DPA10301-DPB10101 DPA10301-DPB10201 DPA10301-DPB10202 DPA10301-DPB10401 DPA10301-DPB110601 DPA10301-DPB11801 DPA10301-DPB12301 DPA10301-DPB13901 DPA10301-DPB14001 DPA10401-DPB10101 DQA10101-DQB10501 DQA10102-DQB10501 DQA10102-DQB10502 DQA10102-DQB10503 DQA10102-DQB10609 DQA10103-DQB10501 DQA10104-DQB10501 DQA10105-DQB10501 DQA10501-DQB10201 DQA10505-DQB10201 DQA10505-DQB10202
IVIYQYMDDLYVGSDLEI

SEQ ID NO: 3974 - protein, 19 aa, Human immunodeficiency virus 1
  source 1..19: note = HLAs: DRB1_0101 DRB1_0405 DRB1_0408 DRB1_1001 DRB1_1602 DPA10103-DPB10101 DPA10103-DPB11501 DPA10104-DPB10101 DPA10104-DPB11501 DPA10105-DPB10101 DPA10201-DPB11501 DPA10202-DPB10101 DPA10301-DPB10101 DPA10301-DPB10201 DPA10301-DPB10202 DPA10301-DPB10401 DPA10301-DPB110601 DPA10301-DPB11801 DPA10301-DPB12301 DPA10301-DPB13901 DPA10301-DPB14001 DPA10301-DPB16501 DPA10401-DPB10101 DPA10401-DPB10201 DPA10401-DPB10202 DQA10101-DQB10501 DQA10102-DQB10501 DQA10102-DQB10502 DQA10102-DQB10503 DQA10102-DQB10604 DQA10102-DQB10609 DQA10103-DQB10501 DQA10104-DQB10501 DQA10105-DQB10501 DQA10501-DQB10201 DQA10505-DQB10201 DQA10505-DQB10202
IVIYQYMDDLYVGSDLEIG

SEQ ID NO: 3975 - protein, 20 aa, Human immunodeficiency virus 1
  source 1..20: note = HLAs: DRB1_0101 DRB1_0404 DRB1_0405 DRB1_0408 DRB1_0410 DRB1_1001 DRB1_1501 DRB1_1602 DPA10103-DPB10101 DPA10103-DPB11501 DPA10104-DPB10101 DPA10104-DPB11501 DPA10105-DPB10101 DPA10201-DPB11501 DPA10202-DPB10101 DPA10301-DPB10101 DPA10301-DPB10201 DPA10301-DPB10202 DPA10301-DPB10401 DPA10301-DPB10402 DPA10301-DPB110501 DPA10301-DPB110601 DPA10301-DPB11801 DPA10301-DPB12301 DPA10301-DPB13901 DPA10301-DPB14001 DPA10301-DPB14901 DPA10301-DPB16501 DPA10301-DPB18001 DPA10401-DPB10101 DPA10401-DPB10201 DPA10401-DPB10202 DQA10101-DQB10501 DQA10102-DQB10501 DQA10102-DQB10502 DQA10102-DQB10503 DQA10102-DQB10604 DQA10102-DQB10609 DQA10103-DQB10501 DQA10103-DQB10609 DQA10104-DQB10501 DQA10105-DQB10501 DQA10501-DQB10201 DQA10505-DQB10201 DQA10505-DQB10202
IVIYQYMDDLYVGSDLEIGQ

SEQ ID NO: 3976 - protein, 21 aa, Human immunodeficiency virus 1
  source 1..21: note = HLAs: DRB1_0101 DRB1_0405 DRB1_0408 DRB1_1001 DPA10103-DPB10101 DPA10103-DPB11501 DPA10104-DPB10101 DPA10104-DPB11501 DPA10105-DPB10101 DPA10301-DPB10101 DPA10301-DPB10201 DPA10301-DPB10202 DPA10301-DPB10401 DPA10301-DPB110601 DPA10301-DPB11801 DPA10301-DPB12301 DPA10301-DPB13901 DPA10301-DPB14001 DPA10301-DPB16501 DPA10401-DPB10101 DQA10101-DQB10501 DQA10102-DQB10501 DQA10102-DQB10502 DQA10102-DQB10503 DQA10102-DQB10604 DQA10102-DQB10609 DQA10103-DQB10501 DQA10104-DQB10501 DQA10105-DQB10501
IVIYQYMDDLYVGSDLEIGQH

SEQ ID NO: 3977 - protein, 22 aa, Human immunodeficiency virus 1
  source 1..22: note = HLAs: DRB1_0101 DRB1_0405 DRB1_0408 DRB1_1001 DPA10103-DPB10101 DPA10103-DPB11501 DPA10104-DPB10101 DPA10104-DPB11501 DPA10105-DPB10101 DPA10301-DPB10101 DPA10301-DPB10201 DPA10301-DPB10202 DPA10301-DPB10401 DPA10301-DPB110601 DPA10301-DPB11801 DPA10301-DPB12301 DPA10301-DPB13901 DPA10301-DPB14001 DPA10301-DPB16501 DPA10401-DPB10101 DPA10401-DPB10201 DPA10401-DPB10202 DQA10101-DQB10501 DQA10102-DQB10501 DQA10102-DQB10502 DQA10102-DQB10503 DQA10102-DQB10604 DQA10102-DQB10609 DQA10103-DQB10501 DQA10104-DQB10501 DQA10105-DQB10501
IVIYQYMDDLYVGSDLEIGQHR

SEQ ID NO: 3978 - protein, 13 aa, Human immunodeficiency virus 1
  source 1..13: note = HLAs: DRB1_0101 DRB1_0701 DRB1_0901 DRB1_1001 DRB1_1501 DRB1_1502 DRB1_1503 DPA10103-DPB10101 DPA10103-DPB10301 DPA10103-DPB10601 DPA10103-DPB10901 DPA10103-DPB11101 DPA10103-DPB112401 DPA10103-DPB11401 DPA10103-DPB11501 DPA10103-DPB12001 DPA10103-DPB12901 DPA10103-DPB15001 DPA10103-DPB15501 DPA10104-DPB10101 DPA10104-DPB10301 DPA10104-DPB11501 DPA10105-DPB10101 DPA10105-DPB10301 DPA10105-DPB15001 DPA10202-DPB10101 DPA10202-DPB15501 DPA10301-DPB10101 DPA10301-DPB10201 DPA10301-DPB10202 DPA10301-DPB10301 DPA10301-DPB10401 DPA10301-DPB10901 DPA10301-DPB110601 DPA10301-DPB11301 DPA10301-DPB11801 DPA10301-DPB12301 DPA10301-DPB13901 DPA10301-DPB14001 DPA10301-DPB15501 DPA10301-DPB16501 DPA10401-DPB10101 DPA10401-DPB10201 DPA10401-DPB10202 DPA10401-DPB10301 DPA10401-DPB10501 DPA10401-DPB11301 DPA10401-DPB113301 DPA10401-DPB11401 DQA10102-DQB10501 DQA10102-DQB10503 DQA10102-DQB10609 DQA10103-DQB10501 DQA10103-DQB10609
IVRMYSPVSILDI

SEQ ID NO: 3979 - protein, 14 aa, Human immunodeficiency virus 1
  source 1..14: note = HLAs: DQA10102-DQB10501
IVTDSQYALGIIQA

SEQ ID NO: 3980 - protein, 15 aa, Human immunodeficiency virus 1
  source 1..15: note = HLAs: DRB1_0101 DRB1_0901 DRB1_1001 DPA10301-DPB10101 DPA10401-DPB10101 DQA10102-DQB10501 DQA10102-DQB10503 DQA10102-DQB10601 DQA10102-DQB10602 DQA10102-DQB10609 DQA10102-DQB10611 DQA10103-DQB10501 DQA10103-DQB10601 DQA10103-DQB10602 DQA10103-DQB10609 DQA10201-DQB10301 DQA10201-DQB10303 DQA10301-DQB10301 DQA10301-DQB10304 DQA10302-DQB10301 DQA10302-DQB10304 DQA10303-DQB10301 DQA10303-DQB10304 DQA10401-DQB10301 DQA10401-DQB10319 DQA10501-DQB10301 DQA10501-DQB10319 DQA10503-DQB10301 DQA10505-DQB10301 DQA10505-DQB10302 DQA10505-DQB10309 DQA10505-DQB10319 DQA10505-DQB10402 DQA10506-DQB10303 DQA10508-DQB10301 DQA10509-DQB10301 DQA10601-DQB10301
IVTDSQYALGIIQAQ

SEQ ID NO: 3981 - protein, 16 aa, Human immunodeficiency virus 1
  source 1..16: note = HLAs: DRB1_0101 DRB1_1001 DPA10301-DPB10101 DPA10401-DPB10101 DQA10102-DQB10501 DQA10102-DQB10503 DQA10102-DQB10601 DQA10102-DQB10602 DQA10102-DQB10609 DQA10102-DQB10610 DQA10102-DQB10611 DQA10103-DQB10501 DQA10103-DQB10601 DQA10103-DQB10602 DQA10103-DQB10609 DQA10201-DQB10301 DQA10201-DQB10302 DQA10201-DQB10303 DQA10301-DQB10301 DQA10301-DQB10303 DQA10301-DQB10304 DQA10302-DQB10301 DQA10302-DQB10303 DQA10302-DQB10304 DQA10303-DQB10301 DQA10303-DQB10303 DQA10303-DQB10304 DQA10401-DQB10301 DQA10401-DQB10319 DQA10501-DQB10301 DQA10501-DQB10319 DQA10503-DQB10301 DQA10505-DQB10301 DQA10505-DQB10302 DQA10505-DQB10309 DQA10505-DQB10319 DQA10506-DQB10303 DQA10508-DQB10301 DQA10509-DQB10301 DQA10601-DQB10301
IVTDSQYALGIIQAQP

SEQ ID NO: 3982 - protein, 17 aa, Human immunodeficiency virus 1
  source 1..17: note = HLAs: DRB1_0101 DRB1_1001 DPA10301-DPB10101 DPA10401-DPB10101 DQA10102-DQB10501 DQA10102-DQB10503 DQA10102-DQB10601 DQA10102-DQB10602 DQA10102-DQB10609 DQA10102-DQB10610 DQA10102-DQB10611 DQA10103-DQB10501 DQA10103-DQB10601 DQA10103-DQB10602 DQA10103-DQB10609 DQA10201-DQB10301 DQA10201-DQB10302 DQA10201-DQB10303 DQA10301-DQB10301 DQA10301-DQB10304 DQA10302-DQB10301 DQA10302-DQB10304 DQA10303-DQB10301 DQA10303-DQB10304 DQA10401-DQB10301 DQA10401-DQB10319 DQA10501-DQB10301 DQA10501-DQB10319 DQA10503-DQB10301 DQA10505-DQB10301 DQA10505-DQB10302 DQA10505-DQB10309 DQA10505-DQB10319 DQA10506-DQB10303 DQA10508-DQB10301 DQA10509-DQB10301 DQA10601-DQB10301
IVTDSQYALGIIQAQPD

SEQ ID NO: 3983 - protein, 18 aa, Human immunodeficiency virus 1
  source 1..18: note = HLAs: DRB1_1001 DPA10301-DPB10101 DQA10102-DQB10501 DQA10102-DQB10503 DQA10102-DQB10601 DQA10102-DQB10602 DQA10102-DQB10609 DQA10102-DQB10611 DQA10103-DQB10601 DQA10201-DQB10301 DQA10301-DQB10301 DQA10301-DQB10304 DQA10302-DQB10301 DQA10302-DQB10304 DQA10303-DQB10301 DQA10303-DQB10304 DQA10401-DQB10301 DQA10401-DQB10319 DQA10501-DQB10301 DQA10501-DQB10319 DQA10503-DQB10301 DQA10505-DQB10301 DQA10505-DQB10302 DQA10505-DQB10309 DQA10505-DQB10319 DQA10508-DQB10301 DQA10509-DQB10301 DQA10601-DQB10301
IVTDSQYALGIIQAQPDK

SEQ ID NO: 3984 - protein, 19 aa, Human immunodeficiency virus 1
  source 1..19: note = HLAs: DRB1_0101 DRB1_0405 DRB1_0408 DRB1_0410 DRB1_1001 DPA10301-DPB10101 DPA10301-DPB110601 DPA10301-DPB16501 DPA10401-DPB10101 DQA10102-DQB10501 DQA10102-DQB10503 DQA10102-DQB10601 DQA10102-DQB10602 DQA10102-DQB10609 DQA10102-DQB10610 DQA10102-DQB10611 DQA10103-DQB10501 DQA10103-DQB10601 DQA10103-DQB10602 DQA10103-DQB10609 DQA10201-DQB10301 DQA10201-DQB10302 DQA10201-DQB10303 DQA10301-DQB10301 DQA10301-DQB10304 DQA10302-DQB10301 DQA10302-DQB10304 DQA10303-DQB10301 DQA10303-DQB10304 DQA10401-DQB10301 DQA10401-DQB10319 DQA10501-DQB10301 DQA10501-DQB10319 DQA10503-DQB10301 DQA10505-DQB10301 DQA10505-DQB10302 DQA10505-DQB10309 DQA10505-DQB10319 DQA10506-DQB10303 DQA10508-DQB10301 DQA10509-DQB10301 DQA10601-DQB10301
IVTDSQYALGIIQAQPDKS

SEQ ID NO: 3985 - protein, 20 aa, Human immunodeficiency virus 1
  source 1..20: note = HLAs: DRB1_0101 DRB1_0401 DRB1_0404 DRB1_0405 DRB1_0408 DRB1_0410 DRB1_0813 DRB1_0901 DRB1_1001 DPA10103-DPB10101 DPA10103-DPB11501 DPA10103-DPB15001 DPA10104-DPB10101 DPA10104-DPB11501 DPA10105-DPB10101 DPA10105-DPB15001 DPA10202-DPB10101 DPA10301-DPB10101 DPA10301-DPB10201 DPA10301-DPB10202 DPA10301-DPB110601 DPA10301-DPB11801 DPA10301-DPB14001 DPA10301-DPB16501 DPA10401-DPB10101 DPA10401-DPB10301 DPA10401-DPB10501 DQA10101-DQB10601 DQA10102-DQB10501 DQA10102-DQB10503 DQA10102-DQB10601 DQA10102-DQB10602 DQA10102-DQB10604 DQA10102-DQB10609 DQA10102-DQB10610 DQA10102-DQB10611 DQA10103-DQB10501 DQA10103-DQB10503 DQA10103-DQB10601 DQA10103-DQB10602 DQA10103-DQB10609 DQA10201-DQB10301 DQA10201-DQB10302 DQA10201-DQB10303 DQA10301-DQB10301 DQA10301-DQB10304 DQA10302-DQB10301 DQA10302-DQB10304 DQA10303-DQB10301 DQA10303-DQB10304 DQA10401-DQB10301 DQA10401-DQB10319 DQA10501-DQB10301 DQA10501-DQB10319 DQA10503-DQB10301 DQA10505-DQB10301 DQA10505-DQB10302 DQA10505-DQB10309 DQA10505-DQB10319; note = HLAs: DQA10505-DQB10402 DQA10506-DQB10303 DQA10508-DQB10301 DQA10509-DQB10301 DQA10601-DQB10301
IVTDSQYALGIIQAQPDKSE

SEQ ID NO: 3986 - protein, 21 aa, Human immunodeficiency virus 1
  source 1..21: note = HLAs: DRB1_0101 DRB1_0401 DRB1_0404 DRB1_0405 DRB1_0408 DRB1_0410 DRB1_1001 DPA10301-DPB10101 DPA10301-DPB16501 DPA10401-DPB10101 DQA10102-DQB10501 DQA10102-DQB10503 DQA10102-DQB10601 DQA10102-DQB10602 DQA10102-DQB10609 DQA10102-DQB10611 DQA10103-DQB10501 DQA10103-DQB10601 DQA10103-DQB10609 DQA10201-DQB10301 DQA10201-DQB10303 DQA10301-DQB10301 DQA10302-DQB10301 DQA10303-DQB10301 DQA10401-DQB10301 DQA10401-DQB10319 DQA10501-DQB10301 DQA10501-DQB10319 DQA10503-DQB10301 DQA10505-DQB10301 DQA10505-DQB10309 DQA10505-DQB10319 DQA10506-DQB10303 DQA10508-DQB10301 DQA10509-DQB10301 DQA10601-DQB10301
IVTDSQYALGIIQAQPDKSES

SEQ ID NO: 3987 - protein, 22 aa, Human immunodeficiency virus 1
  source 1..22: note = HLAs: DRB1_0101 DRB1_0401 DRB1_0404 DRB1_0405 DRB1_0408 DRB1_0410 DRB1_1001 DPA10301-DPB10101 DPA10301-DPB16501 DPA10401-DPB10101 DQA10102-DQB10501 DQA10102-DQB10503 DQA10102-DQB10601 DQA10102-DQB10602 DQA10102-DQB10609 DQA10102-DQB10611 DQA10103-DQB10501 DQA10103-DQB10601 DQA10103-DQB10609 DQA10201-DQB10301 DQA10201-DQB10303 DQA10301-DQB10301 DQA10302-DQB10301 DQA10303-DQB10301 DQA10401-DQB10301 DQA10401-DQB10319 DQA10501-DQB10301 DQA10501-DQB10319 DQA10503-DQB10301 DQA10505-DQB10301 DQA10505-DQB10309 DQA10505-DQB10319 DQA10506-DQB10303 DQA10508-DQB10301 DQA10509-DQB10301 DQA10601-DQB10301
IVTDSQYALGIIQAQPDKSESE

SEQ ID NO: 3988 - protein, 23 aa, Human immunodeficiency virus 1
  source 1..23: note = HLAs: DRB1_0101 DRB1_0401 DRB1_0404 DRB1_0405 DRB1_0408 DRB1_0410 DRB1_1001 DPA10301-DPB10101 DPA10301-DPB16501 DPA10401-DPB10101 DQA10102-DQB10501 DQA10102-DQB10503 DQA10102-DQB10601 DQA10102-DQB10602 DQA10102-DQB10609 DQA10102-DQB10611 DQA10103-DQB10501 DQA10103-DQB10601 DQA10103-DQB10609 DQA10201-DQB10301 DQA10201-DQB10303 DQA10301-DQB10301 DQA10302-DQB10301 DQA10303-DQB10301 DQA10401-DQB10301 DQA10401-DQB10319 DQA10501-DQB10301 DQA10501-DQB10319 DQA10503-DQB10301 DQA10505-DQB10301 DQA10505-DQB10309 DQA10505-DQB10319 DQA10506-DQB10303 DQA10508-DQB10301 DQA10509-DQB10301 DQA10601-DQB10301
IVTDSQYALGIIQAQPDKSESEL

SEQ ID NO: 3989 - protein, 24 aa, Human immunodeficiency virus 1
  source 1..24: note = HLAs: DRB1_0101 DRB1_0401 DRB1_0404 DRB1_0405 DRB1_0408 DRB1_0410 DRB1_1001 DPA10301-DPB10101 DPA10301-DPB16501 DPA10401-DPB10101 DQA10102-DQB10501 DQA10102-DQB10503 DQA10102-DQB10601 DQA10102-DQB10602 DQA10102-DQB10609 DQA10102-DQB10611 DQA10103-DQB10501 DQA10103-DQB10601 DQA10103-DQB10609 DQA10201-DQB10301 DQA10201-DQB10303 DQA10301-DQB10301 DQA10302-DQB10301 DQA10303-DQB10301 DQA10401-DQB10301 DQA10401-DQB10319 DQA10501-DQB10301 DQA10501-DQB10319 DQA10503-DQB10301 DQA10505-DQB10301 DQA10505-DQB10309 DQA10505-DQB10319 DQA10506-DQB10303 DQA10508-DQB10301 DQA10509-DQB10301 DQA10601-DQB10301
IVTDSQYALGIIQAQPDKSESELV

SEQ ID NO: 3990 - protein, 15 aa, Human immunodeficiency virus 1
  source 1..15: note = HLAs: DRB1_0101 DRB1_0102 DRB1_0401 DRB1_0405 DRB1_0701 DRB1_0901 DRB1_1001
IWQLDCTHLEGKIIL

SEQ ID NO: 3991 - protein, 16 aa, Human immunodeficiency virus 1
  source 1..16: note = HLAs: DRB1_0101
IWQLDCTHLEGKIILV

SEQ ID NO: 3992 - protein, 17 aa, Human immunodeficiency virus 1
  source 1..17: note = HLAs: DRB1_0101 DRB1_1001 DPA10103-DPB11501 DPA10104-DPB11501 DPA10301-DPB10101 DPA10301-DPB10201 DPA10301-DPB10202 DPA10301-DPB110601 DPA10301-DPB11801 DPA10301-DPB14001 DPA10401-DPB10101 DQA10102-DQB10501
IWQLDCTHLEGKIILVA

SEQ ID NO: 3993 - protein, 18 aa, Human immunodeficiency virus 1
  source 1..18: note = HLAs: DPA10301-DPB10201 DPA10301-DPB10202
IWQLDCTHLEGKIILVAV

SEQ ID NO: 3994 - protein, 19 aa, Human immunodeficiency virus 1
  source 1..19: note = HLAs: DRB1_0101 DRB1_1001 DPA10103-DPB11501 DPA10104-DPB11501 DPA10301-DPB10101 DPA10301-DPB10201 DPA10301-DPB10202 DPA10301-DPB10401 DPA10301-DPB110601 DPA10301-DPB11801 DPA10301-DPB12301 DPA10301-DPB13901 DPA10301-DPB14001 DPA10301-DPB16501 DPA10401-DPB10101 DPA10401-DPB10201 DPA10401-DPB10202 DQA10102-DQB10501
IWQLDCTHLEGKIILVAVH

SEQ ID NO: 3995 - protein, 20 aa, Human immunodeficiency virus 1
  source 1..20: note = HLAs: DRB1_0101 DRB1_0102 DRB1_1001 DPA10103-DPB10101 DPA10103-DPB11501 DPA10103-DPB15001 DPA10104-DPB10101 DPA10104-DPB11501 DPA10105-DPB10101 DPA10105-DPB15001 DPA10202-DPB10101 DPA10202-DPB110601 DPA10202-DPB11901 DPA10301-DPB10101 DPA10301-DPB10201 DPA10301-DPB10202 DPA10301-DPB10401 DPA10301-DPB10402 DPA10301-DPB110501 DPA10301-DPB110601 DPA10301-DPB11801 DPA10301-DPB12301 DPA10301-DPB13901 DPA10301-DPB14001 DPA10301-DPB14901 DPA10301-DPB16501 DPA10301-DPB18001 DPA10401-DPB10101 DPA10401-DPB10201 DPA10401-DPB10202 DPA10401-DPB10501 DQA10102-DQB10501 DQA10103-DQB10501 DQA10103-DQB10601
IWQLDCTHLEGKIILVAVHV

SEQ ID NO: 3996 - protein, 21 aa, Human immunodeficiency virus 1
  source 1..21: note = HLAs: DRB1_0101 DRB1_1001 DPA10103-DPB11501 DPA10104-DPB11501 DPA10301-DPB10101 DPA10301-DPB10201 DPA10301-DPB10202 DPA10301-DPB110601 DPA10301-DPB11801 DPA10301-DPB14001 DPA10301-DPB16501 DPA10401-DPB10101 DQA10102-DQB10501 DQA10103-DQB10501
IWQLDCTHLEGKIILVAVHVA

SEQ ID NO: 3997 - protein, 22 aa, Human immunodeficiency virus 1
  source 1..22: note = HLAs: DRB1_0101 DRB1_1001 DPA10103-DPB11501 DPA10104-DPB11501 DPA10301-DPB10101 DPA10301-DPB10201 DPA10301-DPB10202 DPA10301-DPB110601 DPA10301-DPB11801 DPA10301-DPB14001 DPA10301-DPB16501 DPA10401-DPB10101 DPA10401-DPB10202 DQA10102-DQB10501 DQA10103-DQB10501
IWQLDCTHLEGKIILVAVHVAS

SEQ ID NO: 3998 - protein, 23 aa, Human immunodeficiency virus 1
  source 1..23: note = HLAs: DRB1_0101 DRB1_0102 DRB1_0404 DRB1_0408 DRB1_0410 DRB1_1001 DRB1_1406 DPA10103-DPB11501 DPA10104-DPB11501 DPA10301-DPB10101 DPA10301-DPB10201 DPA10301-DPB10202 DPA10301-DPB110601 DPA10301-DPB11801 DPA10301-DPB14001 DPA10301-DPB16501 DPA10401-DPB10101 DPA10401-DPB10202 DQA10102-DQB10501 DQA10103-DQB10501 DQA10103-DQB10609
IWQLDCTHLEGKIILVAVHVASG

SEQ ID NO: 3999 - protein, 24 aa, Human immunodeficiency virus 1
  source 1..24: note = HLAs: DRB1_0101 DRB1_0102 DRB1_0404 DRB1_0408 DRB1_0410 DRB1_0701 DRB1_0802 DRB1_0804 DRB1_0809 DRB1_0813 DRB1_1001 DRB1_1304 DRB1_1406 DPA10103-DPB11501 DPA10104-DPB11501 DPA10202-DPB10101 DPA10301-DPB10101 DPA10301-DPB10201 DPA10301-DPB10202 DPA10301-DPB110601 DPA10301-DPB11801 DPA10301-DPB14001 DPA10301-DPB16501 DPA10401-DPB10101 DPA10401-DPB10201 DPA10401-DPB10202 DQA10102-DQB10501 DQA10102-DQB10601 DQA10102-DQB10609 DQA10103-DQB10501 DQA10103-DQB10601 DQA10103-DQB10609
IWQLDCTHLEGKIILVAVHVASGY

SEQ ID NO: 4000 - protein, 13 aa, Human immunodeficiency virus 1
  source 1..13: note = HLAs: DRB1_0101 DRB1_0405 DRB1_0408 DRB1_1001 DRB1_1602 DPA10103-DPB10101 DPA10103-DPB10201 DPA10103-DPB10202 DPA10103-DPB10301 DPA10103-DPB10401 DPA10103-DPB10501 DPA10103-DPB10601 DPA10103-DPB11101 DPA10103-DPB112401 DPA10103-DPB112601 DPA10103-DPB11501 DPA10103-DPB11601 DPA10103-DPB11901 DPA10103-DPB12001 DPA10103-DPB12301 DPA10103-DPB13101 DPA10103-DPB13901 DPA10103-DPB14001 DPA10103-DPB14801 DPA10103-DPB15001 DPA10103-DPB15501 DPA10104-DPB10101 DPA10104-DPB10301 DPA10104-DPB11501 DPA10105-DPB10101 DPA10105-DPB10301 DPA10105-DPB10401 DPA10105-DPB15001 DPA10106-DPB10101 DPA10201-DPB10101 DPA10201-DPB11501 DPA10202-DPB10101 DPA10202-DPB10202 DPA10202-DPB110601 DPA10202-DPB11101 DPA10202-DPB11901 DPA10202-DPB16501 DPA10301-DPB10101 DPA10301-DPB10201 DPA10301-DPB10202 DPA10301-DPB10401 DPA10301-DPB10402 DPA10301-DPB110501 DPA10301-DPB110601 DPA10301-DPB11101 DPA10301-DPB11801 DPA10301-DPB12301 DPA10301-DPB13901 DPA10301-DPB14001 DPA10301-DPB14901 DPA10301-DPB15501 DPA10301-DPB16501; note = HLAs: DPA10301-DPB17501 DPA10301-DPB18001 DPA10401-DPB10101 DPA10401-DPB10201 DPA10401-DPB10202 DPA10401-DPB10301 DPA10401-DPB10501 DPA10401-DPB11301 DPA10401-DPB113301 DPA10401-DPB11401 DQA10102-DQB10501 DQA10103-DQB10501
IYKRWIILGLNKI

SEQ ID NO: 4001 - protein, 14 aa, Human immunodeficiency virus 1
  source 1..14: note = HLAs: DRB1_0101 DRB1_0102 DRB1_0401 DRB1_0404 DRB1_0405 DRB1_0408 DRB1_0410 DRB1_0701 DRB1_0801 DRB1_0802 DRB1_0803 DRB1_0804 DRB1_0806 DRB1_0809 DRB1_0813 DRB1_0901 DRB1_1001 DRB1_1101 DRB1_1102 DRB1_1104 DRB1_1114 DRB1_1201 DRB1_1301 DRB1_1302 DRB1_1304 DRB1_1305 DRB1_1312 DRB1_1401 DRB1_1402 DRB1_1403 DRB1_1404 DRB1_1406 DRB1_1407 DRB1_1454 DRB1_1501 DRB1_1502 DRB1_1503 DRB1_1601 DRB1_1602 DPA10103-DPB10101 DPA10103-DPB10201 DPA10103-DPB10202 DPA10103-DPB10301 DPA10103-DPB10401 DPA10103-DPB10501 DPA10103-DPB10601 DPA10103-DPB10901 DPA10103-DPB11101 DPA10103-DPB112401 DPA10103-DPB112601 DPA10103-DPB11301 DPA10103-DPB113101 DPA10103-DPB113301 DPA10103-DPB11401 DPA10103-DPB11501 DPA10103-DPB11601 DPA10103-DPB11701 DPA10103-DPB11801 DPA10103-DPB11901 DPA10103-DPB12001 DPA10103-DPB12101 DPA10103-DPB12301 DPA10103-DPB12901 DPA10103-DPB13001 DPA10103-DPB13101 DPA10103-DPB13401 DPA10103-DPB13901 DPA10103-DPB14001 DPA10103-DPB14101 DPA10103-DPB14801 DPA10103-DPB15001 DPA10103-DPB15501; note = HLAs: DPA10103-DPB15901 DPA10104-DPB10101 DPA10104-DPB10301 DPA10104-DPB11301 DPA10104-DPB11501 DPA10105-DPB10101 DPA10105-DPB10301 DPA10105-DPB10401 DPA10105-DPB11801 DPA10105-DPB15001 DPA10106-DPB10101 DPA10106-DPB11101 DPA10201-DPB10101 DPA10201-DPB10201 DPA10201-DPB10202 DPA10201-DPB110601 DPA10201-DPB11101 DPA10201-DPB11501 DPA10201-DPB11601 DPA10201-DPB11901 DPA10201-DPB15501 DPA10202-DPB10101 DPA10202-DPB10201 DPA10202-DPB10202 DPA10202-DPB10401 DPA10202-DPB10501 DPA10202-DPB10901 DPA10202-DPB110601 DPA10202-DPB11101 DPA10202-DPB11301 DPA10202-DPB113101 DPA10202-DPB11701 DPA10202-DPB11801 DPA10202-DPB11901 DPA10202-DPB12101 DPA10202-DPB12901 DPA10202-DPB13001 DPA10202-DPB13101 DPA10202-DPB13801 DPA10202-DPB15501 DPA10202-DPB16501 DPA10202-DPB18501 DPA10301-DPB10101 DPA10301-DPB10201 DPA10301-DPB10202 DPA10301-DPB10301 DPA10301-DPB10401 DPA10301-DPB10402 DPA10301-DPB10901 DPA10301-DPB110501 DPA10301-DPB110601 DPA10301-DPB11101 DPA10301-DPB11301 DPA10301-DPB11701; note = HLAs: DPA10301-DPB11801 DPA10301-DPB12301 DPA10301-DPB13901 DPA10301-DPB14001 DPA10301-DPB14901 DPA10301-DPB15501 DPA10301-DPB16501 DPA10301-DPB17501 DPA10301-DPB18001 DPA10401-DPB10101 DPA10401-DPB10201 DPA10401-DPB10202 DPA10401-DPB10301 DPA10401-DPB10402 DPA10401-DPB10501 DPA10401-DPB110501 DPA10401-DPB11301 DPA10401-DPB113301 DPA10401-DPB11401 DPA10401-DPB14901 DQA10102-DQB10501 DQA10103-DQB10501
IYKRWIILGLNKIV

SEQ ID NO: 4002 - protein, 15 aa, Human immunodeficiency virus 1
  source 1..15: note = HLAs: DRB1_0101 DRB1_0102 DRB1_0103 DRB1_0301 DRB1_0401 DRB1_0402 DRB1_0404 DRB1_0405 DRB1_0407 DRB1_0408 DRB1_0410 DRB1_0701 DRB1_0801 DRB1_0802 DRB1_0803 DRB1_0804 DRB1_0806 DRB1_0809 DRB1_0813 DRB1_0901 DRB1_1001 DRB1_1101 DRB1_1102 DRB1_1103 DRB1_1104 DRB1_1114 DRB1_1201 DRB1_1202 DRB1_1301 DRB1_1302 DRB1_1303 DRB1_1304 DRB1_1305 DRB1_1312 DRB1_1401 DRB1_1402 DRB1_1403 DRB1_1404 DRB1_1405 DRB1_1406 DRB1_1407 DRB1_1418 DRB1_1454 DRB1_1501 DRB1_1502 DRB1_1503 DRB1_1601 DRB1_1602 DPA10103-DPB10101 DPA10103-DPB10201 DPA10103-DPB10202 DPA10103-DPB10301 DPA10103-DPB10401 DPA10103-DPB10402 DPA10103-DPB10501 DPA10103-DPB10601 DPA10103-DPB10901 DPA10103-DPB11001 DPA10103-DPB110501 DPA10103-DPB11101 DPA10103-DPB112401 DPA10103-DPB112601 DPA10103-DPB11301 DPA10103-DPB113101 DPA10103-DPB113301 DPA10103-DPB11401 DPA10103-DPB11501 DPA10103-DPB11601 DPA10103-DPB11701 DPA10103-DPB11801 DPA10103-DPB11901 DPA10103-DPB12001 DPA10103-DPB12101 DPA10103-DPB12301 DPA10103-DPB12901 DPA10103-DPB13001; note = HLAs: DPA10103-DPB13101 DPA10103-DPB13401 DPA10103-DPB13901 DPA10103-DPB14001 DPA10103-DPB14101 DPA10103-DPB14801 DPA10103-DPB14901 DPA10103-DPB15001 DPA10103-DPB15101 DPA10103-DPB15501 DPA10103-DPB15901 DPA10103-DPB18001 DPA10104-DPB10101 DPA10104-DPB10301 DPA10104-DPB11001 DPA10104-DPB11301 DPA10104-DPB11501 DPA10105-DPB10101 DPA10105-DPB10301 DPA10105-DPB10401 DPA10105-DPB11801 DPA10105-DPB15001 DPA10106-DPB10101 DPA10106-DPB11101 DPA10201-DPB10101 DPA10201-DPB10201 DPA10201-DPB10202 DPA10201-DPB10301 DPA10201-DPB10401 DPA10201-DPB10501 DPA10201-DPB10601 DPA10201-DPB10901 DPA10201-DPB110601 DPA10201-DPB11101 DPA10201-DPB11301 DPA10201-DPB113101 DPA10201-DPB113301 DPA10201-DPB11501 DPA10201-DPB11601 DPA10201-DPB11701 DPA10201-DPB11801 DPA10201-DPB11901 DPA10201-DPB13001 DPA10201-DPB13401 DPA10201-DPB14501 DPA10201-DPB15501 DPA10201-DPB19101 DPA10202-DPB10101 DPA10202-DPB10201 DPA10202-DPB10202 DPA10202-DPB10301 DPA10202-DPB10401 DPA10202-DPB10402 DPA10202-DPB10501 DPA10202-DPB10901; note = HLAs: DPA10202-DPB110001 DPA10202-DPB110501 DPA10202-DPB110601 DPA10202-DPB11101 DPA10202-DPB11301 DPA10202-DPB113101 DPA10202-DPB11401 DPA10202-DPB11701 DPA10202-DPB11801 DPA10202-DPB11901 DPA10202-DPB12101 DPA10202-DPB12901 DPA10202-DPB13001 DPA10202-DPB13101 DPA10202-DPB13801 DPA10202-DPB14501 DPA10202-DPB15501 DPA10202-DPB16501 DPA10202-DPB18501 DPA10301-DPB10101 DPA10301-DPB10201 DPA10301-DPB10202 DPA10301-DPB10301 DPA10301-DPB10401 DPA10301-DPB10402 DPA10301-DPB10901 DPA10301-DPB110501 DPA10301-DPB110601 DPA10301-DPB11101 DPA10301-DPB11301 DPA10301-DPB11701 DPA10301-DPB11801 DPA10301-DPB12301 DPA10301-DPB13901 DPA10301-DPB14001 DPA10301-DPB14901 DPA10301-DPB15501 DPA10301-DPB16501 DPA10301-DPB17501 DPA10301-DPB18001 DPA10401-DPB10101 DPA10401-DPB10201 DPA10401-DPB10202 DPA10401-DPB10301 DPA10401-DPB10402 DPA10401-DPB10501 DPA10401-DPB110501 DPA10401-DPB11301 DPA10401-DPB113301 DPA10401-DPB11401 DPA10401-DPB14901 DQA10102-DQB10501 DQA10102-DQB10503 DQA10102-DQB10609; note = HLAs: DQA10103-DQB10501 DQA10103-DQB10503 DQA10103-DQB10601 DQA10103-DQB10609 DQA10505-DQB10402
IYKRWIILGLNKIVR

SEQ ID NO: 4003 - protein, 16 aa, Human immunodeficiency virus 1
  source 1..16: note = HLAs: DRB1_0101 DRB1_0102 DRB1_0103 DRB1_0401 DRB1_0402 DRB1_0404 DRB1_0405 DRB1_0408 DRB1_0410 DRB1_0701 DRB1_0801 DRB1_0802 DRB1_0803 DRB1_0804 DRB1_0806 DRB1_0809 DRB1_0813 DRB1_0901 DRB1_1001 DRB1_1101 DRB1_1102 DRB1_1103 DRB1_1104 DRB1_1114 DRB1_1201 DRB1_1202 DRB1_1301 DRB1_1302 DRB1_1303 DRB1_1304 DRB1_1305 DRB1_1312 DRB1_1401 DRB1_1402 DRB1_1403 DRB1_1404 DRB1_1405 DRB1_1406 DRB1_1407 DRB1_1418 DRB1_1454 DRB1_1501 DRB1_1502 DRB1_1503 DRB1_1601 DRB1_1602 DPA10103-DPB10101 DPA10103-DPB10201 DPA10103-DPB10202 DPA10103-DPB10301 DPA10103-DPB10401 DPA10103-DPB10402 DPA10103-DPB10501 DPA10103-DPB10601 DPA10103-DPB10901 DPA10103-DPB11001 DPA10103-DPB110501 DPA10103-DPB11101 DPA10103-DPB112401 DPA10103-DPB112601 DPA10103-DPB11301 DPA10103-DPB113101 DPA10103-DPB113301 DPA10103-DPB11401 DPA10103-DPB11501 DPA10103-DPB11601 DPA10103-DPB11701 DPA10103-DPB11801 DPA10103-DPB11901 DPA10103-DPB12001 DPA10103-DPB12101 DPA10103-DPB12301 DPA10103-DPB12901 DPA10103-DPB13001 DPA10103-DPB13101; note = HLAs: DPA10103-DPB13401 DPA10103-DPB13901 DPA10103-DPB14001 DPA10103-DPB14101 DPA10103-DPB14801 DPA10103-DPB14901 DPA10103-DPB15001 DPA10103-DPB15101 DPA10103-DPB15501 DPA10103-DPB15901 DPA10103-DPB18001 DPA10104-DPB10101 DPA10104-DPB10301 DPA10104-DPB11001 DPA10104-DPB11301 DPA10104-DPB11501 DPA10105-DPB10101 DPA10105-DPB10301 DPA10105-DPB10401 DPA10105-DPB11801 DPA10105-DPB15001 DPA10106-DPB10101 DPA10106-DPB11101 DPA10201-DPB10101 DPA10201-DPB10201 DPA10201-DPB10202 DPA10201-DPB10301 DPA10201-DPB10501 DPA10201-DPB10601 DPA10201-DPB10901 DPA10201-DPB110601 DPA10201-DPB11101 DPA10201-DPB11301 DPA10201-DPB113101 DPA10201-DPB113301 DPA10201-DPB11501 DPA10201-DPB11601 DPA10201-DPB11701 DPA10201-DPB11801 DPA10201-DPB11901 DPA10201-DPB13001 DPA10201-DPB13401 DPA10201-DPB14501 DPA10201-DPB15501 DPA10201-DPB19101 DPA10202-DPB10101 DPA10202-DPB10201 DPA10202-DPB10202 DPA10202-DPB10301 DPA10202-DPB10401 DPA10202-DPB10402 DPA10202-DPB10501 DPA10202-DPB10901 DPA10202-DPB110001; note = HLAs: DPA10202-DPB110501 DPA10202-DPB110601 DPA10202-DPB11101 DPA10202-DPB11301 DPA10202-DPB113101 DPA10202-DPB11401 DPA10202-DPB11701 DPA10202-DPB11801 DPA10202-DPB11901 DPA10202-DPB12101 DPA10202-DPB12901 DPA10202-DPB13001 DPA10202-DPB13101 DPA10202-DPB13801 DPA10202-DPB14501 DPA10202-DPB15501 DPA10202-DPB16501 DPA10202-DPB18501 DPA10301-DPB10101 DPA10301-DPB10201 DPA10301-DPB10202 DPA10301-DPB10301 DPA10301-DPB10401 DPA10301-DPB10402 DPA10301-DPB10901 DPA10301-DPB110501 DPA10301-DPB110601 DPA10301-DPB11101 DPA10301-DPB11301 DPA10301-DPB11701 DPA10301-DPB11801 DPA10301-DPB12301 DPA10301-DPB13901 DPA10301-DPB14001 DPA10301-DPB14901 DPA10301-DPB15501 DPA10301-DPB16501 DPA10301-DPB17501 DPA10301-DPB18001 DPA10401-DPB10101 DPA10401-DPB10201 DPA10401-DPB10202 DPA10401-DPB10301 DPA10401-DPB10402 DPA10401-DPB10501 DPA10401-DPB110501 DPA10401-DPB11301 DPA10401-DPB113301 DPA10401-DPB11401 DPA10401-DPB14901 DQA10102-DQB10501 DQA10102-DQB10503 DQA10102-DQB10601 DQA10102-DQB10609; note = HLAs: DQA10103-DQB10501 DQA10103-DQB10503 DQA10103-DQB10601 DQA10103-DQB10602 DQA10103-DQB10608 DQA10103-DQB10609
IYKRWIILGLNKIVRM

SEQ ID NO: 4004 - protein, 17 aa, Human immunodeficiency virus 1
  source 1..17: note = HLAs: DRB1_0101 DRB1_0102 DRB1_0103 DRB1_0301 DRB1_0401 DRB1_0402 DRB1_0404 DRB1_0405 DRB1_0408 DRB1_0410 DRB1_0701 DRB1_0801 DRB1_0802 DRB1_0803 DRB1_0804 DRB1_0806 DRB1_0809 DRB1_0813 DRB1_0901 DRB1_1001 DRB1_1101 DRB1_1102 DRB1_1103 DRB1_1104 DRB1_1114 DRB1_1201 DRB1_1202 DRB1_1301 DRB1_1302 DRB1_1303 DRB1_1304 DRB1_1305 DRB1_1312 DRB1_1401 DRB1_1402 DRB1_1403 DRB1_1404 DRB1_1405 DRB1_1406 DRB1_1407 DRB1_1418 DRB1_1454 DRB1_1501 DRB1_1502 DRB1_1503 DRB1_1601 DRB1_1602 DPA10103-DPB10101 DPA10103-DPB10201 DPA10103-DPB10202 DPA10103-DPB10301 DPA10103-DPB10401 DPA10103-DPB10402 DPA10103-DPB10501 DPA10103-DPB10601 DPA10103-DPB10901 DPA10103-DPB11001 DPA10103-DPB110501 DPA10103-DPB11101 DPA10103-DPB112401 DPA10103-DPB112601 DPA10103-DPB11301 DPA10103-DPB113101 DPA10103-DPB113301 DPA10103-DPB11401 DPA10103-DPB11501 DPA10103-DPB11601 DPA10103-DPB11701 DPA10103-DPB11801 DPA10103-DPB11901 DPA10103-DPB12001 DPA10103-DPB12101 DPA10103-DPB12301 DPA10103-DPB12901 DPA10103-DPB13001; note = HLAs: DPA10103-DPB13101 DPA10103-DPB13401 DPA10103-DPB13901 DPA10103-DPB14001 DPA10103-DPB14101 DPA10103-DPB14801 DPA10103-DPB14901 DPA10103-DPB15001 DPA10103-DPB15101 DPA10103-DPB15501 DPA10103-DPB15901 DPA10103-DPB18001 DPA10104-DPB10101 DPA10104-DPB10301 DPA10104-DPB11001 DPA10104-DPB11301 DPA10104-DPB11501 DPA10105-DPB10101 DPA10105-DPB10301 DPA10105-DPB10401 DPA10105-DPB11801 DPA10105-DPB15001 DPA10106-DPB10101 DPA10106-DPB11101 DPA10201-DPB10101 DPA10201-DPB10201 DPA10201-DPB10202 DPA10201-DPB10301 DPA10201-DPB10401 DPA10201-DPB10501 DPA10201-DPB10601 DPA10201-DPB110601 DPA10201-DPB11101 DPA10201-DPB11301 DPA10201-DPB113101 DPA10201-DPB113301 DPA10201-DPB11501 DPA10201-DPB11601 DPA10201-DPB11701 DPA10201-DPB11801 DPA10201-DPB11901 DPA10201-DPB13001 DPA10201-DPB13401 DPA10201-DPB14501 DPA10201-DPB15501 DPA10201-DPB19101 DPA10202-DPB10101 DPA10202-DPB10201 DPA10202-DPB10202 DPA10202-DPB10301 DPA10202-DPB10401 DPA10202-DPB10402 DPA10202-DPB10501 DPA10202-DPB10901 DPA10202-DPB110001; note = HLAs: DPA10202-DPB110501 DPA10202-DPB110601 DPA10202-DPB11101 DPA10202-DPB11301 DPA10202-DPB113101 DPA10202-DPB11401 DPA10202-DPB11701 DPA10202-DPB11801 DPA10202-DPB11901 DPA10202-DPB12101 DPA10202-DPB12901 DPA10202-DPB13001 DPA10202-DPB13101 DPA10202-DPB13801 DPA10202-DPB14501 DPA10202-DPB15501 DPA10202-DPB16501 DPA10202-DPB18501 DPA10301-DPB10101 DPA10301-DPB10201 DPA10301-DPB10202 DPA10301-DPB10301 DPA10301-DPB10401 DPA10301-DPB10402 DPA10301-DPB10901 DPA10301-DPB110501 DPA10301-DPB110601 DPA10301-DPB11101 DPA10301-DPB11301 DPA10301-DPB11701 DPA10301-DPB11801 DPA10301-DPB12301 DPA10301-DPB13901 DPA10301-DPB14001 DPA10301-DPB14901 DPA10301-DPB15501 DPA10301-DPB16501 DPA10301-DPB17501 DPA10301-DPB18001 DPA10401-DPB10101 DPA10401-DPB10201 DPA10401-DPB10202 DPA10401-DPB10301 DPA10401-DPB10402 DPA10401-DPB10501 DPA10401-DPB110501 DPA10401-DPB11301 DPA10401-DPB113301 DPA10401-DPB11401 DPA10401-DPB14901 DQA10102-DQB10501 DQA10102-DQB10503 DQA10102-DQB10601 DQA10102-DQB10609; note = HLAs: DQA10103-DQB10501 DQA10103-DQB10503 DQA10103-DQB10601 DQA10103-DQB10602 DQA10103-DQB10608 DQA10103-DQB10609 DQA10501-DQB10501 DQA10505-DQB10501
IYKRWIILGLNKIVRMY

SEQ ID NO: 4005 - protein, 18 aa, Human immunodeficiency virus 1
  source 1..18: note = HLAs: DRB1_0101 DRB1_0102 DRB1_0401 DRB1_0404 DRB1_0405 DRB1_0408 DRB1_0410 DRB1_0701 DRB1_0801 DRB1_0802 DRB1_0803 DRB1_0804 DRB1_0806 DRB1_0809 DRB1_0813 DRB1_0901 DRB1_1001 DRB1_1101 DRB1_1102 DRB1_1103 DRB1_1104 DRB1_1114 DRB1_1201 DRB1_1202 DRB1_1301 DRB1_1302 DRB1_1304 DRB1_1305 DRB1_1312 DRB1_1401 DRB1_1402 DRB1_1403 DRB1_1404 DRB1_1405 DRB1_1406 DRB1_1407 DRB1_1454 DRB1_1501 DRB1_1502 DRB1_1503 DRB1_1601 DRB1_1602 DPA10103-DPB10101 DPA10103-DPB10201 DPA10103-DPB10202 DPA10103-DPB10301 DPA10103-DPB10401 DPA10103-DPB10501 DPA10103-DPB10601 DPA10103-DPB11101 DPA10103-DPB112401 DPA10103-DPB112601 DPA10103-DPB11501 DPA10103-DPB11601 DPA10103-DPB11801 DPA10103-DPB11901 DPA10103-DPB12001 DPA10103-DPB12301 DPA10103-DPB13101 DPA10103-DPB13401 DPA10103-DPB13901 DPA10103-DPB14001 DPA10103-DPB14101 DPA10103-DPB14801 DPA10103-DPB15001 DPA10103-DPB15501 DPA10104-DPB10101 DPA10104-DPB10301 DPA10104-DPB11501 DPA10105-DPB10101 DPA10105-DPB10301 DPA10105-DPB10401 DPA10105-DPB11801; note = HLAs: DPA10105-DPB15001 DPA10106-DPB10101 DPA10201-DPB10101 DPA10201-DPB10202 DPA10201-DPB10501 DPA10201-DPB110601 DPA10201-DPB11501 DPA10201-DPB11601 DPA10201-DPB11901 DPA10202-DPB10101 DPA10202-DPB10201 DPA10202-DPB10202 DPA10202-DPB10401 DPA10202-DPB10501 DPA10202-DPB110001 DPA10202-DPB110601 DPA10202-DPB11101 DPA10202-DPB11301 DPA10202-DPB11801 DPA10202-DPB11901 DPA10202-DPB12101 DPA10202-DPB13001 DPA10202-DPB13101 DPA10202-DPB13801 DPA10202-DPB15501 DPA10202-DPB16501 DPA10301-DPB10101 DPA10301-DPB10201 DPA10301-DPB10202 DPA10301-DPB10401 DPA10301-DPB10402 DPA10301-DPB10901 DPA10301-DPB110501 DPA10301-DPB110601 DPA10301-DPB11101 DPA10301-DPB11301 DPA10301-DPB11701 DPA10301-DPB11801 DPA10301-DPB12301 DPA10301-DPB13901 DPA10301-DPB14001 DPA10301-DPB14901 DPA10301-DPB15501 DPA10301-DPB16501 DPA10301-DPB17501 DPA10301-DPB18001 DPA10401-DPB10101 DPA10401-DPB10201 DPA10401-DPB10202 DPA10401-DPB10301 DPA10401-DPB10402 DPA10401-DPB10501 DPA10401-DPB110501 DPA10401-DPB11301; note = HLAs: DPA10401-DPB113301 DPA10401-DPB11401 DPA10401-DPB14901 DQA10102-DQB10501 DQA10102-DQB10503 DQA10102-DQB10609 DQA10103-DQB10501 DQA10103-DQB10609
IYKRWIILGLNKIVRMYS

SEQ ID NO: 4006 - protein, 19 aa, Human immunodeficiency virus 1
  source 1..19: note = HLAs: DRB1_0101 DRB1_0102 DRB1_0103 DRB1_0301 DRB1_0401 DRB1_0402 DRB1_0404 DRB1_0405 DRB1_0408 DRB1_0410 DRB1_0701 DRB1_0801 DRB1_0802 DRB1_0803 DRB1_0804 DRB1_0806 DRB1_0809 DRB1_0813 DRB1_0901 DRB1_1001 DRB1_1101 DRB1_1102 DRB1_1103 DRB1_1104 DRB1_1114 DRB1_1201 DRB1_1202 DRB1_1301 DRB1_1302 DRB1_1303 DRB1_1304 DRB1_1305 DRB1_1312 DRB1_1401 DRB1_1402 DRB1_1403 DRB1_1404 DRB1_1405 DRB1_1406 DRB1_1407 DRB1_1418 DRB1_1454 DRB1_1501 DRB1_1502 DRB1_1503 DRB1_1601 DRB1_1602 DPA10103-DPB10101 DPA10103-DPB10201 DPA10103-DPB10202 DPA10103-DPB10301 DPA10103-DPB10401 DPA10103-DPB10501 DPA10103-DPB10601 DPA10103-DPB11101 DPA10103-DPB112401 DPA10103-DPB112601 DPA10103-DPB11301 DPA10103-DPB113101 DPA10103-DPB113301 DPA10103-DPB11401 DPA10103-DPB11501 DPA10103-DPB11601 DPA10103-DPB11701 DPA10103-DPB11801 DPA10103-DPB11901 DPA10103-DPB12001 DPA10103-DPB12101 DPA10103-DPB12301 DPA10103-DPB12901 DPA10103-DPB13001 DPA10103-DPB13101 DPA10103-DPB13401 DPA10103-DPB13901 DPA10103-DPB14001; note = HLAs: DPA10103-DPB14101 DPA10103-DPB14801 DPA10103-DPB15001 DPA10103-DPB15501 DPA10103-DPB15901 DPA10104-DPB10101 DPA10104-DPB10301 DPA10104-DPB11301 DPA10104-DPB11501 DPA10105-DPB10101 DPA10105-DPB10301 DPA10105-DPB10401 DPA10105-DPB11801 DPA10105-DPB15001 DPA10106-DPB10101 DPA10106-DPB11101 DPA10201-DPB10101 DPA10201-DPB10201 DPA10201-DPB10202 DPA10201-DPB10501 DPA10201-DPB110601 DPA10201-DPB11101 DPA10201-DPB11501 DPA10201-DPB11601 DPA10201-DPB11801 DPA10201-DPB11901 DPA10201-DPB15501 DPA10202-DPB10101 DPA10202-DPB10201 DPA10202-DPB10202 DPA10202-DPB10401 DPA10202-DPB10402 DPA10202-DPB10501 DPA10202-DPB10901 DPA10202-DPB110001 DPA10202-DPB110501 DPA10202-DPB110601 DPA10202-DPB11101 DPA10202-DPB11301 DPA10202-DPB113101 DPA10202-DPB11701 DPA10202-DPB11801 DPA10202-DPB11901 DPA10202-DPB12101 DPA10202-DPB13001 DPA10202-DPB13101 DPA10202-DPB13801 DPA10202-DPB15501 DPA10202-DPB16501 DPA10202-DPB18501 DPA10301-DPB10101 DPA10301-DPB10201 DPA10301-DPB10202 DPA10301-DPB10301; note = HLAs: DPA10301-DPB10401 DPA10301-DPB10402 DPA10301-DPB10901 DPA10301-DPB110501 DPA10301-DPB110601 DPA10301-DPB11101 DPA10301-DPB11301 DPA10301-DPB11701 DPA10301-DPB11801 DPA10301-DPB12301 DPA10301-DPB13901 DPA10301-DPB14001 DPA10301-DPB14901 DPA10301-DPB15501 DPA10301-DPB16501 DPA10301-DPB17501 DPA10301-DPB18001 DPA10401-DPB10101 DPA10401-DPB10201 DPA10401-DPB10202 DPA10401-DPB10301 DPA10401-DPB10402 DPA10401-DPB10501 DPA10401-DPB110501 DPA10401-DPB11301 DPA10401-DPB113301 DPA10401-DPB11401 DPA10401-DPB14901 DQA10102-DQB10501 DQA10102-DQB10503 DQA10102-DQB10601 DQA10102-DQB10609 DQA10103-DQB10501 DQA10103-DQB10503 DQA10103-DQB10601 DQA10103-DQB10602 DQA10103-DQB10603 DQA10103-DQB10608 DQA10103-DQB10609
IYKRWIILGLNKIVRMYSP

SEQ ID NO: 4007 - protein, 20 aa, Human immunodeficiency virus 1
  source 1..20: note = HLAs: DRB1_0101 DRB1_0102 DRB1_0103 DRB1_0301 DRB1_0401 DRB1_0402 DRB1_0404 DRB1_0405 DRB1_0408 DRB1_0410 DRB1_0701 DRB1_0801 DRB1_0802 DRB1_0803 DRB1_0804 DRB1_0806 DRB1_0809 DRB1_0813 DRB1_0901 DRB1_1001 DRB1_1101 DRB1_1102 DRB1_1103 DRB1_1104 DRB1_1114 DRB1_1201 DRB1_1202 DRB1_1301 DRB1_1302 DRB1_1303 DRB1_1304 DRB1_1305 DRB1_1312 DRB1_1401 DRB1_1402 DRB1_1403 DRB1_1404 DRB1_1405 DRB1_1406 DRB1_1407 DRB1_1418 DRB1_1454 DRB1_1501 DRB1_1502 DRB1_1503 DRB1_1601 DRB1_1602 DPA10103-DPB10101 DPA10103-DPB10201 DPA10103-DPB10202 DPA10103-DPB10301 DPA10103-DPB10401 DPA10103-DPB10402 DPA10103-DPB10501 DPA10103-DPB10601 DPA10103-DPB10901 DPA10103-DPB11001 DPA10103-DPB110501 DPA10103-DPB11101 DPA10103-DPB112401 DPA10103-DPB112601 DPA10103-DPB11301 DPA10103-DPB113101 DPA10103-DPB113301 DPA10103-DPB11401 DPA10103-DPB11501 DPA10103-DPB11601 DPA10103-DPB11701 DPA10103-DPB11801 DPA10103-DPB11901 DPA10103-DPB12001 DPA10103-DPB12101 DPA10103-DPB12301 DPA10103-DPB12901 DPA10103-DPB13001; note = HLAs: DPA10103-DPB13101 DPA10103-DPB13401 DPA10103-DPB13901 DPA10103-DPB14001 DPA10103-DPB14101 DPA10103-DPB14801 DPA10103-DPB14901 DPA10103-DPB15001 DPA10103-DPB15101 DPA10103-DPB15501 DPA10103-DPB15901 DPA10103-DPB18001 DPA10104-DPB10101 DPA10104-DPB10301 DPA10104-DPB11001 DPA10104-DPB11301 DPA10104-DPB11501 DPA10105-DPB10101 DPA10105-DPB10301 DPA10105-DPB10401 DPA10105-DPB11801 DPA10105-DPB15001 DPA10106-DPB10101 DPA10106-DPB11101 DPA10201-DPB10101 DPA10201-DPB10201 DPA10201-DPB10202 DPA10201-DPB10501 DPA10201-DPB10601 DPA10201-DPB110601 DPA10201-DPB11101 DPA10201-DPB113101 DPA10201-DPB11501 DPA10201-DPB11601 DPA10201-DPB11701 DPA10201-DPB11801 DPA10201-DPB11901 DPA10201-DPB13001 DPA10201-DPB15501 DPA10201-DPB19101 DPA10202-DPB10101 DPA10202-DPB10201 DPA10202-DPB10202 DPA10202-DPB10301 DPA10202-DPB10401 DPA10202-DPB10402 DPA10202-DPB10501 DPA10202-DPB10901 DPA10202-DPB110001 DPA10202-DPB110501 DPA10202-DPB110601 DPA10202-DPB11101 DPA10202-DPB11301 DPA10202-DPB113101; note = HLAs: DPA10202-DPB11401 DPA10202-DPB11701 DPA10202-DPB11801 DPA10202-DPB11901 DPA10202-DPB12101 DPA10202-DPB12901 DPA10202-DPB13001 DPA10202-DPB13101 DPA10202-DPB13801 DPA10202-DPB14501 DPA10202-DPB15501 DPA10202-DPB16501 DPA10202-DPB18501 DPA10301-DPB10101 DPA10301-DPB10201 DPA10301-DPB10202 DPA10301-DPB10301 DPA10301-DPB10401 DPA10301-DPB10402 DPA10301-DPB10901 DPA10301-DPB110501 DPA10301-DPB110601 DPA10301-DPB11101 DPA10301-DPB11301 DPA10301-DPB11701 DPA10301-DPB11801 DPA10301-DPB12301 DPA10301-DPB13901 DPA10301-DPB14001 DPA10301-DPB14901 DPA10301-DPB15501 DPA10301-DPB16501 DPA10301-DPB17501 DPA10301-DPB18001 DPA10401-DPB10101 DPA10401-DPB10201 DPA10401-DPB10202 DPA10401-DPB10301 DPA10401-DPB10402 DPA10401-DPB10501 DPA10401-DPB110501 DPA10401-DPB11301 DPA10401-DPB113301 DPA10401-DPB11401 DPA10401-DPB14901 DQA10102-DQB10501 DQA10102-DQB10503 DQA10102-DQB10601 DQA10102-DQB10602 DQA10102-DQB10609 DQA10102-DQB10611 DQA10103-DQB10501 DQA10103-DQB10503 DQA10103-DQB10601 DQA10103-DQB10602; note = HLAs: DQA10103-DQB10603 DQA10103-DQB10608 DQA10103-DQB10609
IYKRWIILGLNKIVRMYSPV

SEQ ID NO: 4008 - protein, 21 aa, Human immunodeficiency virus 1
  source 1..21: note = HLAs: DRB1_0101 DRB1_0102 DRB1_0301 DRB1_0401 DRB1_0404 DRB1_0405 DRB1_0408 DRB1_0410 DRB1_0701 DRB1_0801 DRB1_0802 DRB1_0803 DRB1_0804 DRB1_0806 DRB1_0809 DRB1_0813 DRB1_0901 DRB1_1001 DRB1_1101 DRB1_1102 DRB1_1103 DRB1_1104 DRB1_1114 DRB1_1201 DRB1_1202 DRB1_1301 DRB1_1302 DRB1_1303 DRB1_1304 DRB1_1305 DRB1_1312 DRB1_1401 DRB1_1402 DRB1_1403 DRB1_1404 DRB1_1405 DRB1_1406 DRB1_1407 DRB1_1418 DRB1_1454 DRB1_1501 DRB1_1502 DRB1_1503 DRB1_1601 DRB1_1602 DPA10103-DPB10101 DPA10103-DPB10201 DPA10103-DPB10202 DPA10103-DPB10501 DPA10103-DPB11101 DPA10103-DPB11501 DPA10103-DPB11601 DPA10103-DPB11801 DPA10103-DPB11901 DPA10103-DPB12001 DPA10103-DPB13101 DPA10103-DPB13401 DPA10103-DPB14001 DPA10103-DPB14101 DPA10103-DPB14801 DPA10103-DPB15001 DPA10103-DPB15501 DPA10104-DPB10101 DPA10104-DPB11501 DPA10105-DPB10101 DPA10105-DPB11801 DPA10105-DPB15001 DPA10106-DPB10101 DPA10201-DPB10101 DPA10201-DPB10501 DPA10201-DPB11501 DPA10202-DPB10101 DPA10202-DPB10201 DPA10202-DPB10202 DPA10202-DPB10501; note = HLAs: DPA10202-DPB110601 DPA10202-DPB11801 DPA10202-DPB11901 DPA10202-DPB13101 DPA10202-DPB13801 DPA10202-DPB15501 DPA10202-DPB16501 DPA10301-DPB10101 DPA10301-DPB10201 DPA10301-DPB10202 DPA10301-DPB10401 DPA10301-DPB10402 DPA10301-DPB110501 DPA10301-DPB110601 DPA10301-DPB11101 DPA10301-DPB11301 DPA10301-DPB11701 DPA10301-DPB11801 DPA10301-DPB12301 DPA10301-DPB13901 DPA10301-DPB14001 DPA10301-DPB14901 DPA10301-DPB15501 DPA10301-DPB16501 DPA10301-DPB17501 DPA10301-DPB18001 DPA10401-DPB10101 DPA10401-DPB10201 DPA10401-DPB10202 DPA10401-DPB10301 DPA10401-DPB10402 DPA10401-DPB10501 DPA10401-DPB110501 DPA10401-DPB11301 DPA10401-DPB113301 DPA10401-DPB11401 DPA10401-DPB14901 DQA10102-DQB10501 DQA10102-DQB10503 DQA10102-DQB10609 DQA10103-DQB10501 DQA10103-DQB10503 DQA10103-DQB10601 DQA10103-DQB10602 DQA10103-DQB10608 DQA10103-DQB10609
IYKRWIILGLNKIVRMYSPVS

SEQ ID NO: 4009 - protein, 22 aa, Human immunodeficiency virus 1
  source 1..22: note = HLAs: DRB1_0101 DRB1_0102 DRB1_0103 DRB1_0301 DRB1_0401 DRB1_0402 DRB1_0404 DRB1_0405 DRB1_0407 DRB1_0408 DRB1_0410 DRB1_0701 DRB1_0801 DRB1_0802 DRB1_0803 DRB1_0804 DRB1_0806 DRB1_0809 DRB1_0813 DRB1_0901 DRB1_1001 DRB1_1101 DRB1_1102 DRB1_1103 DRB1_1104 DRB1_1114 DRB1_1201 DRB1_1202 DRB1_1301 DRB1_1302 DRB1_1303 DRB1_1304 DRB1_1305 DRB1_1312 DRB1_1401 DRB1_1402 DRB1_1403 DRB1_1404 DRB1_1405 DRB1_1406 DRB1_1407 DRB1_1418 DRB1_1454 DRB1_1501 DRB1_1502 DRB1_1503 DRB1_1601 DRB1_1602 DPA10103-DPB10101 DPA10103-DPB10201 DPA10103-DPB10202 DPA10103-DPB10501 DPA10103-DPB10601 DPA10103-DPB11101 DPA10103-DPB113101 DPA10103-DPB11501 DPA10103-DPB11601 DPA10103-DPB11701 DPA10103-DPB11801 DPA10103-DPB11901 DPA10103-DPB12001 DPA10103-DPB12101 DPA10103-DPB13001 DPA10103-DPB13101 DPA10103-DPB13401 DPA10103-DPB14001 DPA10103-DPB14101 DPA10103-DPB14801 DPA10103-DPB15001 DPA10103-DPB15501 DPA10104-DPB10101 DPA10104-DPB11501 DPA10105-DPB10101 DPA10105-DPB11801 DPA10105-DPB15001 DPA10106-DPB10101; note = HLAs: DPA10201-DPB10101 DPA10201-DPB10501 DPA10201-DPB110601 DPA10201-DPB11501 DPA10201-DPB11601 DPA10201-DPB11901 DPA10202-DPB10101 DPA10202-DPB10201 DPA10202-DPB10202 DPA10202-DPB10501 DPA10202-DPB10901 DPA10202-DPB110601 DPA10202-DPB11101 DPA10202-DPB11301 DPA10202-DPB11801 DPA10202-DPB11901 DPA10202-DPB12101 DPA10202-DPB13001 DPA10202-DPB13101 DPA10202-DPB13801 DPA10202-DPB15501 DPA10202-DPB16501 DPA10301-DPB10101 DPA10301-DPB10201 DPA10301-DPB10202 DPA10301-DPB10401 DPA10301-DPB10402 DPA10301-DPB10901 DPA10301-DPB110501 DPA10301-DPB110601 DPA10301-DPB11101 DPA10301-DPB11301 DPA10301-DPB11701 DPA10301-DPB11801 DPA10301-DPB12301 DPA10301-DPB13901 DPA10301-DPB14001 DPA10301-DPB14901 DPA10301-DPB15501 DPA10301-DPB16501 DPA10301-DPB17501 DPA10301-DPB18001 DPA10401-DPB10101 DPA10401-DPB10201 DPA10401-DPB10202 DPA10401-DPB10301 DPA10401-DPB10402 DPA10401-DPB10501 DPA10401-DPB110501 DPA10401-DPB11301 DPA10401-DPB113301 DPA10401-DPB11401 DPA10401-DPB14901 DQA10102-DQB10501; note = HLAs: DQA10102-DQB10503 DQA10102-DQB10609 DQA10103-DQB10501 DQA10103-DQB10503 DQA10103-DQB10601 DQA10103-DQB10602 DQA10103-DQB10608 DQA10103-DQB10609 DQA10505-DQB10402
IYKRWIILGLNKIVRMYSPVSI

SEQ ID NO: 4010 - protein, 23 aa, Human immunodeficiency virus 1
  source 1..23: note = HLAs: DRB1_0101 DRB1_0102 DRB1_0103 DRB1_0301 DRB1_0401 DRB1_0402 DRB1_0403 DRB1_0404 DRB1_0405 DRB1_0406 DRB1_0407 DRB1_0408 DRB1_0410 DRB1_0701 DRB1_0801 DRB1_0802 DRB1_0803 DRB1_0804 DRB1_0806 DRB1_0809 DRB1_0813 DRB1_0901 DRB1_1001 DRB1_1101 DRB1_1102 DRB1_1103 DRB1_1104 DRB1_1114 DRB1_1201 DRB1_1202 DRB1_1301 DRB1_1302 DRB1_1303 DRB1_1304 DRB1_1305 DRB1_1312 DRB1_1401 DRB1_1402 DRB1_1403 DRB1_1404 DRB1_1405 DRB1_1406 DRB1_1407 DRB1_1418 DRB1_1454 DRB1_1501 DRB1_1502 DRB1_1503 DRB1_1601 DRB1_1602 DPA10103-DPB10101 DPA10103-DPB10201 DPA10103-DPB10202 DPA10103-DPB10301 DPA10103-DPB10501 DPA10103-DPB10601 DPA10103-DPB10901 DPA10103-DPB11001 DPA10103-DPB11101 DPA10103-DPB112401 DPA10103-DPB11301 DPA10103-DPB113101 DPA10103-DPB113301 DPA10103-DPB11401 DPA10103-DPB11501 DPA10103-DPB11601 DPA10103-DPB11701 DPA10103-DPB11801 DPA10103-DPB11901 DPA10103-DPB12001 DPA10103-DPB12101 DPA10103-DPB12901 DPA10103-DPB13001 DPA10103-DPB13101 DPA10103-DPB13401 DPA10103-DPB14001 DPA10103-DPB14101; note = HLAs: DPA10103-DPB14801 DPA10103-DPB15001 DPA10103-DPB15501 DPA10103-DPB15901 DPA10104-DPB10101 DPA10104-DPB10301 DPA10104-DPB11001 DPA10104-DPB11301 DPA10104-DPB11501 DPA10105-DPB10101 DPA10105-DPB10301 DPA10105-DPB11801 DPA10105-DPB15001 DPA10106-DPB10101 DPA10106-DPB11101 DPA10201-DPB10101 DPA10201-DPB10501 DPA10201-DPB110601 DPA10201-DPB11101 DPA10201-DPB11501 DPA10201-DPB11601 DPA10201-DPB11801 DPA10201-DPB11901 DPA10201-DPB13001 DPA10201-DPB15501 DPA10202-DPB10101 DPA10202-DPB10201 DPA10202-DPB10202 DPA10202-DPB10401 DPA10202-DPB10501 DPA10202-DPB10901 DPA10202-DPB110601 DPA10202-DPB11101 DPA10202-DPB11301 DPA10202-DPB113101 DPA10202-DPB11401 DPA10202-DPB11701 DPA10202-DPB11801 DPA10202-DPB11901 DPA10202-DPB12101 DPA10202-DPB12901 DPA10202-DPB13001 DPA10202-DPB13101 DPA10202-DPB13801 DPA10202-DPB15501 DPA10202-DPB16501 DPA10202-DPB18501 DPA10301-DPB10101 DPA10301-DPB10201 DPA10301-DPB10202 DPA10301-DPB10301 DPA10301-DPB10401 DPA10301-DPB10402 DPA10301-DPB10901 DPA10301-DPB110501; note = HLAs: DPA10301-DPB110601 DPA10301-DPB11101 DPA10301-DPB11301 DPA10301-DPB11701 DPA10301-DPB11801 DPA10301-DPB12301 DPA10301-DPB13901 DPA10301-DPB14001 DPA10301-DPB14901 DPA10301-DPB15501 DPA10301-DPB16501 DPA10301-DPB17501 DPA10301-DPB18001 DPA10401-DPB10101 DPA10401-DPB10201 DPA10401-DPB10202 DPA10401-DPB10301 DPA10401-DPB10402 DPA10401-DPB10501 DPA10401-DPB110501 DPA10401-DPB11301 DPA10401-DPB113301 DPA10401-DPB11401 DPA10401-DPB14901 DQA10102-DQB10501 DQA10102-DQB10503 DQA10102-DQB10601 DQA10102-DQB10609 DQA10103-DQB10501 DQA10103-DQB10503 DQA10103-DQB10601 DQA10103-DQB10602 DQA10103-DQB10604 DQA10103-DQB10608 DQA10103-DQB10609 DQA10501-DQB10501 DQA10505-DQB10402 DQA10505-DQB10501
IYKRWIILGLNKIVRMYSPVSIL

SEQ ID NO: 4011 - protein, 24 aa, Human immunodeficiency virus 1
  source 1..24: note = HLAs: DRB1_0101 DRB1_0102 DRB1_0103 DRB1_0301 DRB1_0401 DRB1_0402 DRB1_0403 DRB1_0404 DRB1_0405 DRB1_0406 DRB1_0407 DRB1_0408 DRB1_0410 DRB1_0701 DRB1_0801 DRB1_0802 DRB1_0803 DRB1_0804 DRB1_0806 DRB1_0809 DRB1_0813 DRB1_0901 DRB1_1001 DRB1_1101 DRB1_1102 DRB1_1103 DRB1_1104 DRB1_1114 DRB1_1201 DRB1_1202 DRB1_1301 DRB1_1302 DRB1_1303 DRB1_1304 DRB1_1305 DRB1_1312 DRB1_1401 DRB1_1402 DRB1_1403 DRB1_1404 DRB1_1405 DRB1_1406 DRB1_1407 DRB1_1418 DRB1_1454 DRB1_1501 DRB1_1502 DRB1_1503 DRB1_1601 DRB1_1602 DPA10103-DPB10101 DPA10103-DPB10201 DPA10103-DPB10202 DPA10103-DPB10301 DPA10103-DPB10501 DPA10103-DPB10601 DPA10103-DPB10901 DPA10103-DPB11001 DPA10103-DPB11101 DPA10103-DPB112401 DPA10103-DPB11301 DPA10103-DPB113101 DPA10103-DPB113301 DPA10103-DPB11401 DPA10103-DPB11501 DPA10103-DPB11601 DPA10103-DPB11701 DPA10103-DPB11801 DPA10103-DPB11901 DPA10103-DPB12001 DPA10103-DPB12101 DPA10103-DPB12901 DPA10103-DPB13001 DPA10103-DPB13101 DPA10103-DPB13401 DPA10103-DPB14001 DPA10103-DPB14101; note = HLAs: DPA10103-DPB14801 DPA10103-DPB15001 DPA10103-DPB15501 DPA10103-DPB15901 DPA10104-DPB10101 DPA10104-DPB10301 DPA10104-DPB11001 DPA10104-DPB11301 DPA10104-DPB11501 DPA10105-DPB10101 DPA10105-DPB10301 DPA10105-DPB11801 DPA10105-DPB15001 DPA10106-DPB10101 DPA10106-DPB11101 DPA10201-DPB10101 DPA10201-DPB10501 DPA10201-DPB10601 DPA10201-DPB10901 DPA10201-DPB110601 DPA10201-DPB11101 DPA10201-DPB11301 DPA10201-DPB113101 DPA10201-DPB113301 DPA10201-DPB11401 DPA10201-DPB11501 DPA10201-DPB11601 DPA10201-DPB11701 DPA10201-DPB11801 DPA10201-DPB11901 DPA10201-DPB13001 DPA10201-DPB13401 DPA10201-DPB15501 DPA10201-DPB19101 DPA10202-DPB10101 DPA10202-DPB10201 DPA10202-DPB10202 DPA10202-DPB10301 DPA10202-DPB10401 DPA10202-DPB10501 DPA10202-DPB10901 DPA10202-DPB110001 DPA10202-DPB110601 DPA10202-DPB11101 DPA10202-DPB11301 DPA10202-DPB113101 DPA10202-DPB11401 DPA10202-DPB11701 DPA10202-DPB11801 DPA10202-DPB11901 DPA10202-DPB12101 DPA10202-DPB12901 DPA10202-DPB13001 DPA10202-DPB13101; note = HLAs: DPA10202-DPB13801 DPA10202-DPB14501 DPA10202-DPB15501 DPA10202-DPB16501 DPA10202-DPB18501 DPA10301-DPB10101 DPA10301-DPB10201 DPA10301-DPB10202 DPA10301-DPB10301 DPA10301-DPB10401 DPA10301-DPB10402 DPA10301-DPB10901 DPA10301-DPB110501 DPA10301-DPB110601 DPA10301-DPB11101 DPA10301-DPB11301 DPA10301-DPB11701 DPA10301-DPB11801 DPA10301-DPB12301 DPA10301-DPB13901 DPA10301-DPB14001 DPA10301-DPB14901 DPA10301-DPB15501 DPA10301-DPB16501 DPA10301-DPB17501 DPA10301-DPB18001 DPA10401-DPB10101 DPA10401-DPB10201 DPA10401-DPB10202 DPA10401-DPB10301 DPA10401-DPB10402 DPA10401-DPB10501 DPA10401-DPB110501 DPA10401-DPB11301 DPA10401-DPB113301 DPA10401-DPB11401 DPA10401-DPB14901 DQA10102-DQB10501 DQA10102-DQB10503 DQA10102-DQB10601 DQA10102-DQB10609 DQA10103-DQB10501 DQA10103-DQB10503 DQA10103-DQB10601 DQA10103-DQB10602 DQA10103-DQB10604 DQA10103-DQB10608 DQA10103-DQB10609 DQA10501-DQB10501 DQA10505-DQB10402 DQA10505-DQB10501
IYKRWIILGLNKIVRMYSPVSILD

SEQ ID NO: 4012 - protein, 25 aa, Human immunodeficiency virus 1
  source 1..25: note = HLAs: DRB1_0101 DRB1_0102 DRB1_0103 DRB1_0301 DRB1_0401 DRB1_0402 DRB1_0403 DRB1_0404 DRB1_0405 DRB1_0406 DRB1_0407 DRB1_0408 DRB1_0410 DRB1_0411 DRB1_0701 DRB1_0801 DRB1_0802 DRB1_0803 DRB1_0804 DRB1_0806 DRB1_0809 DRB1_0813 DRB1_0901 DRB1_1001 DRB1_1101 DRB1_1102 DRB1_1103 DRB1_1104 DRB1_1114 DRB1_1201 DRB1_1202 DRB1_1301 DRB1_1302 DRB1_1303 DRB1_1304 DRB1_1305 DRB1_1312 DRB1_1401 DRB1_1402 DRB1_1403 DRB1_1404 DRB1_1405 DRB1_1406 DRB1_1407 DRB1_1418 DRB1_1454 DRB1_1501 DRB1_1502 DRB1_1503 DRB1_1601 DRB1_1602 DPA10103-DPB10101 DPA10103-DPB10201 DPA10103-DPB10202 DPA10103-DPB10301 DPA10103-DPB10401 DPA10103-DPB10402 DPA10103-DPB10501 DPA10103-DPB10601 DPA10103-DPB10901 DPA10103-DPB11001 DPA10103-DPB110501 DPA10103-DPB11101 DPA10103-DPB112401 DPA10103-DPB112601 DPA10103-DPB11301 DPA10103-DPB113101 DPA10103-DPB113301 DPA10103-DPB11401 DPA10103-DPB11501 DPA10103-DPB11601 DPA10103-DPB11701 DPA10103-DPB11801 DPA10103-DPB11901 DPA10103-DPB12001 DPA10103-DPB12101 DPA10103-DPB12301; note = HLAs: DPA10103-DPB12901 DPA10103-DPB13001 DPA10103-DPB13101 DPA10103-DPB13401 DPA10103-DPB13901 DPA10103-DPB14001 DPA10103-DPB14101 DPA10103-DPB14801 DPA10103-DPB14901 DPA10103-DPB15001 DPA10103-DPB15101 DPA10103-DPB15501 DPA10103-DPB15901 DPA10103-DPB18001 DPA10104-DPB10101 DPA10104-DPB10301 DPA10104-DPB11001 DPA10104-DPB11301 DPA10104-DPB11501 DPA10105-DPB10101 DPA10105-DPB10301 DPA10105-DPB10401 DPA10105-DPB11801 DPA10105-DPB15001 DPA10106-DPB10101 DPA10106-DPB11101 DPA10201-DPB10101 DPA10201-DPB10201 DPA10201-DPB10202 DPA10201-DPB10301 DPA10201-DPB10501 DPA10201-DPB10601 DPA10201-DPB10901 DPA10201-DPB110601 DPA10201-DPB11101 DPA10201-DPB11301 DPA10201-DPB113101 DPA10201-DPB113301 DPA10201-DPB11401 DPA10201-DPB11501 DPA10201-DPB11601 DPA10201-DPB11701 DPA10201-DPB11801 DPA10201-DPB11901 DPA10201-DPB12601 DPA10201-DPB13001 DPA10201-DPB13401 DPA10201-DPB14501 DPA10201-DPB15501 DPA10201-DPB19101 DPA10202-DPB10101 DPA10202-DPB10201 DPA10202-DPB10202 DPA10202-DPB10301 DPA10202-DPB10401; note = HLAs: DPA10202-DPB10402 DPA10202-DPB10501 DPA10202-DPB10901 DPA10202-DPB110001 DPA10202-DPB110501 DPA10202-DPB110601 DPA10202-DPB11101 DPA10202-DPB11301 DPA10202-DPB113101 DPA10202-DPB11401 DPA10202-DPB11701 DPA10202-DPB11801 DPA10202-DPB11901 DPA10202-DPB12101 DPA10202-DPB12901 DPA10202-DPB13001 DPA10202-DPB13101 DPA10202-DPB13801 DPA10202-DPB14501 DPA10202-DPB15501 DPA10202-DPB16501 DPA10202-DPB18501 DPA10301-DPB10101 DPA10301-DPB10201 DPA10301-DPB10202 DPA10301-DPB10301 DPA10301-DPB10401 DPA10301-DPB10402 DPA10301-DPB10901 DPA10301-DPB110501 DPA10301-DPB110601 DPA10301-DPB11101 DPA10301-DPB11301 DPA10301-DPB11701 DPA10301-DPB11801 DPA10301-DPB12301 DPA10301-DPB13901 DPA10301-DPB14001 DPA10301-DPB14901 DPA10301-DPB15501 DPA10301-DPB16501 DPA10301-DPB17501 DPA10301-DPB18001 DPA10401-DPB10101 DPA10401-DPB10201 DPA10401-DPB10202 DPA10401-DPB10301 DPA10401-DPB10402 DPA10401-DPB10501 DPA10401-DPB110501 DPA10401-DPB11301 DPA10401-DPB113301 DPA10401-DPB11401 DPA10401-DPB14901; note = HLAs: DQA10102-DQB10501 DQA10102-DQB10503 DQA10102-DQB10601 DQA10102-DQB10604 DQA10102-DQB10609 DQA10103-DQB10501 DQA10103-DQB10503 DQA10103-DQB10601 DQA10103-DQB10602 DQA10103-DQB10603 DQA10103-DQB10604 DQA10103-DQB10608 DQA10103-DQB10609 DQA10501-DQB10501 DQA10505-DQB10402 DQA10505-DQB10501
IYKRWIILGLNKIVRMYSPVSILDI

SEQ ID NO: 4013 - protein, 15 aa, Human immunodeficiency virus 1
  source 1..15: note = HLAs: DRB1_0101 DRB1_0408 DRB1_0410 DRB1_0801 DRB1_0806 DRB1_1001 DRB1_1101 DRB1_1102 DRB1_1103 DRB1_1104 DRB1_1202 DRB1_1301 DRB1_1304 DRB1_1305 DRB1_1406 DRB1_1601 DRB1_1602 DPA10103-DPB11501 DPA10104-DPB11501 DPA10301-DPB10201
IYQEPFKNLKTGKYA

SEQ ID NO: 4014 - protein, 13 aa, Human immunodeficiency virus 1
  source 1..13: note = HLAs: DRB1_1001 DQA10101-DQB10501 DQA10102-DQB10501 DQA10104-DQB10501 DQA10105-DQB10501
IYQYMDDLYVGSD

SEQ ID NO: 4015 - protein, 14 aa, Human immunodeficiency virus 1
  source 1..14: note = HLAs: DRB1_0101 DRB1_0405 DRB1_0408 DRB1_1001 DPA10301-DPB10101 DPA10301-DPB10201 DPA10301-DPB10202 DPA10301-DPB10401 DPA10301-DPB12301 DPA10301-DPB13901 DPA10401-DPB10101 DQA10101-DQB10501 DQA10102-DQB10501 DQA10102-DQB10503 DQA10104-DQB10501 DQA10105-DQB10501
IYQYMDDLYVGSDL

SEQ ID NO: 4016 - protein, 15 aa, Human immunodeficiency virus 1
  source 1..15: note = HLAs: DRB1_0101 DRB1_0401 DRB1_0405 DRB1_0408 DRB1_1001 DRB1_1602 DPA10103-DPB11501 DPA10104-DPB11501 DPA10301-DPB10101 DPA10301-DPB10201 DPA10301-DPB10202 DPA10301-DPB10401 DPA10301-DPB11801 DPA10301-DPB12301 DPA10301-DPB13901 DPA10401-DPB10101 DQA10101-DQB10501 DQA10102-DQB10501 DQA10102-DQB10503 DQA10102-DQB10609 DQA10103-DQB10501 DQA10104-DQB10501 DQA10105-DQB10501
IYQYMDDLYVGSDLE

SEQ ID NO: 4017 - protein, 16 aa, Human immunodeficiency virus 1
  source 1..16: note = HLAs: DRB1_0101 DRB1_0405 DRB1_0408 DRB1_1001 DPA10301-DPB10101 DPA10301-DPB10201 DPA10301-DPB10202 DPA10301-DPB10401 DPA10301-DPB12301 DPA10301-DPB13901 DPA10401-DPB10101 DQA10101-DQB10501 DQA10102-DQB10501 DQA10102-DQB10502 DQA10102-DQB10503 DQA10102-DQB10604 DQA10102-DQB10609 DQA10103-DQB10501 DQA10104-DQB10501 DQA10105-DQB10501 DQA10501-DQB10201 DQA10505-DQB10201 DQA10505-DQB10202
IYQYMDDLYVGSDLEI

SEQ ID NO: 4018 - protein, 17 aa, Human immunodeficiency virus 1
  source 1..17: note = HLAs: DRB1_1001 DPA10103-DPB11501 DPA10104-DPB11501 DPA10301-DPB10101 DPA10301-DPB10201 DPA10301-DPB10202 DPA10301-DPB10401 DPA10301-DPB11801 DPA10301-DPB12301 DPA10301-DPB13901 DPA10401-DPB10101 DQA10101-DQB10501 DQA10102-DQB10501 DQA10102-DQB10503 DQA10102-DQB10604 DQA10102-DQB10609 DQA10103-DQB10501 DQA10104-DQB10501 DQA10105-DQB10501
IYQYMDDLYVGSDLEIG

SEQ ID NO: 4019 - protein, 18 aa, Human immunodeficiency virus 1
  source 1..18: note = HLAs: DPA10301-DPB10101 DQA10101-DQB10501 DQA10102-DQB10501 DQA10102-DQB10609 DQA10104-DQB10501 DQA10105-DQB10501
IYQYMDDLYVGSDLEIGQ

SEQ ID NO: 4020 - protein, 19 aa, Human immunodeficiency virus 1
  source 1..19: note = HLAs: DRB1_1001 DPA10301-DPB10101 DPA10301-DPB10201 DPA10301-DPB10202 DPA10301-DPB10401 DPA10301-DPB11801 DPA10301-DPB12301 DPA10301-DPB13901 DPA10401-DPB10101 DQA10101-DQB10501 DQA10102-DQB10501 DQA10102-DQB10503 DQA10102-DQB10604 DQA10102-DQB10609 DQA10103-DQB10501 DQA10104-DQB10501 DQA10105-DQB10501 DQA10501-DQB10201 DQA10505-DQB10201 DQA10505-DQB10202
IYQYMDDLYVGSDLEIGQH

SEQ ID NO: 4021 - protein, 20 aa, Human immunodeficiency virus 1
  source 1..20: note = HLAs: DRB1_0101 DRB1_0405 DRB1_1001 DPA10103-DPB10101 DPA10103-DPB11501 DPA10104-DPB10101 DPA10104-DPB11501 DPA10105-DPB10101 DPA10202-DPB10101 DPA10301-DPB10101 DPA10301-DPB10201 DPA10301-DPB10202 DPA10301-DPB10401 DPA10301-DPB110601 DPA10301-DPB11801 DPA10301-DPB12301 DPA10301-DPB13901 DPA10301-DPB14001 DPA10301-DPB16501 DPA10401-DPB10101 DPA10401-DPB10201 DPA10401-DPB10202 DQA10101-DQB10501 DQA10102-DQB10501 DQA10102-DQB10503 DQA10102-DQB10604 DQA10102-DQB10609 DQA10103-DQB10501 DQA10103-DQB10609 DQA10104-DQB10501 DQA10105-DQB10501
IYQYMDDLYVGSDLEIGQHR

SEQ ID NO: 4022 - protein, 14 aa, Human immunodeficiency virus 1
  source 1..14: note = HLAs: DRB1_1001 DPA10103-DPB10101 DPA10103-DPB11501 DPA10104-DPB10101 DPA10104-DPB11501 DPA10105-DPB10101 DPA10202-DPB10101 DPA10301-DPB10101 DPA10301-DPB10201 DPA10301-DPB10202 DPA10301-DPB10401 DPA10301-DPB11801 DPA10301-DPB12301 DPA10301-DPB13901 DPA10301-DPB14001 DPA10301-DPB16501 DPA10401-DPB10101 DQA10102-DQB10501
KAFSPEVIPMFSAL

SEQ ID NO: 4023 - protein, 15 aa, Human immunodeficiency virus 1
  source 1..15: note = HLAs: DRB1_0101 DRB1_0102 DRB1_0401 DRB1_0404 DRB1_0405 DRB1_0408 DRB1_0410 DRB1_0701 DRB1_0804 DRB1_0806 DRB1_0813 DRB1_0901 DRB1_1001 DRB1_1104 DRB1_1114 DRB1_1302 DRB1_1304 DRB1_1406 DRB1_1501 DRB1_1601 DRB1_1602 DPA10103-DPB10101 DPA10103-DPB10201 DPA10103-DPB11501 DPA10103-DPB13101 DPA10103-DPB13401 DPA10103-DPB14801 DPA10103-DPB15001 DPA10104-DPB10101 DPA10104-DPB11501 DPA10105-DPB10101 DPA10105-DPB15001 DPA10106-DPB10101 DPA10201-DPB10101 DPA10201-DPB11501 DPA10202-DPB10101 DPA10202-DPB10202 DPA10202-DPB13101 DPA10301-DPB10101 DPA10301-DPB10201 DPA10301-DPB10202 DPA10301-DPB10401 DPA10301-DPB10402 DPA10301-DPB110501 DPA10301-DPB110601 DPA10301-DPB11801 DPA10301-DPB12301 DPA10301-DPB13901 DPA10301-DPB14001 DPA10301-DPB14901 DPA10301-DPB16501 DPA10301-DPB17501 DPA10301-DPB18001 DPA10401-DPB10101 DPA10401-DPB10201 DPA10401-DPB10202 DPA10401-DPB10501 DQA10102-DQB10501 DQA10103-DQB10501 DQA10103-DQB10609 DQA10201-DQB10301 DQA10201-DQB10303 DQA10505-DQB10402 DQA10506-DQB10303
KAFSPEVIPMFSALS

SEQ ID NO: 4024 - protein, 16 aa, Human immunodeficiency virus 1
  source 1..16: note = HLAs: DRB1_0101 DRB1_0102 DRB1_0401 DRB1_0404 DRB1_0405 DRB1_0408 DRB1_0410 DRB1_1001 DRB1_1501 DRB1_1602 DPA10103-DPB10101 DPA10103-DPB11501 DPA10103-DPB13101 DPA10103-DPB15001 DPA10104-DPB10101 DPA10104-DPB11501 DPA10105-DPB10101 DPA10105-DPB15001 DPA10106-DPB10101 DPA10201-DPB10101 DPA10201-DPB11501 DPA10202-DPB10101 DPA10202-DPB13101 DPA10301-DPB10101 DPA10301-DPB10201 DPA10301-DPB10202 DPA10301-DPB10401 DPA10301-DPB10402 DPA10301-DPB110501 DPA10301-DPB110601 DPA10301-DPB11801 DPA10301-DPB12301 DPA10301-DPB13901 DPA10301-DPB14001 DPA10301-DPB14901 DPA10301-DPB16501 DPA10301-DPB18001 DPA10401-DPB10101 DPA10401-DPB10201 DPA10401-DPB10202 DPA10401-DPB10501 DQA10102-DQB10501 DQA10102-DQB10503 DQA10102-DQB10609 DQA10103-DQB10501 DQA10103-DQB10609 DQA10201-DQB10301 DQA10201-DQB10303 DQA10505-DQB10402 DQA10506-DQB10303
KAFSPEVIPMFSALSE

SEQ ID NO: 4025 - protein, 17 aa, Human immunodeficiency virus 1
  source 1..17: note = HLAs: DRB1_0101 DRB1_0102 DRB1_0401 DRB1_0404 DRB1_0405 DRB1_0408 DRB1_0410 DRB1_0802 DRB1_0804 DRB1_0806 DRB1_0809 DRB1_0813 DRB1_0901 DRB1_1001 DRB1_1104 DRB1_1406 DRB1_1501 DRB1_1601 DRB1_1602 DPA10103-DPB10101 DPA10103-DPB11501 DPA10103-DPB15001 DPA10104-DPB10101 DPA10104-DPB11501 DPA10105-DPB10101 DPA10105-DPB15001 DPA10201-DPB11501 DPA10202-DPB10101 DPA10301-DPB10101 DPA10301-DPB10201 DPA10301-DPB10202 DPA10301-DPB10401 DPA10301-DPB10402 DPA10301-DPB110501 DPA10301-DPB110601 DPA10301-DPB11801 DPA10301-DPB12301 DPA10301-DPB13901 DPA10301-DPB14001 DPA10301-DPB14901 DPA10301-DPB16501 DPA10301-DPB18001 DPA10401-DPB10101 DPA10401-DPB10201 DPA10401-DPB10202 DPA10401-DPB10501 DQA10102-DQB10501 DQA10102-DQB10503 DQA10102-DQB10609 DQA10103-DQB10501 DQA10103-DQB10609 DQA10201-DQB10301 DQA10201-DQB10303 DQA10505-DQB10402 DQA10506-DQB10303
KAFSPEVIPMFSALSEG

SEQ ID NO: 4026 - protein, 18 aa, Human immunodeficiency virus 1
  source 1..18: note = HLAs: DRB1_0101 DRB1_0102 DRB1_0404 DRB1_0408 DRB1_1001 DPA10103-DPB11501 DPA10104-DPB11501 DPA10202-DPB10101 DPA10301-DPB10101 DPA10301-DPB10201 DPA10301-DPB10202 DPA10301-DPB10401 DPA10301-DPB11801 DPA10301-DPB12301 DPA10301-DPB13901 DPA10301-DPB14001 DPA10301-DPB16501 DPA10401-DPB10101 DQA10102-DQB10501 DQA10102-DQB10503 DQA10102-DQB10609 DQA10103-DQB10501 DQA10201-DQB10301 DQA10201-DQB10303
KAFSPEVIPMFSALSEGA

SEQ ID NO: 4027 - protein, 19 aa, Human immunodeficiency virus 1
  source 1..19: note = HLAs: DRB1_0101 DRB1_0102 DRB1_0401 DRB1_0404 DRB1_0405 DRB1_0408 DRB1_0410 DRB1_0802 DRB1_0804 DRB1_0809 DRB1_0813 DRB1_0901 DRB1_1001 DRB1_1104 DRB1_1406 DRB1_1501 DRB1_1601 DRB1_1602 DPA10103-DPB10101 DPA10103-DPB11501 DPA10103-DPB15001 DPA10104-DPB10101 DPA10104-DPB11501 DPA10105-DPB10101 DPA10105-DPB15001 DPA10202-DPB10101 DPA10301-DPB10101 DPA10301-DPB10201 DPA10301-DPB10202 DPA10301-DPB10401 DPA10301-DPB10402 DPA10301-DPB110501 DPA10301-DPB110601 DPA10301-DPB11801 DPA10301-DPB12301 DPA10301-DPB13901 DPA10301-DPB14001 DPA10301-DPB14901 DPA10301-DPB16501 DPA10301-DPB18001 DPA10401-DPB10101 DPA10401-DPB10201 DPA10401-DPB10501 DQA10102-DQB10501 DQA10102-DQB10503 DQA10102-DQB10601 DQA10102-DQB10609 DQA10103-DQB10501 DQA10103-DQB10601 DQA10103-DQB10609 DQA10201-DQB10301 DQA10201-DQB10302 DQA10201-DQB10303 DQA10505-DQB10302 DQA10505-DQB10402 DQA10506-DQB10303
KAFSPEVIPMFSALSEGAT

SEQ ID NO: 4028 - protein, 20 aa, Human immunodeficiency virus 1
  source 1..20: note = HLAs: DRB1_0101 DRB1_0102 DRB1_0401 DRB1_0404 DRB1_0405 DRB1_0408 DRB1_0410 DRB1_0801 DRB1_0802 DRB1_0804 DRB1_0806 DRB1_0809 DRB1_0813 DRB1_0901 DRB1_1001 DRB1_1101 DRB1_1104 DRB1_1305 DRB1_1406 DRB1_1501 DRB1_1502 DRB1_1503 DRB1_1601 DRB1_1602 DPA10103-DPB10101 DPA10103-DPB11501 DPA10103-DPB11601 DPA10103-DPB13101 DPA10103-DPB15001 DPA10104-DPB10101 DPA10104-DPB11501 DPA10105-DPB10101 DPA10105-DPB15001 DPA10106-DPB10101 DPA10201-DPB10101 DPA10202-DPB10101 DPA10202-DPB10202 DPA10202-DPB110601 DPA10202-DPB11901 DPA10202-DPB13101 DPA10202-DPB16501 DPA10301-DPB10101 DPA10301-DPB10201 DPA10301-DPB10202 DPA10301-DPB10401 DPA10301-DPB10402 DPA10301-DPB110501 DPA10301-DPB110601 DPA10301-DPB11801 DPA10301-DPB12301 DPA10301-DPB13901 DPA10301-DPB14001 DPA10301-DPB14901 DPA10301-DPB15501 DPA10301-DPB16501 DPA10301-DPB17501 DPA10301-DPB18001 DPA10401-DPB10101 DPA10401-DPB10201 DPA10401-DPB10202 DPA10401-DPB10301 DPA10401-DPB10501 DPA10401-DPB11401 DQA10102-DQB10501 DQA10102-DQB10503; note = HLAs: DQA10102-DQB10601 DQA10102-DQB10602 DQA10102-DQB10609 DQA10102-DQB10611 DQA10103-DQB10501 DQA10103-DQB10503 DQA10103-DQB10601 DQA10103-DQB10602 DQA10103-DQB10604 DQA10103-DQB10608 DQA10103-DQB10609 DQA10201-DQB10301 DQA10201-DQB10302 DQA10201-DQB10303 DQA10301-DQB10301 DQA10302-DQB10301 DQA10303-DQB10301 DQA10501-DQB10301 DQA10501-DQB10319 DQA10503-DQB10301 DQA10505-DQB10301 DQA10505-DQB10302 DQA10505-DQB10309 DQA10505-DQB10319 DQA10505-DQB10402 DQA10506-DQB10303 DQA10508-DQB10301 DQA10509-DQB10301 DQA10601-DQB10301
KAFSPEVIPMFSALSEGATP

SEQ ID NO: 4029 - protein, 21 aa, Human immunodeficiency virus 1
  source 1..21: note = HLAs: DRB1_0101 DRB1_0102 DRB1_0401 DRB1_0404 DRB1_0405 DRB1_0408 DRB1_0410 DRB1_0802 DRB1_0804 DRB1_0809 DRB1_0813 DRB1_0901 DRB1_1001 DRB1_1104 DRB1_1406 DRB1_1501 DRB1_1601 DRB1_1602 DPA10103-DPB10101 DPA10103-DPB11501 DPA10104-DPB10101 DPA10104-DPB11501 DPA10105-DPB10101 DPA10202-DPB10101 DPA10301-DPB10101 DPA10301-DPB10201 DPA10301-DPB10202 DPA10301-DPB10401 DPA10301-DPB110601 DPA10301-DPB11801 DPA10301-DPB12301 DPA10301-DPB13901 DPA10301-DPB14001 DPA10301-DPB16501 DPA10401-DPB10101 DQA10102-DQB10501 DQA10102-DQB10503 DQA10102-DQB10601 DQA10102-DQB10609 DQA10103-DQB10501 DQA10103-DQB10601 DQA10103-DQB10609 DQA10201-DQB10301 DQA10201-DQB10303 DQA10506-DQB10303
KAFSPEVIPMFSALSEGATPQ

SEQ ID NO: 4030 - protein, 22 aa, Human immunodeficiency virus 1
  source 1..22: note = HLAs: DRB1_0101 DRB1_0102 DRB1_0401 DRB1_0404 DRB1_0405 DRB1_0408 DRB1_0410 DRB1_0802 DRB1_0804 DRB1_0809 DRB1_0813 DRB1_0901 DRB1_1001 DRB1_1104 DRB1_1406 DRB1_1501 DRB1_1601 DRB1_1602 DPA10103-DPB10101 DPA10103-DPB11501 DPA10104-DPB10101 DPA10104-DPB11501 DPA10105-DPB10101 DPA10202-DPB10101 DPA10301-DPB10101 DPA10301-DPB10201 DPA10301-DPB10202 DPA10301-DPB10401 DPA10301-DPB110601 DPA10301-DPB11801 DPA10301-DPB12301 DPA10301-DPB13901 DPA10301-DPB14001 DPA10301-DPB16501 DPA10401-DPB10101 DQA10102-DQB10501 DQA10102-DQB10503 DQA10102-DQB10601 DQA10102-DQB10609 DQA10103-DQB10501 DQA10103-DQB10601 DQA10103-DQB10609 DQA10201-DQB10301 DQA10201-DQB10303 DQA10501-DQB10301 DQA10501-DQB10319 DQA10503-DQB10301 DQA10505-DQB10301 DQA10505-DQB10309 DQA10505-DQB10319 DQA10506-DQB10303 DQA10508-DQB10301 DQA10509-DQB10301
KAFSPEVIPMFSALSEGATPQD

SEQ ID NO: 4031 - protein, 23 aa, Human immunodeficiency virus 1
  source 1..23: note = HLAs: DRB1_0101 DRB1_0102 DRB1_0401 DRB1_0404 DRB1_0405 DRB1_0408 DRB1_0410 DRB1_0802 DRB1_0804 DRB1_0809 DRB1_0813 DRB1_0901 DRB1_1001 DRB1_1104 DRB1_1406 DRB1_1501 DRB1_1601 DRB1_1602 DPA10103-DPB10101 DPA10103-DPB11501 DPA10104-DPB10101 DPA10104-DPB11501 DPA10105-DPB10101 DPA10202-DPB10101 DPA10301-DPB10101 DPA10301-DPB10201 DPA10301-DPB10202 DPA10301-DPB10401 DPA10301-DPB110601 DPA10301-DPB11801 DPA10301-DPB12301 DPA10301-DPB13901 DPA10301-DPB14001 DPA10301-DPB16501 DPA10401-DPB10101 DQA10102-DQB10501 DQA10102-DQB10503 DQA10102-DQB10601 DQA10102-DQB10609 DQA10103-DQB10501 DQA10103-DQB10601 DQA10103-DQB10609 DQA10201-DQB10301 DQA10201-DQB10303 DQA10501-DQB10301 DQA10501-DQB10319 DQA10503-DQB10301 DQA10505-DQB10301 DQA10505-DQB10309 DQA10505-DQB10319 DQA10505-DQB10402 DQA10506-DQB10303 DQA10508-DQB10301 DQA10509-DQB10301 DQA10601-DQB10301
KAFSPEVIPMFSALSEGATPQDL

SEQ ID NO: 4032 - protein, 24 aa, Human immunodeficiency virus 1
  source 1..24: note = HLAs: DRB1_0101 DRB1_0102 DRB1_0401 DRB1_0404 DRB1_0405 DRB1_0408 DRB1_0410 DRB1_0802 DRB1_0804 DRB1_0806 DRB1_0809 DRB1_0813 DRB1_0901 DRB1_1001 DRB1_1104 DRB1_1406 DRB1_1501 DRB1_1601 DRB1_1602 DPA10103-DPB10101 DPA10103-DPB11501 DPA10104-DPB10101 DPA10104-DPB11501 DPA10105-DPB10101 DPA10202-DPB10101 DPA10301-DPB10101 DPA10301-DPB10201 DPA10301-DPB10202 DPA10301-DPB10401 DPA10301-DPB110601 DPA10301-DPB11801 DPA10301-DPB12301 DPA10301-DPB13901 DPA10301-DPB14001 DPA10301-DPB16501 DPA10401-DPB10101 DPA10401-DPB10501 DQA10102-DQB10501 DQA10102-DQB10503 DQA10102-DQB10601 DQA10102-DQB10609 DQA10102-DQB10611 DQA10103-DQB10501 DQA10103-DQB10601 DQA10103-DQB10609 DQA10201-DQB10301 DQA10201-DQB10303 DQA10401-DQB10301 DQA10401-DQB10319 DQA10501-DQB10301 DQA10501-DQB10319 DQA10503-DQB10301 DQA10505-DQB10301 DQA10505-DQB10309 DQA10505-DQB10319 DQA10505-DQB10402 DQA10506-DQB10303 DQA10508-DQB10301 DQA10509-DQB10301 DQA10601-DQB10301
KAFSPEVIPMFSALSEGATPQDLN

SEQ ID NO: 4033 - protein, 25 aa, Human immunodeficiency virus 1
  source 1..25: note = HLAs: DRB1_0101 DRB1_0102 DRB1_0401 DRB1_0404 DRB1_0405 DRB1_0408 DRB1_0410 DRB1_0802 DRB1_0804 DRB1_0806 DRB1_0809 DRB1_0813 DRB1_0901 DRB1_1001 DRB1_1104 DRB1_1406 DRB1_1501 DRB1_1601 DRB1_1602 DPA10103-DPB10101 DPA10103-DPB11501 DPA10104-DPB10101 DPA10104-DPB11501 DPA10105-DPB10101 DPA10202-DPB10101 DPA10301-DPB10101 DPA10301-DPB10201 DPA10301-DPB10202 DPA10301-DPB10401 DPA10301-DPB110601 DPA10301-DPB11801 DPA10301-DPB12301 DPA10301-DPB13901 DPA10301-DPB14001 DPA10301-DPB16501 DPA10401-DPB10101 DPA10401-DPB10501 DQA10102-DQB10501 DQA10102-DQB10503 DQA10102-DQB10601 DQA10102-DQB10609 DQA10102-DQB10611 DQA10103-DQB10501 DQA10103-DQB10601 DQA10103-DQB10609 DQA10201-DQB10301 DQA10201-DQB10303 DQA10401-DQB10301 DQA10401-DQB10319 DQA10501-DQB10301 DQA10501-DQB10319 DQA10503-DQB10301 DQA10505-DQB10301 DQA10505-DQB10302 DQA10505-DQB10309 DQA10505-DQB10319 DQA10505-DQB10402 DQA10506-DQB10303 DQA10508-DQB10301 DQA10509-DQB10301 DQA10601-DQB10301
KAFSPEVIPMFSALSEGATPQDLNT

SEQ ID NO: 4034 - protein, 14 aa, Human immunodeficiency virus 1
  source 1..14: note = HLAs: DQA10102-DQB10601 DQA10103-DQB10601 DQA10201-DQB10301 DQA10201-DQB10303 DQA10506-DQB10303
KAIGTVLVGPTPVN

SEQ ID NO: 4035 - protein, 15 aa, Human immunodeficiency virus 1
  source 1..15: note = HLAs: DRB1_0101 DRB1_0102 DRB1_0701 DRB1_0901 DRB1_1001 DQA10102-DQB10501 DQA10102-DQB10601 DQA10103-DQB10601 DQA10103-DQB10602 DQA10103-DQB10609 DQA10201-DQB10301 DQA10201-DQB10303 DQA10501-DQB10301 DQA10501-DQB10319 DQA10503-DQB10301 DQA10505-DQB10301 DQA10505-DQB10302 DQA10505-DQB10309 DQA10505-DQB10319 DQA10505-DQB10402 DQA10506-DQB10303 DQA10508-DQB10301 DQA10509-DQB10301 DQA10601-DQB10301
KAIGTVLVGPTPVNI

SEQ ID NO: 4036 - protein, 16 aa, Human immunodeficiency virus 1
  source 1..16: note = HLAs: DRB1_0101 DRB1_0701 DRB1_1001 DQA10102-DQB10501 DQA10102-DQB10601 DQA10102-DQB10609 DQA10103-DQB10601 DQA10103-DQB10609 DQA10201-DQB10301 DQA10201-DQB10302 DQA10201-DQB10303 DQA10301-DQB10301 DQA10302-DQB10301 DQA10303-DQB10301 DQA10501-DQB10301 DQA10501-DQB10319 DQA10503-DQB10301 DQA10505-DQB10301 DQA10505-DQB10302 DQA10505-DQB10309 DQA10505-DQB10319 DQA10505-DQB10402 DQA10506-DQB10303 DQA10508-DQB10301 DQA10509-DQB10301 DQA10601-DQB10301
KAIGTVLVGPTPVNII

SEQ ID NO: 4037 - protein, 17 aa, Human immunodeficiency virus 1
  source 1..17: note = HLAs: DRB1_0101 DRB1_0701 DRB1_0901 DRB1_1001 DQA10102-DQB10501 DQA10102-DQB10601 DQA10103-DQB10601 DQA10103-DQB10609 DQA10201-DQB10301 DQA10201-DQB10303 DQA10501-DQB10301 DQA10501-DQB10319 DQA10503-DQB10301 DQA10505-DQB10301 DQA10505-DQB10309 DQA10505-DQB10319 DQA10506-DQB10303 DQA10508-DQB10301 DQA10509-DQB10301 DQA10601-DQB10301
KAIGTVLVGPTPVNIIG

SEQ ID NO: 4038 - protein, 18 aa, Human immunodeficiency virus 1
  source 1..18: note = HLAs: DQA10103-DQB10601 DQA10201-DQB10301 DQA10201-DQB10303
KAIGTVLVGPTPVNIIGR

SEQ ID NO: 4039 - protein, 19 aa, Human immunodeficiency virus 1
  source 1..19: note = HLAs: DRB1_0101 DRB1_1001 DQA10102-DQB10501 DQA10102-DQB10601 DQA10103-DQB10601 DQA10103-DQB10609 DQA10201-DQB10301 DQA10201-DQB10303 DQA10506-DQB10303
KAIGTVLVGPTPVNIIGRN

SEQ ID NO: 4040 - protein, 13 aa, Human immunodeficiency virus 1
  source 1..13: note = HLAs: DRB1_0301
KAKIIRDYGKQMA

SEQ ID NO: 4041 - protein, 14 aa, Human immunodeficiency virus 1
  source 1..14: note = HLAs: DRB1_0301 DRB1_1102 DRB1_1103 DRB1_1104 DRB1_1114 DRB1_1301 DRB1_1302 DRB1_1304 DRB1_1406 DRB1_1501
KAKIIRDYGKQMAG

SEQ ID NO: 4042 - protein, 15 aa, Human immunodeficiency virus 1
  source 1..15: note = HLAs: DRB1_0101 DRB1_0301 DRB1_0804 DRB1_0806 DRB1_1102 DRB1_1103 DRB1_1104 DRB1_1114 DRB1_1301 DRB1_1302 DRB1_1304 DRB1_1402 DRB1_1406 DRB1_1501 DRB1_1503
KAKIIRDYGKQMAGD

SEQ ID NO: 4043 - protein, 16 aa, Human immunodeficiency virus 1
  source 1..16: note = HLAs: DRB1_0301 DRB1_1102 DRB1_1103 DRB1_1104 DRB1_1114 DRB1_1301 DRB1_1302 DRB1_1304 DRB1_1406 DQA10102-DQB10501
KAKIIRDYGKQMAGDD

SEQ ID NO: 4044 - protein, 17 aa, Human immunodeficiency virus 1
  source 1..17: note = HLAs: DRB1_0301 DRB1_1102 DRB1_1103 DRB1_1104 DRB1_1114 DRB1_1301 DRB1_1302 DRB1_1304 DRB1_1406
KAKIIRDYGKQMAGDDC

SEQ ID NO: 4045 - protein, 18 aa, Human immunodeficiency virus 1
  source 1..18: note = HLAs: DRB1_0301
KAKIIRDYGKQMAGDDCV

SEQ ID NO: 4046 - protein, 19 aa, Human immunodeficiency virus 1
  source 1..19: note = HLAs: DRB1_0301 DRB1_1102 DRB1_1103 DRB1_1114 DRB1_1301 DRB1_1302 DRB1_1304
KAKIIRDYGKQMAGDDCVA

SEQ ID NO: 4047 - protein, 20 aa, Human immunodeficiency virus 1
  source 1..20: note = HLAs: DRB1_0301 DRB1_0806 DRB1_1102 DRB1_1103 DRB1_1104 DRB1_1114 DRB1_1301 DRB1_1302 DRB1_1304 DRB1_1406 DRB1_1501 DQA10102-DQB10501
KAKIIRDYGKQMAGDDCVAG

SEQ ID NO: 4048 - protein, 21 aa, Human immunodeficiency virus 1
  source 1..21: note = HLAs: DRB1_0301 DRB1_1102 DRB1_1103 DRB1_1114 DRB1_1301 DRB1_1302 DRB1_1304
KAKIIRDYGKQMAGDDCVAGR

SEQ ID NO: 4049 - protein, 22 aa, Human immunodeficiency virus 1
  source 1..22: note = HLAs: DRB1_0301 DRB1_1102 DRB1_1103 DRB1_1114 DRB1_1301 DRB1_1302 DRB1_1304 DQA10102-DQB10501
KAKIIRDYGKQMAGDDCVAGRQ

SEQ ID NO: 4050 - protein, 23 aa, Human immunodeficiency virus 1
  source 1..23: note = HLAs: DRB1_0301 DRB1_1102 DRB1_1103 DRB1_1114 DRB1_1301 DRB1_1302 DRB1_1304 DQA10102-DQB10501
KAKIIRDYGKQMAGDDCVAGRQD

SEQ ID NO: 4051 - protein, 24 aa, Human immunodeficiency virus 1
  source 1..24: note = HLAs: DRB1_0301 DRB1_1102 DRB1_1103 DRB1_1114 DRB1_1301 DRB1_1302 DRB1_1304 DQA10102-DQB10501
KAKIIRDYGKQMAGDDCVAGRQDE

SEQ ID NO: 4052 - protein, 25 aa, Human immunodeficiency virus 1
  source 1..25: note = HLAs: DRB1_0301 DRB1_1102 DRB1_1103 DRB1_1114 DRB1_1301 DRB1_1302 DRB1_1304 DQA10102-DQB10501
KAKIIRDYGKQMAGDDCVAGRQDED

SEQ ID NO: 4053 - protein, 13 aa, Human immunodeficiency virus 1
  source 1..13: note = HLAs: DPA10103-DPB10301 DPA10103-DPB112401 DPA10103-DPB15001 DPA10104-DPB10301 DPA10105-DPB10301 DPA10105-DPB15001 DPA10301-DPB10101 DPA10401-DPB10101 DPA10401-DPB10301 DPA10401-DPB11401 DQA10102-DQB10501
KARVLAEAMSQVT

SEQ ID NO: 4054 - protein, 14 aa, Human immunodeficiency virus 1
  source 1..14: note = HLAs: DRB1_0101 DRB1_1001 DPA10103-DPB10101 DPA10103-DPB10301 DPA10103-DPB10601 DPA10103-DPB112401 DPA10103-DPB11401 DPA10103-DPB11501 DPA10103-DPB12001 DPA10103-DPB12901 DPA10103-DPB15001 DPA10104-DPB10101 DPA10104-DPB10301 DPA10104-DPB11501 DPA10105-DPB10101 DPA10105-DPB10301 DPA10105-DPB15001 DPA10202-DPB10101 DPA10301-DPB10101 DPA10301-DPB10201 DPA10301-DPB10202 DPA10301-DPB10301 DPA10301-DPB10401 DPA10301-DPB110601 DPA10301-DPB11801 DPA10301-DPB12301 DPA10301-DPB13901 DPA10301-DPB14001 DPA10301-DPB16501 DPA10401-DPB10101 DPA10401-DPB10301 DPA10401-DPB10501 DPA10401-DPB11301 DPA10401-DPB113301 DPA10401-DPB11401 DQA10102-DQB10501 DQA10201-DQB10301 DQA10501-DQB10301 DQA10501-DQB10319 DQA10503-DQB10301 DQA10505-DQB10301 DQA10505-DQB10309 DQA10505-DQB10319 DQA10508-DQB10301 DQA10509-DQB10301
KARVLAEAMSQVTN

SEQ ID NO: 4055 - protein, 15 aa, Human immunodeficiency virus 1
  source 1..15: note = HLAs: DRB1_0405 DRB1_0410 DRB1_0806 DRB1_1001 DRB1_1304 DPA10103-DPB10101 DPA10103-DPB10201 DPA10103-DPB10202 DPA10103-DPB11501 DPA10103-DPB11601 DPA10103-DPB11901 DPA10103-DPB13101 DPA10103-DPB13401 DPA10103-DPB14001 DPA10103-DPB14101 DPA10103-DPB14801 DPA10103-DPB15001 DPA10104-DPB10101 DPA10104-DPB11501 DPA10105-DPB10101 DPA10105-DPB15001 DPA10201-DPB110601 DPA10201-DPB11501 DPA10201-DPB11601 DPA10201-DPB11901 DPA10202-DPB10101 DPA10202-DPB110601 DPA10202-DPB11901 DPA10202-DPB13101 DPA10202-DPB16501 DPA10301-DPB10101 DPA10301-DPB10201 DPA10301-DPB10202 DPA10301-DPB10401 DPA10301-DPB110601 DPA10301-DPB11801 DPA10301-DPB12301 DPA10301-DPB13901 DPA10301-DPB14001 DPA10301-DPB16501 DPA10401-DPB10101 DPA10401-DPB10201 DPA10401-DPB10202 DPA10401-DPB10501
KDSTKWRKLVDFREL

SEQ ID NO: 4056 - protein, 16 aa, Human immunodeficiency virus 1
  source 1..16: note = HLAs: DRB1_0405 DRB1_0410 DPA10103-DPB10101 DPA10103-DPB10201 DPA10103-DPB10202 DPA10103-DPB11501 DPA10103-DPB11601 DPA10103-DPB11901 DPA10103-DPB13101 DPA10103-DPB13401 DPA10103-DPB14801 DPA10103-DPB15001 DPA10104-DPB10101 DPA10104-DPB11501 DPA10105-DPB10101 DPA10105-DPB15001 DPA10106-DPB10101 DPA10201-DPB10101 DPA10201-DPB110601 DPA10201-DPB11501 DPA10201-DPB11601 DPA10201-DPB11901 DPA10202-DPB10101 DPA10202-DPB110601 DPA10202-DPB11901 DPA10202-DPB13101 DPA10202-DPB16501 DPA10301-DPB10101 DPA10301-DPB10201 DPA10301-DPB10202 DPA10301-DPB10401 DPA10301-DPB110601 DPA10301-DPB11801 DPA10301-DPB12301 DPA10301-DPB13901 DPA10301-DPB14001 DPA10301-DPB16501 DPA10401-DPB10101 DPA10401-DPB10201 DPA10401-DPB10202 DPA10401-DPB10501
KDSTKWRKLVDFRELN

SEQ ID NO: 4057 - protein, 17 aa, Human immunodeficiency virus 1
  source 1..17: note = HLAs: DRB1_0405 DRB1_0410 DRB1_1001 DRB1_1304 DPA10103-DPB10101 DPA10103-DPB10201 DPA10103-DPB10202 DPA10103-DPB10501 DPA10103-DPB11501 DPA10103-DPB11601 DPA10103-DPB11901 DPA10103-DPB13101 DPA10103-DPB13401 DPA10103-DPB14001 DPA10103-DPB14101 DPA10103-DPB14801 DPA10103-DPB15001 DPA10104-DPB10101 DPA10104-DPB11501 DPA10105-DPB10101 DPA10105-DPB15001 DPA10106-DPB10101 DPA10201-DPB10101 DPA10201-DPB110601 DPA10201-DPB11501 DPA10201-DPB11601 DPA10201-DPB11901 DPA10202-DPB10101 DPA10202-DPB10501 DPA10202-DPB110601 DPA10202-DPB11901 DPA10202-DPB13101 DPA10202-DPB13801 DPA10202-DPB16501 DPA10301-DPB10101 DPA10301-DPB10201 DPA10301-DPB10202 DPA10301-DPB10401 DPA10301-DPB110601 DPA10301-DPB11801 DPA10301-DPB12301 DPA10301-DPB13901 DPA10301-DPB14001 DPA10301-DPB16501 DPA10401-DPB10101 DPA10401-DPB10201 DPA10401-DPB10202 DPA10401-DPB10501
KDSTKWRKLVDFRELNK

SEQ ID NO: 4058 - protein, 18 aa, Human immunodeficiency virus 1
  source 1..18: note = HLAs: DRB1_0405 DPA10103-DPB10101 DPA10103-DPB11501 DPA10103-DPB11601 DPA10103-DPB11901 DPA10103-DPB13101 DPA10104-DPB10101 DPA10104-DPB11501 DPA10105-DPB10101 DPA10201-DPB110601 DPA10201-DPB11501 DPA10201-DPB11601 DPA10201-DPB11901 DPA10202-DPB10101 DPA10202-DPB110601 DPA10202-DPB11901 DPA10202-DPB13101 DPA10301-DPB10101 DPA10301-DPB10201 DPA10301-DPB10202 DPA10301-DPB10401 DPA10301-DPB110601 DPA10301-DPB11801 DPA10301-DPB12301 DPA10301-DPB13901 DPA10301-DPB14001 DPA10301-DPB16501 DPA10401-DPB10101 DPA10401-DPB10201 DPA10401-DPB10202 DPA10401-DPB10501
KDSTKWRKLVDFRELNKR

SEQ ID NO: 4059 - protein, 19 aa, Human immunodeficiency virus 1
  source 1..19: note = HLAs: DRB1_0405 DRB1_0410 DRB1_1001 DRB1_1304 DPA10103-DPB10101 DPA10103-DPB10201 DPA10103-DPB10202 DPA10103-DPB10501 DPA10103-DPB11501 DPA10103-DPB11601 DPA10103-DPB11901 DPA10103-DPB13101 DPA10103-DPB13401 DPA10103-DPB14001 DPA10103-DPB14101 DPA10103-DPB14801 DPA10103-DPB15001 DPA10104-DPB10101 DPA10104-DPB11501 DPA10105-DPB10101 DPA10105-DPB15001 DPA10106-DPB10101 DPA10201-DPB10101 DPA10201-DPB110601 DPA10201-DPB11501 DPA10201-DPB11601 DPA10201-DPB11901 DPA10202-DPB10101 DPA10202-DPB10202 DPA10202-DPB10501 DPA10202-DPB110601 DPA10202-DPB11901 DPA10202-DPB13101 DPA10202-DPB13801 DPA10202-DPB16501 DPA10301-DPB10101 DPA10301-DPB10201 DPA10301-DPB10202 DPA10301-DPB10401 DPA10301-DPB10402 DPA10301-DPB110501 DPA10301-DPB110601 DPA10301-DPB11801 DPA10301-DPB12301 DPA10301-DPB13901 DPA10301-DPB14001 DPA10301-DPB14901 DPA10301-DPB15501 DPA10301-DPB16501 DPA10301-DPB18001 DPA10401-DPB10101 DPA10401-DPB10201 DPA10401-DPB10202 DPA10401-DPB10501
KDSTKWRKLVDFRELNKRT

SEQ ID NO: 4060 - protein, 20 aa, Human immunodeficiency virus 1
  source 1..20: note = HLAs: DRB1_0405 DRB1_0410 DRB1_0801 DRB1_0806 DRB1_1001 DRB1_1101 DRB1_1102 DRB1_1103 DRB1_1104 DRB1_1301 DRB1_1304 DRB1_1305 DPA10103-DPB10101 DPA10103-DPB10201 DPA10103-DPB10202 DPA10103-DPB10501 DPA10103-DPB10601 DPA10103-DPB11101 DPA10103-DPB11501 DPA10103-DPB11601 DPA10103-DPB11801 DPA10103-DPB11901 DPA10103-DPB13101 DPA10103-DPB13401 DPA10103-DPB14001 DPA10103-DPB14101 DPA10103-DPB14801 DPA10103-DPB15001 DPA10103-DPB15501 DPA10103-DPB15901 DPA10104-DPB10101 DPA10104-DPB11501 DPA10105-DPB10101 DPA10105-DPB11801 DPA10105-DPB15001 DPA10106-DPB10101 DPA10201-DPB10101 DPA10201-DPB10501 DPA10201-DPB110601 DPA10201-DPB11501 DPA10201-DPB11601 DPA10201-DPB11901 DPA10201-DPB13401 DPA10202-DPB10101 DPA10202-DPB10201 DPA10202-DPB10202 DPA10202-DPB10501 DPA10202-DPB110601 DPA10202-DPB11101 DPA10202-DPB11801 DPA10202-DPB11901 DPA10202-DPB13101 DPA10202-DPB13801 DPA10202-DPB15501 DPA10202-DPB16501 DPA10301-DPB10101 DPA10301-DPB10201 DPA10301-DPB10202 DPA10301-DPB10401 DPA10301-DPB10402; note = HLAs: DPA10301-DPB110501 DPA10301-DPB110601 DPA10301-DPB11101 DPA10301-DPB11801 DPA10301-DPB12301 DPA10301-DPB13901 DPA10301-DPB14001 DPA10301-DPB14901 DPA10301-DPB15501 DPA10301-DPB16501 DPA10301-DPB18001 DPA10401-DPB10101 DPA10401-DPB10201 DPA10401-DPB10202 DPA10401-DPB10501 DQA10102-DQB10501
KDSTKWRKLVDFRELNKRTQ

SEQ ID NO: 4061 - protein, 21 aa, Human immunodeficiency virus 1
  source 1..21: note = HLAs: DRB1_0405 DRB1_0410 DRB1_0801 DRB1_0806 DRB1_1001 DRB1_1101 DRB1_1103 DRB1_1104 DRB1_1304 DRB1_1305 DPA10103-DPB10101 DPA10103-DPB10201 DPA10103-DPB10202 DPA10103-DPB10501 DPA10103-DPB11501 DPA10103-DPB11601 DPA10103-DPB11901 DPA10103-DPB13101 DPA10103-DPB13401 DPA10103-DPB14001 DPA10103-DPB14101 DPA10103-DPB14801 DPA10103-DPB15001 DPA10104-DPB10101 DPA10104-DPB11501 DPA10105-DPB10101 DPA10105-DPB15001 DPA10106-DPB10101 DPA10201-DPB10101 DPA10201-DPB10501 DPA10201-DPB110601 DPA10201-DPB11501 DPA10201-DPB11601 DPA10201-DPB11901 DPA10202-DPB10101 DPA10202-DPB10501 DPA10202-DPB110601 DPA10202-DPB11901 DPA10202-DPB13101 DPA10202-DPB13801 DPA10202-DPB16501 DPA10301-DPB10101 DPA10301-DPB10201 DPA10301-DPB10202 DPA10301-DPB10401 DPA10301-DPB10402 DPA10301-DPB110501 DPA10301-DPB110601 DPA10301-DPB11801 DPA10301-DPB12301 DPA10301-DPB13901 DPA10301-DPB14001 DPA10301-DPB14901 DPA10301-DPB15501 DPA10301-DPB16501 DPA10301-DPB18001 DPA10401-DPB10101 DPA10401-DPB10201 DPA10401-DPB10202; note = HLAs: DPA10401-DPB10501
KDSTKWRKLVDFRELNKRTQD

SEQ ID NO: 4062 - protein, 22 aa, Human immunodeficiency virus 1
  source 1..22: note = HLAs: DRB1_0405 DRB1_0410 DRB1_0801 DRB1_0806 DRB1_1001 DRB1_1101 DRB1_1103 DRB1_1104 DRB1_1304 DRB1_1305 DPA10103-DPB10101 DPA10103-DPB10201 DPA10103-DPB10202 DPA10103-DPB10501 DPA10103-DPB11501 DPA10103-DPB11601 DPA10103-DPB11901 DPA10103-DPB13101 DPA10103-DPB13401 DPA10103-DPB14001 DPA10103-DPB14101 DPA10103-DPB14801 DPA10103-DPB15001 DPA10104-DPB10101 DPA10104-DPB11501 DPA10105-DPB10101 DPA10105-DPB15001 DPA10106-DPB10101 DPA10201-DPB10101 DPA10201-DPB10501 DPA10201-DPB110601 DPA10201-DPB11501 DPA10201-DPB11601 DPA10201-DPB11901 DPA10202-DPB10101 DPA10202-DPB10501 DPA10202-DPB110601 DPA10202-DPB11901 DPA10202-DPB13101 DPA10202-DPB13801 DPA10202-DPB16501 DPA10301-DPB10101 DPA10301-DPB10201 DPA10301-DPB10202 DPA10301-DPB10401 DPA10301-DPB10402 DPA10301-DPB110501 DPA10301-DPB110601 DPA10301-DPB11801 DPA10301-DPB12301 DPA10301-DPB13901 DPA10301-DPB14001 DPA10301-DPB14901 DPA10301-DPB15501 DPA10301-DPB16501 DPA10301-DPB18001 DPA10401-DPB10101 DPA10401-DPB10201 DPA10401-DPB10202; note = HLAs: DPA10401-DPB10501
KDSTKWRKLVDFRELNKRTQDF

SEQ ID NO: 4063 - protein, 23 aa, Human immunodeficiency virus 1
  source 1..23: note = HLAs: DRB1_0405 DRB1_0410 DRB1_0801 DRB1_0806 DRB1_1001 DRB1_1101 DRB1_1103 DRB1_1104 DRB1_1304 DRB1_1305 DPA10103-DPB10101 DPA10103-DPB10201 DPA10103-DPB10202 DPA10103-DPB10501 DPA10103-DPB11501 DPA10103-DPB11601 DPA10103-DPB11901 DPA10103-DPB13101 DPA10103-DPB13401 DPA10103-DPB14001 DPA10103-DPB14101 DPA10103-DPB14801 DPA10103-DPB15001 DPA10104-DPB10101 DPA10104-DPB11501 DPA10105-DPB10101 DPA10105-DPB15001 DPA10106-DPB10101 DPA10201-DPB10101 DPA10201-DPB10501 DPA10201-DPB110601 DPA10201-DPB11501 DPA10201-DPB11601 DPA10201-DPB11901 DPA10202-DPB10101 DPA10202-DPB10501 DPA10202-DPB110601 DPA10202-DPB11901 DPA10202-DPB13101 DPA10202-DPB13801 DPA10202-DPB16501 DPA10301-DPB10101 DPA10301-DPB10201 DPA10301-DPB10202 DPA10301-DPB10401 DPA10301-DPB10402 DPA10301-DPB110501 DPA10301-DPB110601 DPA10301-DPB11801 DPA10301-DPB12301 DPA10301-DPB13901 DPA10301-DPB14001 DPA10301-DPB14901 DPA10301-DPB15501 DPA10301-DPB16501 DPA10301-DPB18001 DPA10401-DPB10101 DPA10401-DPB10201 DPA10401-DPB10202; note = HLAs: DPA10401-DPB10501
KDSTKWRKLVDFRELNKRTQDFW

SEQ ID NO: 4064 - protein, 24 aa, Human immunodeficiency virus 1
  source 1..24: note = HLAs: DRB1_0405 DRB1_0410 DRB1_0801 DRB1_0806 DRB1_1001 DRB1_1101 DRB1_1103 DRB1_1104 DRB1_1304 DRB1_1305 DPA10103-DPB10101 DPA10103-DPB10201 DPA10103-DPB10202 DPA10103-DPB10501 DPA10103-DPB11501 DPA10103-DPB11601 DPA10103-DPB11901 DPA10103-DPB13101 DPA10103-DPB13401 DPA10103-DPB14001 DPA10103-DPB14101 DPA10103-DPB14801 DPA10103-DPB15001 DPA10104-DPB10101 DPA10104-DPB11501 DPA10105-DPB10101 DPA10105-DPB15001 DPA10106-DPB10101 DPA10201-DPB10101 DPA10201-DPB10501 DPA10201-DPB110601 DPA10201-DPB11501 DPA10201-DPB11601 DPA10201-DPB11901 DPA10202-DPB10101 DPA10202-DPB10501 DPA10202-DPB110601 DPA10202-DPB11901 DPA10202-DPB13101 DPA10202-DPB13801 DPA10202-DPB16501 DPA10301-DPB10101 DPA10301-DPB10201 DPA10301-DPB10202 DPA10301-DPB10401 DPA10301-DPB10402 DPA10301-DPB110501 DPA10301-DPB110601 DPA10301-DPB11801 DPA10301-DPB12301 DPA10301-DPB13901 DPA10301-DPB14001 DPA10301-DPB14901 DPA10301-DPB15501 DPA10301-DPB16501 DPA10301-DPB18001 DPA10401-DPB10101 DPA10401-DPB10201 DPA10401-DPB10202; note = HLAs: DPA10401-DPB10501
KDSTKWRKLVDFRELNKRTQDFWE

SEQ ID NO: 4065 - protein, 25 aa, Human immunodeficiency virus 1
  source 1..25: note = HLAs: DRB1_0405 DRB1_0410 DRB1_0801 DRB1_0804 DRB1_0806 DRB1_1001 DRB1_1101 DRB1_1102 DRB1_1103 DRB1_1104 DRB1_1301 DRB1_1304 DRB1_1305 DPA10103-DPB10101 DPA10103-DPB10201 DPA10103-DPB10202 DPA10103-DPB10501 DPA10103-DPB11501 DPA10103-DPB11601 DPA10103-DPB11901 DPA10103-DPB13101 DPA10103-DPB13401 DPA10103-DPB14001 DPA10103-DPB14101 DPA10103-DPB14801 DPA10103-DPB15001 DPA10104-DPB10101 DPA10104-DPB11501 DPA10105-DPB10101 DPA10105-DPB15001 DPA10106-DPB10101 DPA10201-DPB10101 DPA10201-DPB10501 DPA10201-DPB110601 DPA10201-DPB11501 DPA10201-DPB11601 DPA10201-DPB11901 DPA10202-DPB10101 DPA10202-DPB10202 DPA10202-DPB10501 DPA10202-DPB110601 DPA10202-DPB11901 DPA10202-DPB13101 DPA10202-DPB13801 DPA10202-DPB16501 DPA10301-DPB10101 DPA10301-DPB10201 DPA10301-DPB10202 DPA10301-DPB10401 DPA10301-DPB10402 DPA10301-DPB110501 DPA10301-DPB110601 DPA10301-DPB11801 DPA10301-DPB12301 DPA10301-DPB13901 DPA10301-DPB14001 DPA10301-DPB14901 DPA10301-DPB15501 DPA10301-DPB16501 DPA10301-DPB18001; note = HLAs: DPA10401-DPB10101 DPA10401-DPB10201 DPA10401-DPB10202 DPA10401-DPB10501 DQA10102-DQB10501
KDSTKWRKLVDFRELNKRTQDFWEV

SEQ ID NO: 4066 - protein, 13 aa, Human immunodeficiency virus 1
  source 1..13: note = HLAs: DRB1_1114 DRB1_1302
KDSWTVNDIQKLV

SEQ ID NO: 4067 - protein, 14 aa, Human immunodeficiency virus 1
  source 1..14: note = HLAs: DRB1_1114 DRB1_1302 DPA10301-DPB10201 DPA10301-DPB10202 DQA10102-DQB10501
KDSWTVNDIQKLVG

SEQ ID NO: 4068 - protein, 15 aa, Human immunodeficiency virus 1
  source 1..15: note = HLAs: DRB1_0101 DRB1_0806 DRB1_0813 DRB1_1001 DRB1_1102 DRB1_1104 DRB1_1114 DRB1_1301 DRB1_1302 DRB1_1304 DRB1_1402 DRB1_1406 DRB1_1407 DPA10301-DPB10201 DPA10301-DPB10202 DPA10301-DPB10401 DPA10301-DPB12301 DPA10301-DPB13901 DPA10401-DPB10201 DPA10401-DPB10202 DQA10102-DQB10501
KDSWTVNDIQKLVGK

SEQ ID NO: 4069 - protein, 16 aa, Human immunodeficiency virus 1
  source 1..16: note = HLAs: DRB1_0101 DRB1_1114 DRB1_1302 DRB1_1402 DPA10202-DPB10101 DPA10301-DPB10101 DPA10301-DPB10201 DPA10301-DPB10202 DPA10301-DPB10401 DPA10301-DPB12301 DPA10301-DPB13901 DPA10401-DPB10101 DPA10401-DPB10201 DPA10401-DPB10202 DQA10102-DQB10501
KDSWTVNDIQKLVGKL

SEQ ID NO: 4070 - protein, 17 aa, Human immunodeficiency virus 1
  source 1..17: note = HLAs: DRB1_0101 DRB1_1001 DRB1_1104 DRB1_1114 DRB1_1302 DRB1_1402 DRB1_1406 DPA10301-DPB10101 DPA10301-DPB10201 DPA10301-DPB10202 DPA10401-DPB10101 DQA10102-DQB10501
KDSWTVNDIQKLVGKLN

SEQ ID NO: 4071 - protein, 18 aa, Human immunodeficiency virus 1
  source 1..18: note = HLAs: DRB1_1114 DRB1_1302
KDSWTVNDIQKLVGKLNW

SEQ ID NO: 4072 - protein, 19 aa, Human immunodeficiency virus 1
  source 1..19: note = HLAs: DRB1_0101 DRB1_0102 DRB1_1001 DRB1_1104 DRB1_1114 DRB1_1302 DRB1_1402 DRB1_1406 DPA10202-DPB10101 DPA10301-DPB10101 DPA10301-DPB10201 DPA10301-DPB10202 DPA10401-DPB10101 DQA10102-DQB10501
KDSWTVNDIQKLVGKLNWA

SEQ ID NO: 4073 - protein, 20 aa, Human immunodeficiency virus 1
  source 1..20: note = HLAs: DRB1_0101 DRB1_0102 DRB1_0801 DRB1_0804 DRB1_0806 DRB1_0813 DRB1_1001 DRB1_1101 DRB1_1102 DRB1_1103 DRB1_1104 DRB1_1114 DRB1_1301 DRB1_1302 DRB1_1304 DRB1_1305 DRB1_1402 DRB1_1406 DRB1_1501 DRB1_1602 DPA10202-DPB10101 DPA10202-DPB110601 DPA10202-DPB11901 DPA10202-DPB13101 DPA10301-DPB10101 DPA10301-DPB10201 DPA10301-DPB10202 DPA10301-DPB10401 DPA10301-DPB110601 DPA10301-DPB11801 DPA10301-DPB12301 DPA10301-DPB13901 DPA10301-DPB14001 DPA10301-DPB16501 DPA10401-DPB10101 DPA10401-DPB10201 DPA10401-DPB10202 DPA10401-DPB10501 DQA10102-DQB10501 DQA10103-DQB10501
KDSWTVNDIQKLVGKLNWAS

SEQ ID NO: 4074 - protein, 21 aa, Human immunodeficiency virus 1
  source 1..21: note = HLAs: DRB1_0101 DRB1_0102 DRB1_0801 DRB1_0804 DRB1_0806 DRB1_0813 DRB1_1001 DRB1_1101 DRB1_1102 DRB1_1103 DRB1_1104 DRB1_1114 DRB1_1301 DRB1_1302 DRB1_1304 DRB1_1305 DRB1_1402 DRB1_1406 DPA10301-DPB10101 DPA10301-DPB10201 DPA10301-DPB10202 DPA10301-DPB11801 DPA10401-DPB10101 DQA10102-DQB10501
KDSWTVNDIQKLVGKLNWASQ

SEQ ID NO: 4075 - protein, 22 aa, Human immunodeficiency virus 1
  source 1..22: note = HLAs: DRB1_0101 DRB1_0102 DRB1_0801 DRB1_0804 DRB1_0806 DRB1_0813 DRB1_1001 DRB1_1101 DRB1_1102 DRB1_1103 DRB1_1104 DRB1_1114 DRB1_1301 DRB1_1302 DRB1_1304 DRB1_1305 DRB1_1402 DRB1_1406 DRB1_1501 DPA10202-DPB10101 DPA10301-DPB10101 DPA10301-DPB10201 DPA10301-DPB10202 DPA10301-DPB11801 DPA10401-DPB10101 DPA10401-DPB10201 DPA10401-DPB10202 DQA10102-DQB10501 DQA10103-DQB10501
KDSWTVNDIQKLVGKLNWASQI

SEQ ID NO: 4076 - protein, 23 aa, Human immunodeficiency virus 1
  source 1..23: note = HLAs: DRB1_0101 DRB1_0102 DRB1_0801 DRB1_0802 DRB1_0804 DRB1_0806 DRB1_0809 DRB1_0813 DRB1_1001 DRB1_1101 DRB1_1102 DRB1_1103 DRB1_1104 DRB1_1114 DRB1_1301 DRB1_1302 DRB1_1304 DRB1_1305 DRB1_1402 DRB1_1406 DRB1_1501 DRB1_1602 DPA10202-DPB10101 DPA10301-DPB10101 DPA10301-DPB10201 DPA10301-DPB10202 DPA10301-DPB110601 DPA10301-DPB11801 DPA10301-DPB14001 DPA10401-DPB10101 DPA10401-DPB10201 DPA10401-DPB10202 DQA10102-DQB10501 DQA10103-DQB10501
KDSWTVNDIQKLVGKLNWASQIY

SEQ ID NO: 4077 - protein, 14 aa, Human immunodeficiency virus 1
  source 1..14: note = HLAs: DRB1_0806 DRB1_1102 DRB1_1103 DRB1_1104 DRB1_1301 DRB1_1304 DRB1_1406 DRB1_1601
KELKKIIGQVRDQA

SEQ ID NO: 4078 - protein, 15 aa, Human immunodeficiency virus 1
  source 1..15: note = HLAs: DRB1_0101 DRB1_0102 DRB1_0404 DRB1_0410 DRB1_0801 DRB1_0804 DRB1_0806 DRB1_1001 DRB1_1101 DRB1_1102 DRB1_1103 DRB1_1104 DRB1_1301 DRB1_1304 DRB1_1305 DRB1_1402 DRB1_1406 DRB1_1501 DRB1_1503 DRB1_1601 DQA10102-DQB10501
KELKKIIGQVRDQAE

SEQ ID NO: 4079 - protein, 16 aa, Human immunodeficiency virus 1
  source 1..16: note = HLAs: DRB1_0804 DRB1_0806 DRB1_1101 DRB1_1102 DRB1_1103 DRB1_1104 DRB1_1301 DRB1_1304 DRB1_1305 DRB1_1406 DQA10102-DQB10501 DQA10102-DQB10604 DQA10102-DQB10609
KELKKIIGQVRDQAEH

SEQ ID NO: 4080 - protein, 17 aa, Human immunodeficiency virus 1
  source 1..17: note = HLAs: DRB1_0101 DRB1_0410 DRB1_0804 DRB1_0806 DRB1_1001 DRB1_1101 DRB1_1102 DRB1_1103 DRB1_1104 DRB1_1301 DRB1_1304 DRB1_1305 DRB1_1406 DRB1_1601 DQA10102-DQB10501 DQA10102-DQB10604 DQA10102-DQB10609
KELKKIIGQVRDQAEHL

SEQ ID NO: 4081 - protein, 18 aa, Human immunodeficiency virus 1
  source 1..18: note = HLAs: DRB1_1102 DRB1_1103 DRB1_1104 DRB1_1301 DRB1_1406 DQA10102-DQB10501 DQA10102-DQB10609
KELKKIIGQVRDQAEHLK

SEQ ID NO: 4082 - protein, 13 aa, Human immunodeficiency virus 1
  source 1..13: note = HLAs: DQA10101-DQB10501 DQA10102-DQB10501 DQA10102-DQB10502 DQA10102-DQB10503 DQA10104-DQB10501 DQA10105-DQB10501
KEPFRDYVDRFFK

SEQ ID NO: 4083 - protein, 13 aa, Human immunodeficiency virus 1
  source 1..13: note = HLAs: DPA10103-DPB10101 DPA10103-DPB10202 DPA10103-DPB10401 DPA10103-DPB112601 DPA10103-DPB11501 DPA10103-DPB12301 DPA10103-DPB13901 DPA10104-DPB10101 DPA10104-DPB11501 DPA10105-DPB10101 DPA10105-DPB10401 DPA10106-DPB10101 DPA10201-DPB10101 DPA10202-DPB10101 DPA10301-DPB10101 DPA10301-DPB10201 DPA10301-DPB10202 DPA10301-DPB10401 DPA10301-DPB11801 DPA10301-DPB12301 DPA10301-DPB13901 DPA10301-DPB14001 DPA10301-DPB16501 DPA10401-DPB10101 DPA10401-DPB10201 DPA10401-DPB10202
KEPPFLWMGYELH

SEQ ID NO: 4084 - protein, 14 aa, Human immunodeficiency virus 1
  source 1..14: note = HLAs: DRB1_1001 DPA10103-DPB10101 DPA10103-DPB10201 DPA10103-DPB10202 DPA10103-DPB10401 DPA10103-DPB112601 DPA10103-DPB11501 DPA10103-DPB11601 DPA10103-DPB11901 DPA10103-DPB12301 DPA10103-DPB13101 DPA10103-DPB13401 DPA10103-DPB13901 DPA10103-DPB14001 DPA10103-DPB14101 DPA10103-DPB14801 DPA10103-DPB15001 DPA10103-DPB15901 DPA10104-DPB10101 DPA10104-DPB11501 DPA10105-DPB10101 DPA10105-DPB10401 DPA10105-DPB15001 DPA10106-DPB10101 DPA10201-DPB10101 DPA10201-DPB110601 DPA10201-DPB11501 DPA10201-DPB11601 DPA10201-DPB11901 DPA10202-DPB10101 DPA10202-DPB10202 DPA10202-DPB110601 DPA10202-DPB11901 DPA10202-DPB13101 DPA10202-DPB16501 DPA10301-DPB10101 DPA10301-DPB10201 DPA10301-DPB10202 DPA10301-DPB10401 DPA10301-DPB10402 DPA10301-DPB110501 DPA10301-DPB110601 DPA10301-DPB11801 DPA10301-DPB12301 DPA10301-DPB13901 DPA10301-DPB14001 DPA10301-DPB14901 DPA10301-DPB16501 DPA10301-DPB17501 DPA10301-DPB18001 DPA10401-DPB10101 DPA10401-DPB10201 DPA10401-DPB10202 DQA10102-DQB10501
KEPPFLWMGYELHP

SEQ ID NO: 4085 - protein, 15 aa, Human immunodeficiency virus 1
  source 1..15: note = HLAs: DRB1_0101 DRB1_0405 DRB1_1001 DRB1_1304 DRB1_1501 DRB1_1503 DPA10103-DPB10101 DPA10103-DPB10201 DPA10103-DPB10202 DPA10103-DPB10401 DPA10103-DPB112601 DPA10103-DPB11501 DPA10103-DPB11601 DPA10103-DPB11801 DPA10103-DPB11901 DPA10103-DPB12301 DPA10103-DPB13101 DPA10103-DPB13401 DPA10103-DPB13901 DPA10103-DPB14001 DPA10103-DPB14101 DPA10103-DPB14801 DPA10103-DPB15001 DPA10103-DPB15901 DPA10104-DPB10101 DPA10104-DPB11501 DPA10105-DPB10101 DPA10105-DPB10401 DPA10105-DPB11801 DPA10105-DPB15001 DPA10106-DPB10101 DPA10201-DPB10101 DPA10201-DPB10201 DPA10201-DPB10202 DPA10201-DPB110601 DPA10201-DPB11501 DPA10201-DPB11601 DPA10201-DPB11901 DPA10201-DPB13401 DPA10202-DPB10101 DPA10202-DPB10201 DPA10202-DPB10202 DPA10202-DPB10401 DPA10202-DPB110601 DPA10202-DPB11901 DPA10202-DPB13101 DPA10202-DPB15501 DPA10202-DPB16501 DPA10301-DPB10101 DPA10301-DPB10201 DPA10301-DPB10202 DPA10301-DPB10401 DPA10301-DPB10402 DPA10301-DPB110501 DPA10301-DPB110601 DPA10301-DPB11801 DPA10301-DPB12301; note = HLAs: DPA10301-DPB13901 DPA10301-DPB14001 DPA10301-DPB14901 DPA10301-DPB15501 DPA10301-DPB16501 DPA10301-DPB17501 DPA10301-DPB18001 DPA10401-DPB10101 DPA10401-DPB10201 DPA10401-DPB10202 DPA10401-DPB10402 DPA10401-DPB10501 DPA10401-DPB110501 DPA10401-DPB14901 DQA10101-DQB10501 DQA10102-DQB10501 DQA10102-DQB10502 DQA10102-DQB10503 DQA10103-DQB10501 DQA10104-DQB10501 DQA10105-DQB10501 DQA10505-DQB10402
KEPPFLWMGYELHPD

SEQ ID NO: 4086 - protein, 16 aa, Human immunodeficiency virus 1
  source 1..16: note = HLAs: DRB1_1001 DPA10103-DPB10101 DPA10103-DPB10201 DPA10103-DPB10202 DPA10103-DPB10401 DPA10103-DPB112601 DPA10103-DPB11501 DPA10103-DPB11601 DPA10103-DPB11801 DPA10103-DPB11901 DPA10103-DPB12301 DPA10103-DPB13101 DPA10103-DPB13401 DPA10103-DPB13901 DPA10103-DPB14001 DPA10103-DPB14101 DPA10103-DPB14801 DPA10103-DPB15001 DPA10103-DPB15501 DPA10103-DPB15901 DPA10104-DPB10101 DPA10104-DPB11501 DPA10105-DPB10101 DPA10105-DPB10401 DPA10105-DPB11801 DPA10105-DPB15001 DPA10106-DPB10101 DPA10201-DPB10101 DPA10201-DPB10201 DPA10201-DPB10202 DPA10201-DPB10401 DPA10201-DPB110601 DPA10201-DPB11501 DPA10201-DPB11601 DPA10201-DPB11901 DPA10201-DPB13401 DPA10202-DPB10101 DPA10202-DPB10201 DPA10202-DPB10202 DPA10202-DPB10401 DPA10202-DPB110601 DPA10202-DPB11101 DPA10202-DPB11301 DPA10202-DPB11901 DPA10202-DPB13101 DPA10202-DPB15501 DPA10202-DPB16501 DPA10301-DPB10101 DPA10301-DPB10201 DPA10301-DPB10202 DPA10301-DPB10401 DPA10301-DPB10402 DPA10301-DPB110501 DPA10301-DPB110601 DPA10301-DPB11301; note = HLAs: DPA10301-DPB11801 DPA10301-DPB12301 DPA10301-DPB13901 DPA10301-DPB14001 DPA10301-DPB14901 DPA10301-DPB15501 DPA10301-DPB16501 DPA10301-DPB17501 DPA10301-DPB18001 DPA10401-DPB10101 DPA10401-DPB10201 DPA10401-DPB10202 DPA10401-DPB10402 DPA10401-DPB10501 DPA10401-DPB110501 DPA10401-DPB14901 DQA10101-DQB10501 DQA10101-DQB10503 DQA10102-DQB10501 DQA10102-DQB10502 DQA10102-DQB10503 DQA10103-DQB10501 DQA10104-DQB10501 DQA10104-DQB10503 DQA10105-DQB10501 DQA10107-DQB10503 DQA10505-DQB10402
KEPPFLWMGYELHPDK

SEQ ID NO: 4087 - protein, 17 aa, Human immunodeficiency virus 1
  source 1..17: note = HLAs: DRB1_1001 DPA10103-DPB10101 DPA10103-DPB10201 DPA10103-DPB10202 DPA10103-DPB10401 DPA10103-DPB112601 DPA10103-DPB11501 DPA10103-DPB11601 DPA10103-DPB11801 DPA10103-DPB11901 DPA10103-DPB12301 DPA10103-DPB13101 DPA10103-DPB13401 DPA10103-DPB13901 DPA10103-DPB14001 DPA10103-DPB14101 DPA10103-DPB14801 DPA10103-DPB15001 DPA10103-DPB15901 DPA10104-DPB10101 DPA10104-DPB11501 DPA10105-DPB10101 DPA10105-DPB10401 DPA10105-DPB11801 DPA10105-DPB15001 DPA10106-DPB10101 DPA10201-DPB10101 DPA10201-DPB10201 DPA10201-DPB10202 DPA10201-DPB110601 DPA10201-DPB11501 DPA10201-DPB11601 DPA10201-DPB11901 DPA10201-DPB13401 DPA10202-DPB10101 DPA10202-DPB10201 DPA10202-DPB10202 DPA10202-DPB10401 DPA10202-DPB110601 DPA10202-DPB11901 DPA10202-DPB13101 DPA10202-DPB15501 DPA10202-DPB16501 DPA10301-DPB10101 DPA10301-DPB10201 DPA10301-DPB10202 DPA10301-DPB10401 DPA10301-DPB10402 DPA10301-DPB110501 DPA10301-DPB110601 DPA10301-DPB11301 DPA10301-DPB11801 DPA10301-DPB12301 DPA10301-DPB13901 DPA10301-DPB14001; note = HLAs: DPA10301-DPB14901 DPA10301-DPB15501 DPA10301-DPB16501 DPA10301-DPB17501 DPA10301-DPB18001 DPA10401-DPB10101 DPA10401-DPB10201 DPA10401-DPB10202 DPA10401-DPB10402 DPA10401-DPB10501 DPA10401-DPB110501 DPA10401-DPB14901 DQA10101-DQB10501 DQA10101-DQB10503 DQA10102-DQB10501 DQA10102-DQB10502 DQA10102-DQB10503 DQA10103-DQB10501 DQA10104-DQB10501 DQA10104-DQB10503 DQA10105-DQB10501 DQA10107-DQB10503 DQA10505-DQB10402
KEPPFLWMGYELHPDKW

SEQ ID NO: 4088 - protein, 18 aa, Human immunodeficiency virus 1
  source 1..18: note = HLAs: DPA10103-DPB10101 DPA10103-DPB10201 DPA10103-DPB10202 DPA10103-DPB10401 DPA10103-DPB112601 DPA10103-DPB11501 DPA10103-DPB11601 DPA10103-DPB12301 DPA10103-DPB13101 DPA10103-DPB13401 DPA10103-DPB13901 DPA10103-DPB14001 DPA10103-DPB14101 DPA10103-DPB14801 DPA10103-DPB15001 DPA10103-DPB15901 DPA10104-DPB10101 DPA10104-DPB11501 DPA10105-DPB10101 DPA10105-DPB10401 DPA10105-DPB15001 DPA10106-DPB10101 DPA10201-DPB10101 DPA10201-DPB11501 DPA10201-DPB11601 DPA10202-DPB10101 DPA10202-DPB10202 DPA10202-DPB110601 DPA10202-DPB11901 DPA10202-DPB13101 DPA10202-DPB16501 DPA10301-DPB10101 DPA10301-DPB10201 DPA10301-DPB10202 DPA10301-DPB10401 DPA10301-DPB10402 DPA10301-DPB110501 DPA10301-DPB110601 DPA10301-DPB11801 DPA10301-DPB12301 DPA10301-DPB13901 DPA10301-DPB14001 DPA10301-DPB14901 DPA10301-DPB15501 DPA10301-DPB16501 DPA10301-DPB18001 DPA10401-DPB10101 DPA10401-DPB10201 DPA10401-DPB10202 DQA10101-DQB10501 DQA10101-DQB10503 DQA10102-DQB10501 DQA10102-DQB10502 DQA10102-DQB10503 DQA10104-DQB10501; note = HLAs: DQA10104-DQB10503 DQA10105-DQB10501 DQA10107-DQB10503
KEPPFLWMGYELHPDKWT

SEQ ID NO: 4089 - protein, 19 aa, Human immunodeficiency virus 1
  source 1..19: note = HLAs: DRB1_1001 DPA10103-DPB10101 DPA10103-DPB10201 DPA10103-DPB10202 DPA10103-DPB10401 DPA10103-DPB112601 DPA10103-DPB11501 DPA10103-DPB11601 DPA10103-DPB11801 DPA10103-DPB11901 DPA10103-DPB12301 DPA10103-DPB13101 DPA10103-DPB13401 DPA10103-DPB13901 DPA10103-DPB14001 DPA10103-DPB14101 DPA10103-DPB14801 DPA10103-DPB15001 DPA10103-DPB15901 DPA10104-DPB10101 DPA10104-DPB11501 DPA10105-DPB10101 DPA10105-DPB10401 DPA10105-DPB11801 DPA10105-DPB15001 DPA10106-DPB10101 DPA10201-DPB10101 DPA10201-DPB10202 DPA10201-DPB110601 DPA10201-DPB11501 DPA10201-DPB11601 DPA10201-DPB11901 DPA10201-DPB13401 DPA10202-DPB10101 DPA10202-DPB10201 DPA10202-DPB10202 DPA10202-DPB10401 DPA10202-DPB110601 DPA10202-DPB11901 DPA10202-DPB13101 DPA10202-DPB15501 DPA10202-DPB16501 DPA10301-DPB10101 DPA10301-DPB10201 DPA10301-DPB10202 DPA10301-DPB10401 DPA10301-DPB10402 DPA10301-DPB110501 DPA10301-DPB110601 DPA10301-DPB11101 DPA10301-DPB11801 DPA10301-DPB12301 DPA10301-DPB13901 DPA10301-DPB14001 DPA10301-DPB14901; note = HLAs: DPA10301-DPB15501 DPA10301-DPB16501 DPA10301-DPB17501 DPA10301-DPB18001 DPA10401-DPB10101 DPA10401-DPB10201 DPA10401-DPB10202 DPA10401-DPB10402 DPA10401-DPB10501 DPA10401-DPB110501 DPA10401-DPB14901 DQA10101-DQB10501 DQA10101-DQB10503 DQA10102-DQB10501 DQA10102-DQB10502 DQA10102-DQB10503 DQA10103-DQB10501 DQA10104-DQB10501 DQA10104-DQB10503 DQA10105-DQB10501 DQA10107-DQB10503
KEPPFLWMGYELHPDKWTV

SEQ ID NO: 4090 - protein, 20 aa, Human immunodeficiency virus 1
  source 1..20: note = HLAs: DRB1_0101 DRB1_0405 DRB1_1001 DRB1_1501 DRB1_1503 DRB1_1602 DPA10103-DPB10101 DPA10103-DPB10201 DPA10103-DPB10202 DPA10103-DPB10401 DPA10103-DPB10402 DPA10103-DPB10501 DPA10103-DPB110501 DPA10103-DPB112601 DPA10103-DPB11501 DPA10103-DPB11601 DPA10103-DPB11801 DPA10103-DPB11901 DPA10103-DPB12301 DPA10103-DPB13101 DPA10103-DPB13401 DPA10103-DPB13901 DPA10103-DPB14001 DPA10103-DPB14101 DPA10103-DPB14801 DPA10103-DPB14901 DPA10103-DPB15001 DPA10103-DPB15101 DPA10103-DPB15501 DPA10103-DPB15901 DPA10103-DPB18001 DPA10104-DPB10101 DPA10104-DPB11501 DPA10105-DPB10101 DPA10105-DPB10401 DPA10105-DPB11801 DPA10105-DPB15001 DPA10106-DPB10101 DPA10201-DPB10101 DPA10201-DPB10201 DPA10201-DPB10202 DPA10201-DPB10401 DPA10201-DPB10501 DPA10201-DPB110601 DPA10201-DPB11501 DPA10201-DPB11601 DPA10201-DPB11901 DPA10201-DPB13401 DPA10201-DPB15501 DPA10202-DPB10101 DPA10202-DPB10201 DPA10202-DPB10202 DPA10202-DPB10401 DPA10202-DPB10501 DPA10202-DPB110601 DPA10202-DPB11101 DPA10202-DPB11301; note = HLAs: DPA10202-DPB11801 DPA10202-DPB11901 DPA10202-DPB13101 DPA10202-DPB13801 DPA10202-DPB15501 DPA10202-DPB16501 DPA10301-DPB10101 DPA10301-DPB10201 DPA10301-DPB10202 DPA10301-DPB10401 DPA10301-DPB10402 DPA10301-DPB110501 DPA10301-DPB110601 DPA10301-DPB11101 DPA10301-DPB11301 DPA10301-DPB11801 DPA10301-DPB12301 DPA10301-DPB13901 DPA10301-DPB14001 DPA10301-DPB14901 DPA10301-DPB15501 DPA10301-DPB16501 DPA10301-DPB17501 DPA10301-DPB18001 DPA10401-DPB10101 DPA10401-DPB10201 DPA10401-DPB10202 DPA10401-DPB10402 DPA10401-DPB10501 DPA10401-DPB110501 DPA10401-DPB14901 DQA10101-DQB10501 DQA10101-DQB10503 DQA10102-DQB10501 DQA10102-DQB10502 DQA10102-DQB10503 DQA10103-DQB10501 DQA10104-DQB10501 DQA10104-DQB10503 DQA10105-DQB10501 DQA10107-DQB10503 DQA10505-DQB10402
KEPPFLWMGYELHPDKWTVQ

SEQ ID NO: 4091 - protein, 21 aa, Human immunodeficiency virus 1
  source 1..21: note = HLAs: DRB1_1001 DPA10103-DPB10101 DPA10103-DPB10201 DPA10103-DPB10202 DPA10103-DPB10401 DPA10103-DPB112601 DPA10103-DPB11501 DPA10103-DPB11601 DPA10103-DPB11801 DPA10103-DPB11901 DPA10103-DPB12301 DPA10103-DPB13101 DPA10103-DPB13401 DPA10103-DPB13901 DPA10103-DPB14001 DPA10103-DPB14101 DPA10103-DPB14801 DPA10103-DPB15001 DPA10103-DPB15901 DPA10104-DPB10101 DPA10104-DPB11501 DPA10105-DPB10101 DPA10105-DPB10401 DPA10105-DPB11801 DPA10105-DPB15001 DPA10106-DPB10101 DPA10201-DPB10101 DPA10201-DPB110601 DPA10201-DPB11501 DPA10201-DPB11601 DPA10201-DPB11901 DPA10202-DPB10101 DPA10202-DPB10202 DPA10202-DPB10401 DPA10202-DPB110601 DPA10202-DPB11901 DPA10202-DPB13101 DPA10202-DPB16501 DPA10301-DPB10101 DPA10301-DPB10201 DPA10301-DPB10202 DPA10301-DPB10401 DPA10301-DPB10402 DPA10301-DPB110501 DPA10301-DPB110601 DPA10301-DPB11801 DPA10301-DPB12301 DPA10301-DPB13901 DPA10301-DPB14001 DPA10301-DPB14901 DPA10301-DPB15501 DPA10301-DPB16501 DPA10301-DPB17501 DPA10301-DPB18001 DPA10401-DPB10101; note = HLAs: DPA10401-DPB10201 DPA10401-DPB10202 DPA10401-DPB10402 DPA10401-DPB10501 DPA10401-DPB110501 DPA10401-DPB14901 DQA10101-DQB10501 DQA10102-DQB10501 DQA10102-DQB10502 DQA10102-DQB10503 DQA10103-DQB10501 DQA10104-DQB10501 DQA10105-DQB10501
KEPPFLWMGYELHPDKWTVQP

SEQ ID NO: 4092 - protein, 22 aa, Human immunodeficiency virus 1
  source 1..22: note = HLAs: DRB1_1001 DPA10103-DPB10101 DPA10103-DPB10201 DPA10103-DPB10202 DPA10103-DPB10401 DPA10103-DPB112601 DPA10103-DPB11501 DPA10103-DPB11601 DPA10103-DPB11801 DPA10103-DPB11901 DPA10103-DPB12301 DPA10103-DPB13101 DPA10103-DPB13401 DPA10103-DPB13901 DPA10103-DPB14001 DPA10103-DPB14101 DPA10103-DPB14801 DPA10103-DPB15001 DPA10103-DPB15901 DPA10104-DPB10101 DPA10104-DPB11501 DPA10105-DPB10101 DPA10105-DPB10401 DPA10105-DPB11801 DPA10105-DPB15001 DPA10106-DPB10101 DPA10201-DPB10101 DPA10201-DPB110601 DPA10201-DPB11501 DPA10201-DPB11601 DPA10201-DPB11901 DPA10202-DPB10101 DPA10202-DPB10202 DPA10202-DPB10401 DPA10202-DPB110601 DPA10202-DPB11901 DPA10202-DPB13101 DPA10202-DPB16501 DPA10301-DPB10101 DPA10301-DPB10201 DPA10301-DPB10202 DPA10301-DPB10401 DPA10301-DPB10402 DPA10301-DPB110501 DPA10301-DPB110601 DPA10301-DPB11801 DPA10301-DPB12301 DPA10301-DPB13901 DPA10301-DPB14001 DPA10301-DPB14901 DPA10301-DPB15501 DPA10301-DPB16501 DPA10301-DPB17501 DPA10301-DPB18001 DPA10401-DPB10101; note = HLAs: DPA10401-DPB10201 DPA10401-DPB10202 DPA10401-DPB10402 DPA10401-DPB10501 DPA10401-DPB110501 DPA10401-DPB14901 DQA10101-DQB10501 DQA10102-DQB10501 DQA10102-DQB10502 DQA10102-DQB10503 DQA10103-DQB10501 DQA10104-DQB10501 DQA10105-DQB10501
KEPPFLWMGYELHPDKWTVQPI

SEQ ID NO: 4093 - protein, 23 aa, Human immunodeficiency virus 1
  source 1..23: note = HLAs: DRB1_1001 DPA10103-DPB10101 DPA10103-DPB10201 DPA10103-DPB10202 DPA10103-DPB10401 DPA10103-DPB112601 DPA10103-DPB11501 DPA10103-DPB11601 DPA10103-DPB11801 DPA10103-DPB11901 DPA10103-DPB12301 DPA10103-DPB13101 DPA10103-DPB13401 DPA10103-DPB13901 DPA10103-DPB14001 DPA10103-DPB14101 DPA10103-DPB14801 DPA10103-DPB15001 DPA10103-DPB15901 DPA10104-DPB10101 DPA10104-DPB11501 DPA10105-DPB10101 DPA10105-DPB10401 DPA10105-DPB11801 DPA10105-DPB15001 DPA10106-DPB10101 DPA10201-DPB10101 DPA10201-DPB110601 DPA10201-DPB11501 DPA10201-DPB11601 DPA10201-DPB11901 DPA10202-DPB10101 DPA10202-DPB10201 DPA10202-DPB10202 DPA10202-DPB10401 DPA10202-DPB110601 DPA10202-DPB11901 DPA10202-DPB13101 DPA10202-DPB16501 DPA10301-DPB10101 DPA10301-DPB10201 DPA10301-DPB10202 DPA10301-DPB10401 DPA10301-DPB10402 DPA10301-DPB110501 DPA10301-DPB110601 DPA10301-DPB11801 DPA10301-DPB12301 DPA10301-DPB13901 DPA10301-DPB14001 DPA10301-DPB14901 DPA10301-DPB15501 DPA10301-DPB16501 DPA10301-DPB17501 DPA10301-DPB18001; note = HLAs: DPA10401-DPB10101 DPA10401-DPB10201 DPA10401-DPB10202 DPA10401-DPB10402 DPA10401-DPB10501 DPA10401-DPB110501 DPA10401-DPB14901 DQA10101-DQB10501 DQA10102-DQB10501 DQA10102-DQB10502 DQA10102-DQB10503 DQA10103-DQB10501 DQA10104-DQB10501 DQA10105-DQB10501 DQA10505-DQB10402
KEPPFLWMGYELHPDKWTVQPIQ

SEQ ID NO: 4094 - protein, 24 aa, Human immunodeficiency virus 1
  source 1..24: note = HLAs: DRB1_0101 DRB1_1001 DPA10103-DPB10101 DPA10103-DPB10201 DPA10103-DPB10202 DPA10103-DPB10401 DPA10103-DPB112601 DPA10103-DPB11501 DPA10103-DPB11601 DPA10103-DPB11801 DPA10103-DPB11901 DPA10103-DPB12301 DPA10103-DPB13101 DPA10103-DPB13401 DPA10103-DPB13901 DPA10103-DPB14001 DPA10103-DPB14101 DPA10103-DPB14801 DPA10103-DPB15001 DPA10103-DPB15901 DPA10104-DPB10101 DPA10104-DPB11501 DPA10105-DPB10101 DPA10105-DPB10401 DPA10105-DPB11801 DPA10105-DPB15001 DPA10106-DPB10101 DPA10201-DPB10101 DPA10201-DPB110601 DPA10201-DPB11501 DPA10201-DPB11601 DPA10201-DPB11901 DPA10202-DPB10101 DPA10202-DPB10201 DPA10202-DPB10202 DPA10202-DPB10401 DPA10202-DPB110601 DPA10202-DPB11901 DPA10202-DPB13101 DPA10202-DPB15501 DPA10202-DPB16501 DPA10301-DPB10101 DPA10301-DPB10201 DPA10301-DPB10202 DPA10301-DPB10401 DPA10301-DPB10402 DPA10301-DPB110501 DPA10301-DPB110601 DPA10301-DPB11801 DPA10301-DPB12301 DPA10301-DPB13901 DPA10301-DPB14001 DPA10301-DPB14901 DPA10301-DPB15501 DPA10301-DPB16501; note = HLAs: DPA10301-DPB17501 DPA10301-DPB18001 DPA10401-DPB10101 DPA10401-DPB10201 DPA10401-DPB10202 DPA10401-DPB10402 DPA10401-DPB10501 DPA10401-DPB110501 DPA10401-DPB14901 DQA10101-DQB10501 DQA10101-DQB10503 DQA10102-DQB10501 DQA10102-DQB10502 DQA10102-DQB10503 DQA10103-DQB10501 DQA10104-DQB10501 DQA10104-DQB10503 DQA10105-DQB10501 DQA10107-DQB10503 DQA10505-DQB10402
KEPPFLWMGYELHPDKWTVQPIQL

SEQ ID NO: 4095 - protein, 25 aa, Human immunodeficiency virus 1
  source 1..25: note = HLAs: DRB1_0101 DRB1_0405 DRB1_1001 DPA10103-DPB10101 DPA10103-DPB10201 DPA10103-DPB10202 DPA10103-DPB10401 DPA10103-DPB112601 DPA10103-DPB11501 DPA10103-DPB11601 DPA10103-DPB11801 DPA10103-DPB11901 DPA10103-DPB12301 DPA10103-DPB13101 DPA10103-DPB13401 DPA10103-DPB13901 DPA10103-DPB14001 DPA10103-DPB14101 DPA10103-DPB14801 DPA10103-DPB15001 DPA10103-DPB15901 DPA10104-DPB10101 DPA10104-DPB11501 DPA10105-DPB10101 DPA10105-DPB10401 DPA10105-DPB11801 DPA10105-DPB15001 DPA10106-DPB10101 DPA10201-DPB10101 DPA10201-DPB110601 DPA10201-DPB11501 DPA10201-DPB11601 DPA10201-DPB11901 DPA10202-DPB10101 DPA10202-DPB10201 DPA10202-DPB10202 DPA10202-DPB10401 DPA10202-DPB10501 DPA10202-DPB110601 DPA10202-DPB11901 DPA10202-DPB13101 DPA10202-DPB13801 DPA10202-DPB15501 DPA10202-DPB16501 DPA10301-DPB10101 DPA10301-DPB10201 DPA10301-DPB10202 DPA10301-DPB10401 DPA10301-DPB10402 DPA10301-DPB110501 DPA10301-DPB110601 DPA10301-DPB11101 DPA10301-DPB11301 DPA10301-DPB11801 DPA10301-DPB12301 DPA10301-DPB13901; note = HLAs: DPA10301-DPB14001 DPA10301-DPB14901 DPA10301-DPB15501 DPA10301-DPB16501 DPA10301-DPB17501 DPA10301-DPB18001 DPA10401-DPB10101 DPA10401-DPB10201 DPA10401-DPB10202 DPA10401-DPB10402 DPA10401-DPB10501 DPA10401-DPB110501 DPA10401-DPB14901 DQA10101-DQB10501 DQA10101-DQB10503 DQA10102-DQB10501 DQA10102-DQB10502 DQA10102-DQB10503 DQA10103-DQB10501 DQA10104-DQB10501 DQA10104-DQB10503 DQA10105-DQB10501 DQA10107-DQB10503 DQA10505-DQB10402
KEPPFLWMGYELHPDKWTVQPIQLP

SEQ ID NO: 4096 - protein, 15 aa, Human immunodeficiency virus 1
  source 1..15: note = HLAs: DQA10201-DQB10301
KGGIGGYSAGERIID

SEQ ID NO: 4097 - protein, 16 aa, Human immunodeficiency virus 1
  source 1..16: note = HLAs: DQA10201-DQB10301
KGGIGGYSAGERIIDI

SEQ ID NO: 4098 - protein, 17 aa, Human immunodeficiency virus 1
  source 1..17: note = HLAs: DQA10201-DQB10301
KGGIGGYSAGERIIDII

SEQ ID NO: 4099 - protein, 19 aa, Human immunodeficiency virus 1
  source 1..19: note = HLAs: DRB1_0101
KGIGGNEQVDKLVSSGIRK

SEQ ID NO: 4100 - protein, 20 aa, Human immunodeficiency virus 1
  source 1..20: note = HLAs: DRB1_0101 DRB1_0102 DRB1_0701 DRB1_0806 DRB1_0813 DRB1_0901 DRB1_1001 DRB1_1102 DRB1_1114 DRB1_1301 DRB1_1302 DRB1_1304 DRB1_1406 DRB1_1501 DRB1_1602 DPA10103-DPB10201 DPA10103-DPB11501 DPA10103-DPB14801 DPA10103-DPB15001 DPA10104-DPB11501 DPA10105-DPB15001 DPA10202-DPB10101 DPA10202-DPB10201 DPA10202-DPB10202 DPA10202-DPB110601 DPA10202-DPB11901 DPA10202-DPB13101 DPA10202-DPB16501 DPA10301-DPB10101 DPA10301-DPB10201 DPA10301-DPB10202 DPA10301-DPB10401 DPA10301-DPB10402 DPA10301-DPB110501 DPA10301-DPB110601 DPA10301-DPB11801 DPA10301-DPB12301 DPA10301-DPB13901 DPA10301-DPB14001 DPA10301-DPB14901 DPA10301-DPB16501 DPA10301-DPB18001 DPA10401-DPB10101 DPA10401-DPB10201 DPA10401-DPB10202 DPA10401-DPB10501 DQA10102-DQB10501 DQA10102-DQB10601 DQA10103-DQB10501 DQA10103-DQB10601 DQA10103-DQB10602 DQA10103-DQB10609 DQA10201-DQB10301 DQA10505-DQB10402
KGIGGNEQVDKLVSSGIRKV

SEQ ID NO: 4101 - protein, 21 aa, Human immunodeficiency virus 1
  source 1..21: note = HLAs: DRB1_0101 DRB1_0102 DRB1_0701 DRB1_0806 DRB1_0901 DRB1_1001 DRB1_1102 DRB1_1103 DRB1_1104 DRB1_1114 DRB1_1301 DRB1_1302 DRB1_1304 DRB1_1401 DRB1_1406 DRB1_1454 DRB1_1501 DRB1_1602 DPA10103-DPB10201 DPA10103-DPB10202 DPA10103-DPB11501 DPA10103-DPB14801 DPA10104-DPB11501 DPA10202-DPB10101 DPA10202-DPB10201 DPA10202-DPB10202 DPA10202-DPB110601 DPA10202-DPB11901 DPA10301-DPB10101 DPA10301-DPB10201 DPA10301-DPB10202 DPA10301-DPB10401 DPA10301-DPB10402 DPA10301-DPB110501 DPA10301-DPB110601 DPA10301-DPB11801 DPA10301-DPB12301 DPA10301-DPB13901 DPA10301-DPB14001 DPA10301-DPB14901 DPA10301-DPB16501 DPA10301-DPB18001 DPA10401-DPB10101 DPA10401-DPB10201 DPA10401-DPB10202 DQA10102-DQB10501 DQA10102-DQB10601 DQA10103-DQB10501 DQA10103-DQB10601 DQA10103-DQB10602 DQA10103-DQB10609
KGIGGNEQVDKLVSSGIRKVL

SEQ ID NO: 4102 - protein, 22 aa, Human immunodeficiency virus 1
  source 1..22: note = HLAs: DRB1_0101 DRB1_0102 DRB1_0410 DRB1_0701 DRB1_0806 DRB1_0813 DRB1_0901 DRB1_1001 DRB1_1102 DRB1_1103 DRB1_1104 DRB1_1114 DRB1_1301 DRB1_1302 DRB1_1303 DRB1_1304 DRB1_1401 DRB1_1402 DRB1_1404 DRB1_1405 DRB1_1406 DRB1_1454 DRB1_1501 DRB1_1602 DPA10103-DPB10101 DPA10103-DPB10201 DPA10103-DPB10202 DPA10103-DPB11501 DPA10103-DPB11601 DPA10103-DPB11801 DPA10103-DPB11901 DPA10103-DPB13401 DPA10103-DPB14801 DPA10103-DPB15001 DPA10104-DPB10101 DPA10104-DPB11501 DPA10105-DPB10101 DPA10105-DPB11801 DPA10105-DPB15001 DPA10202-DPB10101 DPA10202-DPB10201 DPA10202-DPB10202 DPA10202-DPB10501 DPA10202-DPB110601 DPA10202-DPB11801 DPA10202-DPB11901 DPA10202-DPB13101 DPA10202-DPB13801 DPA10202-DPB16501 DPA10301-DPB10101 DPA10301-DPB10201 DPA10301-DPB10202 DPA10301-DPB10401 DPA10301-DPB10402 DPA10301-DPB110501 DPA10301-DPB110601 DPA10301-DPB11801 DPA10301-DPB12301 DPA10301-DPB13901 DPA10301-DPB14001 DPA10301-DPB14901 DPA10301-DPB16501 DPA10301-DPB17501 DPA10301-DPB18001 DPA10401-DPB10101; note = HLAs: DPA10401-DPB10201 DPA10401-DPB10202 DPA10401-DPB10501 DQA10102-DQB10501 DQA10102-DQB10601 DQA10102-DQB10609 DQA10103-DQB10501 DQA10103-DQB10601 DQA10103-DQB10602 DQA10103-DQB10609 DQA10201-DQB10301 DQA10505-DQB10402
KGIGGNEQVDKLVSSGIRKVLF

SEQ ID NO: 4103 - protein, 23 aa, Human immunodeficiency virus 1
  source 1..23: note = HLAs: DRB1_0101 DRB1_0102 DRB1_0404 DRB1_0410 DRB1_0701 DRB1_0801 DRB1_0804 DRB1_0806 DRB1_0813 DRB1_0901 DRB1_1001 DRB1_1101 DRB1_1102 DRB1_1103 DRB1_1104 DRB1_1114 DRB1_1201 DRB1_1301 DRB1_1302 DRB1_1303 DRB1_1304 DRB1_1305 DRB1_1312 DRB1_1401 DRB1_1402 DRB1_1404 DRB1_1405 DRB1_1406 DRB1_1454 DRB1_1501 DRB1_1502 DRB1_1503 DRB1_1601 DRB1_1602 DPA10103-DPB10101 DPA10103-DPB10201 DPA10103-DPB10202 DPA10103-DPB11501 DPA10103-DPB11601 DPA10103-DPB11801 DPA10103-DPB11901 DPA10103-DPB13101 DPA10103-DPB13401 DPA10103-DPB14001 DPA10103-DPB14101 DPA10103-DPB14801 DPA10103-DPB15001 DPA10104-DPB10101 DPA10104-DPB11501 DPA10105-DPB10101 DPA10105-DPB11801 DPA10105-DPB15001 DPA10106-DPB10101 DPA10201-DPB10101 DPA10201-DPB110601 DPA10201-DPB11501 DPA10201-DPB11901 DPA10202-DPB10101 DPA10202-DPB10201 DPA10202-DPB10202 DPA10202-DPB10501 DPA10202-DPB110601 DPA10202-DPB11801 DPA10202-DPB11901 DPA10202-DPB13101 DPA10202-DPB13801 DPA10202-DPB16501 DPA10301-DPB10101 DPA10301-DPB10201 DPA10301-DPB10202; note = HLAs: DPA10301-DPB10401 DPA10301-DPB10402 DPA10301-DPB110501 DPA10301-DPB110601 DPA10301-DPB11801 DPA10301-DPB12301 DPA10301-DPB13901 DPA10301-DPB14001 DPA10301-DPB14901 DPA10301-DPB15501 DPA10301-DPB16501 DPA10301-DPB17501 DPA10301-DPB18001 DPA10401-DPB10101 DPA10401-DPB10201 DPA10401-DPB10202 DPA10401-DPB10402 DPA10401-DPB10501 DPA10401-DPB110501 DPA10401-DPB14901 DQA10102-DQB10501 DQA10102-DQB10601 DQA10102-DQB10602 DQA10102-DQB10609 DQA10103-DQB10501 DQA10103-DQB10601 DQA10103-DQB10602 DQA10103-DQB10609 DQA10201-DQB10301 DQA10505-DQB10402
KGIGGNEQVDKLVSSGIRKVLFL

SEQ ID NO: 4104 - protein, 24 aa, Human immunodeficiency virus 1
  source 1..24: note = HLAs: DRB1_0101 DRB1_0102 DRB1_0404 DRB1_0410 DRB1_0701 DRB1_0801 DRB1_0804 DRB1_0806 DRB1_0813 DRB1_0901 DRB1_1001 DRB1_1101 DRB1_1102 DRB1_1103 DRB1_1104 DRB1_1114 DRB1_1201 DRB1_1301 DRB1_1302 DRB1_1303 DRB1_1304 DRB1_1305 DRB1_1312 DRB1_1401 DRB1_1402 DRB1_1404 DRB1_1405 DRB1_1406 DRB1_1454 DRB1_1501 DRB1_1502 DRB1_1503 DRB1_1601 DRB1_1602 DPA10103-DPB10101 DPA10103-DPB10201 DPA10103-DPB10202 DPA10103-DPB11501 DPA10103-DPB11601 DPA10103-DPB11801 DPA10103-DPB11901 DPA10103-DPB13101 DPA10103-DPB13401 DPA10103-DPB14001 DPA10103-DPB14101 DPA10103-DPB14801 DPA10103-DPB15001 DPA10104-DPB10101 DPA10104-DPB11501 DPA10105-DPB10101 DPA10105-DPB11801 DPA10105-DPB15001 DPA10106-DPB10101 DPA10201-DPB10101 DPA10201-DPB110601 DPA10201-DPB11501 DPA10201-DPB11901 DPA10202-DPB10101 DPA10202-DPB10201 DPA10202-DPB10202 DPA10202-DPB10501 DPA10202-DPB110601 DPA10202-DPB11801 DPA10202-DPB11901 DPA10202-DPB13101 DPA10202-DPB13801 DPA10202-DPB16501 DPA10301-DPB10101 DPA10301-DPB10201 DPA10301-DPB10202; note = HLAs: DPA10301-DPB10401 DPA10301-DPB10402 DPA10301-DPB110501 DPA10301-DPB110601 DPA10301-DPB11801 DPA10301-DPB12301 DPA10301-DPB13901 DPA10301-DPB14001 DPA10301-DPB14901 DPA10301-DPB15501 DPA10301-DPB16501 DPA10301-DPB17501 DPA10301-DPB18001 DPA10401-DPB10101 DPA10401-DPB10201 DPA10401-DPB10202 DPA10401-DPB10402 DPA10401-DPB10501 DPA10401-DPB110501 DPA10401-DPB14901 DQA10102-DQB10501 DQA10102-DQB10601 DQA10102-DQB10602 DQA10102-DQB10609 DQA10103-DQB10501 DQA10103-DQB10601 DQA10103-DQB10602 DQA10103-DQB10609 DQA10201-DQB10301 DQA10505-DQB10402
KGIGGNEQVDKLVSSGIRKVLFLD

SEQ ID NO: 4105 - protein, 25 aa, Human immunodeficiency virus 1
  source 1..25: note = HLAs: DRB1_0101 DRB1_0102 DRB1_0404 DRB1_0410 DRB1_0701 DRB1_0801 DRB1_0804 DRB1_0806 DRB1_0813 DRB1_0901 DRB1_1001 DRB1_1101 DRB1_1102 DRB1_1103 DRB1_1104 DRB1_1114 DRB1_1201 DRB1_1301 DRB1_1302 DRB1_1303 DRB1_1304 DRB1_1305 DRB1_1312 DRB1_1401 DRB1_1402 DRB1_1404 DRB1_1405 DRB1_1406 DRB1_1454 DRB1_1501 DRB1_1502 DRB1_1503 DRB1_1601 DRB1_1602 DPA10103-DPB10101 DPA10103-DPB10201 DPA10103-DPB10202 DPA10103-DPB10501 DPA10103-DPB11501 DPA10103-DPB11601 DPA10103-DPB11801 DPA10103-DPB11901 DPA10103-DPB13101 DPA10103-DPB13401 DPA10103-DPB14001 DPA10103-DPB14101 DPA10103-DPB14801 DPA10103-DPB15001 DPA10104-DPB10101 DPA10104-DPB11501 DPA10105-DPB10101 DPA10105-DPB11801 DPA10105-DPB15001 DPA10106-DPB10101 DPA10201-DPB10101 DPA10201-DPB110601 DPA10201-DPB11501 DPA10201-DPB11601 DPA10201-DPB11901 DPA10202-DPB10101 DPA10202-DPB10201 DPA10202-DPB10202 DPA10202-DPB10501 DPA10202-DPB110601 DPA10202-DPB11801 DPA10202-DPB11901 DPA10202-DPB13101 DPA10202-DPB13801 DPA10202-DPB15501 DPA10202-DPB16501; note = HLAs: DPA10301-DPB10101 DPA10301-DPB10201 DPA10301-DPB10202 DPA10301-DPB10401 DPA10301-DPB10402 DPA10301-DPB110501 DPA10301-DPB110601 DPA10301-DPB11801 DPA10301-DPB12301 DPA10301-DPB13901 DPA10301-DPB14001 DPA10301-DPB14901 DPA10301-DPB15501 DPA10301-DPB16501 DPA10301-DPB17501 DPA10301-DPB18001 DPA10401-DPB10101 DPA10401-DPB10201 DPA10401-DPB10202 DPA10401-DPB10402 DPA10401-DPB10501 DPA10401-DPB110501 DPA10401-DPB14901 DQA10102-DQB10501 DQA10102-DQB10601 DQA10102-DQB10602 DQA10102-DQB10609 DQA10103-DQB10501 DQA10103-DQB10601 DQA10103-DQB10602 DQA10103-DQB10608 DQA10103-DQB10609 DQA10201-DQB10301 DQA10505-DQB10402
KGIGGNEQVDKLVSSGIRKVLFLDG

SEQ ID NO: 4106 - protein, 15 aa, Human immunodeficiency virus 1
  source 1..15: note = HLAs: DRB1_0101 DRB1_0806 DRB1_0901 DRB1_1101 DRB1_1103 DRB1_1104 DRB1_1304 DRB1_1305 DQA10201-DQB10301
KGPAKLLWKGEGAVV

SEQ ID NO: 4107 - protein, 16 aa, Human immunodeficiency virus 1
  source 1..16: note = HLAs: DRB1_0101 DRB1_0701 DRB1_0901 DRB1_1001 DRB1_1104 DRB1_1114 DRB1_1302 DPA10301-DPB10101 DPA10301-DPB10201 DPA10301-DPB10202 DPA10401-DPB10101 DQA10102-DQB10501 DQA10103-DQB10501 DQA10201-DQB10301 DQA10501-DQB10301 DQA10501-DQB10319 DQA10503-DQB10301 DQA10505-DQB10301 DQA10505-DQB10309 DQA10505-DQB10319 DQA10508-DQB10301 DQA10509-DQB10301
KGPAKLLWKGEGAVVI

SEQ ID NO: 4108 - protein, 17 aa, Human immunodeficiency virus 1
  source 1..17: note = HLAs: DRB1_0101 DRB1_0102 DRB1_0701 DRB1_0901 DRB1_1001 DRB1_1104 DRB1_1114 DRB1_1302 DRB1_1304 DRB1_1602 DPA10301-DPB10101 DPA10301-DPB10201 DPA10301-DPB10202 DPA10401-DPB10101 DQA10102-DQB10501 DQA10201-DQB10301
KGPAKLLWKGEGAVVIQ

SEQ ID NO: 4109 - protein, 18 aa, Human immunodeficiency virus 1
  source 1..18: note = HLAs: DRB1_0101 DRB1_0901 DRB1_1001 DQA10102-DQB10501 DQA10201-DQB10301
KGPAKLLWKGEGAVVIQD

SEQ ID NO: 4110 - protein, 19 aa, Human immunodeficiency virus 1
  source 1..19: note = HLAs: DRB1_0101 DRB1_0102 DRB1_0701 DRB1_0901 DRB1_1001 DRB1_1114 DRB1_1302 DRB1_1602 DPA10301-DPB10101 DPA10301-DPB10201 DPA10301-DPB10202 DPA10401-DPB10101 DQA10102-DQB10501 DQA10102-DQB10601 DQA10102-DQB10609 DQA10103-DQB10501 DQA10201-DQB10301 DQA10501-DQB10301 DQA10501-DQB10319 DQA10503-DQB10301 DQA10505-DQB10301 DQA10505-DQB10309 DQA10505-DQB10319 DQA10508-DQB10301 DQA10509-DQB10301
KGPAKLLWKGEGAVVIQDN

SEQ ID NO: 4111 - protein, 20 aa, Human immunodeficiency virus 1
  source 1..20: note = HLAs: DRB1_0101 DRB1_0102 DRB1_0701 DRB1_0806 DRB1_0813 DRB1_0901 DRB1_1001 DRB1_1104 DRB1_1114 DRB1_1302 DRB1_1304 DRB1_1501 DRB1_1502 DRB1_1602 DPA10103-DPB11501 DPA10104-DPB11501 DPA10202-DPB10101 DPA10301-DPB10101 DPA10301-DPB10201 DPA10301-DPB10202 DPA10301-DPB10401 DPA10301-DPB110601 DPA10301-DPB11801 DPA10301-DPB12301 DPA10301-DPB13901 DPA10301-DPB16501 DPA10401-DPB10101 DPA10401-DPB10201 DPA10401-DPB10202 DQA10102-DQB10501 DQA10102-DQB10601 DQA10102-DQB10609 DQA10103-DQB10501 DQA10103-DQB10601 DQA10103-DQB10609 DQA10201-DQB10301 DQA10501-DQB10301 DQA10501-DQB10319 DQA10503-DQB10301 DQA10505-DQB10301 DQA10505-DQB10309 DQA10505-DQB10319 DQA10508-DQB10301 DQA10509-DQB10301
KGPAKLLWKGEGAVVIQDNS

SEQ ID NO: 4112 - protein, 16 aa, Human immunodeficiency virus 1
  source 1..16: note = HLAs: DRB1_1001 DPA10103-DPB10101 DPA10103-DPB10201 DPA10103-DPB10202 DPA10103-DPB10401 DPA10103-DPB112601 DPA10103-DPB11501 DPA10103-DPB11601 DPA10103-DPB11901 DPA10103-DPB12301 DPA10103-DPB13101 DPA10103-DPB13401 DPA10103-DPB13901 DPA10103-DPB14001 DPA10103-DPB14101 DPA10103-DPB14801 DPA10103-DPB15001 DPA10103-DPB15901 DPA10104-DPB10101 DPA10104-DPB11501 DPA10105-DPB10101 DPA10105-DPB10401 DPA10105-DPB15001 DPA10106-DPB10101 DPA10201-DPB10101 DPA10201-DPB11501 DPA10201-DPB11601 DPA10202-DPB10101 DPA10202-DPB10202 DPA10202-DPB110601 DPA10202-DPB11901 DPA10202-DPB13101 DPA10202-DPB16501 DPA10301-DPB10101 DPA10301-DPB10201 DPA10301-DPB10202 DPA10301-DPB10401 DPA10301-DPB10402 DPA10301-DPB110501 DPA10301-DPB110601 DPA10301-DPB11801 DPA10301-DPB12301 DPA10301-DPB13901 DPA10301-DPB14001 DPA10301-DPB14901 DPA10301-DPB16501 DPA10301-DPB17501 DPA10301-DPB18001 DPA10401-DPB10101 DPA10401-DPB10201 DPA10401-DPB10202 DQA10102-DQB10501
KHQKEPPFLWMGYELH

SEQ ID NO: 4113 - protein, 17 aa, Human immunodeficiency virus 1
  source 1..17: note = HLAs: DRB1_1001 DPA10103-DPB10101 DPA10103-DPB10201 DPA10103-DPB10202 DPA10103-DPB10401 DPA10103-DPB112601 DPA10103-DPB11501 DPA10103-DPB11601 DPA10103-DPB11901 DPA10103-DPB12301 DPA10103-DPB13101 DPA10103-DPB13401 DPA10103-DPB13901 DPA10103-DPB14001 DPA10103-DPB14101 DPA10103-DPB14801 DPA10103-DPB15001 DPA10103-DPB15901 DPA10104-DPB10101 DPA10104-DPB11501 DPA10105-DPB10101 DPA10105-DPB10401 DPA10105-DPB15001 DPA10106-DPB10101 DPA10201-DPB10101 DPA10201-DPB110601 DPA10201-DPB11501 DPA10201-DPB11601 DPA10201-DPB11901 DPA10202-DPB10101 DPA10202-DPB10201 DPA10202-DPB10202 DPA10202-DPB110601 DPA10202-DPB11901 DPA10202-DPB13101 DPA10202-DPB16501 DPA10301-DPB10101 DPA10301-DPB10201 DPA10301-DPB10202 DPA10301-DPB10401 DPA10301-DPB10402 DPA10301-DPB110501 DPA10301-DPB110601 DPA10301-DPB11801 DPA10301-DPB12301 DPA10301-DPB13901 DPA10301-DPB14001 DPA10301-DPB14901 DPA10301-DPB16501 DPA10301-DPB17501 DPA10301-DPB18001 DPA10401-DPB10101 DPA10401-DPB10201 DPA10401-DPB10202 DPA10401-DPB10501; note = HLAs: DQA10102-DQB10501
KHQKEPPFLWMGYELHP

SEQ ID NO: 4114 - protein, 18 aa, Human immunodeficiency virus 1
  source 1..18: note = HLAs: DPA10103-DPB10101 DPA10103-DPB10201 DPA10103-DPB10202 DPA10103-DPB10401 DPA10103-DPB112601 DPA10103-DPB11501 DPA10103-DPB11601 DPA10103-DPB12301 DPA10103-DPB13101 DPA10103-DPB13401 DPA10103-DPB13901 DPA10103-DPB14101 DPA10103-DPB14801 DPA10103-DPB15001 DPA10104-DPB10101 DPA10104-DPB11501 DPA10105-DPB10101 DPA10105-DPB10401 DPA10105-DPB15001 DPA10106-DPB10101 DPA10201-DPB10101 DPA10201-DPB11501 DPA10202-DPB10101 DPA10202-DPB13101 DPA10301-DPB10101 DPA10301-DPB10201 DPA10301-DPB10202 DPA10301-DPB10401 DPA10301-DPB10402 DPA10301-DPB110501 DPA10301-DPB110601 DPA10301-DPB11801 DPA10301-DPB12301 DPA10301-DPB13901 DPA10301-DPB14001 DPA10301-DPB14901 DPA10301-DPB16501 DPA10301-DPB18001 DPA10401-DPB10101 DPA10401-DPB10201 DPA10401-DPB10202 DQA10101-DQB10501 DQA10102-DQB10501 DQA10102-DQB10502 DQA10104-DQB10501 DQA10105-DQB10501
KHQKEPPFLWMGYELHPD

SEQ ID NO: 4115 - protein, 19 aa, Human immunodeficiency virus 1
  source 1..19: note = HLAs: DRB1_1001 DPA10103-DPB10101 DPA10103-DPB10201 DPA10103-DPB10202 DPA10103-DPB10401 DPA10103-DPB112601 DPA10103-DPB11501 DPA10103-DPB11601 DPA10103-DPB11801 DPA10103-DPB11901 DPA10103-DPB12301 DPA10103-DPB13101 DPA10103-DPB13401 DPA10103-DPB13901 DPA10103-DPB14001 DPA10103-DPB14101 DPA10103-DPB14801 DPA10103-DPB15001 DPA10103-DPB15901 DPA10104-DPB10101 DPA10104-DPB11501 DPA10105-DPB10101 DPA10105-DPB10401 DPA10105-DPB11801 DPA10105-DPB15001 DPA10106-DPB10101 DPA10201-DPB10101 DPA10201-DPB10201 DPA10201-DPB10202 DPA10201-DPB110601 DPA10201-DPB11501 DPA10201-DPB11601 DPA10201-DPB11901 DPA10201-DPB13401 DPA10202-DPB10101 DPA10202-DPB10201 DPA10202-DPB10202 DPA10202-DPB10401 DPA10202-DPB110601 DPA10202-DPB11901 DPA10202-DPB13101 DPA10202-DPB15501 DPA10202-DPB16501 DPA10301-DPB10101 DPA10301-DPB10201 DPA10301-DPB10202 DPA10301-DPB10401 DPA10301-DPB10402 DPA10301-DPB110501 DPA10301-DPB110601 DPA10301-DPB11801 DPA10301-DPB12301 DPA10301-DPB13901 DPA10301-DPB14001 DPA10301-DPB14901; note = HLAs: DPA10301-DPB15501 DPA10301-DPB16501 DPA10301-DPB17501 DPA10301-DPB18001 DPA10401-DPB10101 DPA10401-DPB10201 DPA10401-DPB10202 DPA10401-DPB10402 DPA10401-DPB10501 DPA10401-DPB110501 DPA10401-DPB14901 DQA10101-DQB10501 DQA10102-DQB10501 DQA10102-DQB10502 DQA10102-DQB10503 DQA10103-DQB10501 DQA10104-DQB10501 DQA10105-DQB10501
KHQKEPPFLWMGYELHPDK

SEQ ID NO: 4116 - protein, 20 aa, Human immunodeficiency virus 1
  source 1..20: note = HLAs: DRB1_0101 DRB1_0405 DRB1_1001 DRB1_1501 DRB1_1503 DRB1_1602 DPA10103-DPB10101 DPA10103-DPB10201 DPA10103-DPB10202 DPA10103-DPB10401 DPA10103-DPB10402 DPA10103-DPB10501 DPA10103-DPB110501 DPA10103-DPB11101 DPA10103-DPB112601 DPA10103-DPB11501 DPA10103-DPB11601 DPA10103-DPB11801 DPA10103-DPB11901 DPA10103-DPB12301 DPA10103-DPB13101 DPA10103-DPB13401 DPA10103-DPB13901 DPA10103-DPB14001 DPA10103-DPB14101 DPA10103-DPB14801 DPA10103-DPB14901 DPA10103-DPB15001 DPA10103-DPB15101 DPA10103-DPB15501 DPA10103-DPB15901 DPA10103-DPB18001 DPA10104-DPB10101 DPA10104-DPB11501 DPA10105-DPB10101 DPA10105-DPB10401 DPA10105-DPB11801 DPA10105-DPB15001 DPA10106-DPB10101 DPA10201-DPB10101 DPA10201-DPB10201 DPA10201-DPB10202 DPA10201-DPB10401 DPA10201-DPB10501 DPA10201-DPB110601 DPA10201-DPB11501 DPA10201-DPB11601 DPA10201-DPB11901 DPA10201-DPB13401 DPA10201-DPB15501 DPA10202-DPB10101 DPA10202-DPB10201 DPA10202-DPB10202 DPA10202-DPB10401 DPA10202-DPB10501 DPA10202-DPB110601 DPA10202-DPB11101; note = HLAs: DPA10202-DPB11301 DPA10202-DPB11801 DPA10202-DPB11901 DPA10202-DPB13101 DPA10202-DPB13801 DPA10202-DPB15501 DPA10202-DPB16501 DPA10301-DPB10101 DPA10301-DPB10201 DPA10301-DPB10202 DPA10301-DPB10401 DPA10301-DPB10402 DPA10301-DPB110501 DPA10301-DPB110601 DPA10301-DPB11101 DPA10301-DPB11301 DPA10301-DPB11801 DPA10301-DPB12301 DPA10301-DPB13901 DPA10301-DPB14001 DPA10301-DPB14901 DPA10301-DPB15501 DPA10301-DPB16501 DPA10301-DPB17501 DPA10301-DPB18001 DPA10401-DPB10101 DPA10401-DPB10201 DPA10401-DPB10202 DPA10401-DPB10402 DPA10401-DPB10501 DPA10401-DPB110501 DPA10401-DPB11301 DPA10401-DPB113301 DPA10401-DPB14901 DQA10101-DQB10501 DQA10101-DQB10503 DQA10102-DQB10501 DQA10102-DQB10502 DQA10102-DQB10503 DQA10103-DQB10501 DQA10104-DQB10501 DQA10104-DQB10503 DQA10105-DQB10501 DQA10107-DQB10503 DQA10505-DQB10402
KHQKEPPFLWMGYELHPDKW

SEQ ID NO: 4117 - protein, 21 aa, Human immunodeficiency virus 1
  source 1..21: note = HLAs: DRB1_1001 DPA10103-DPB10101 DPA10103-DPB10201 DPA10103-DPB10202 DPA10103-DPB10401 DPA10103-DPB112601 DPA10103-DPB11501 DPA10103-DPB11601 DPA10103-DPB11801 DPA10103-DPB11901 DPA10103-DPB12301 DPA10103-DPB13101 DPA10103-DPB13401 DPA10103-DPB13901 DPA10103-DPB14001 DPA10103-DPB14101 DPA10103-DPB14801 DPA10103-DPB15001 DPA10103-DPB15901 DPA10104-DPB10101 DPA10104-DPB11501 DPA10105-DPB10101 DPA10105-DPB10401 DPA10105-DPB11801 DPA10105-DPB15001 DPA10106-DPB10101 DPA10201-DPB10101 DPA10201-DPB10202 DPA10201-DPB110601 DPA10201-DPB11501 DPA10201-DPB11601 DPA10201-DPB11901 DPA10202-DPB10101 DPA10202-DPB10201 DPA10202-DPB10202 DPA10202-DPB10401 DPA10202-DPB110601 DPA10202-DPB11901 DPA10202-DPB13101 DPA10202-DPB16501 DPA10301-DPB10101 DPA10301-DPB10201 DPA10301-DPB10202 DPA10301-DPB10401 DPA10301-DPB10402 DPA10301-DPB110501 DPA10301-DPB110601 DPA10301-DPB11801 DPA10301-DPB12301 DPA10301-DPB13901 DPA10301-DPB14001 DPA10301-DPB14901 DPA10301-DPB15501 DPA10301-DPB16501 DPA10301-DPB17501; note = HLAs: DPA10301-DPB18001 DPA10401-DPB10101 DPA10401-DPB10201 DPA10401-DPB10202 DPA10401-DPB10402 DPA10401-DPB10501 DPA10401-DPB110501 DPA10401-DPB14901 DQA10101-DQB10501 DQA10102-DQB10501 DQA10102-DQB10502 DQA10102-DQB10503 DQA10103-DQB10501 DQA10104-DQB10501 DQA10105-DQB10501
KHQKEPPFLWMGYELHPDKWT

SEQ ID NO: 4118 - protein, 22 aa, Human immunodeficiency virus 1
  source 1..22: note = HLAs: DRB1_1001 DPA10103-DPB10101 DPA10103-DPB10201 DPA10103-DPB10202 DPA10103-DPB10401 DPA10103-DPB112601 DPA10103-DPB11501 DPA10103-DPB11601 DPA10103-DPB11801 DPA10103-DPB11901 DPA10103-DPB12301 DPA10103-DPB13101 DPA10103-DPB13401 DPA10103-DPB13901 DPA10103-DPB14001 DPA10103-DPB14101 DPA10103-DPB14801 DPA10103-DPB15001 DPA10103-DPB15901 DPA10104-DPB10101 DPA10104-DPB11501 DPA10105-DPB10101 DPA10105-DPB10401 DPA10105-DPB11801 DPA10105-DPB15001 DPA10106-DPB10101 DPA10201-DPB10101 DPA10201-DPB10202 DPA10201-DPB110601 DPA10201-DPB11501 DPA10201-DPB11601 DPA10201-DPB11901 DPA10202-DPB10101 DPA10202-DPB10201 DPA10202-DPB10202 DPA10202-DPB10401 DPA10202-DPB110601 DPA10202-DPB11901 DPA10202-DPB13101 DPA10202-DPB16501 DPA10301-DPB10101 DPA10301-DPB10201 DPA10301-DPB10202 DPA10301-DPB10401 DPA10301-DPB10402 DPA10301-DPB110501 DPA10301-DPB110601 DPA10301-DPB11801 DPA10301-DPB12301 DPA10301-DPB13901 DPA10301-DPB14001 DPA10301-DPB14901 DPA10301-DPB15501 DPA10301-DPB16501 DPA10301-DPB17501; note = HLAs: DPA10301-DPB18001 DPA10401-DPB10101 DPA10401-DPB10201 DPA10401-DPB10202 DPA10401-DPB10402 DPA10401-DPB10501 DPA10401-DPB110501 DPA10401-DPB14901 DQA10101-DQB10501 DQA10102-DQB10501 DQA10102-DQB10502 DQA10102-DQB10503 DQA10103-DQB10501 DQA10104-DQB10501 DQA10105-DQB10501
KHQKEPPFLWMGYELHPDKWTV

SEQ ID NO: 4119 - protein, 23 aa, Human immunodeficiency virus 1
  source 1..23: note = HLAs: DRB1_0101 DRB1_1001 DPA10103-DPB10101 DPA10103-DPB10201 DPA10103-DPB10202 DPA10103-DPB10401 DPA10103-DPB112601 DPA10103-DPB11501 DPA10103-DPB11601 DPA10103-DPB11801 DPA10103-DPB11901 DPA10103-DPB12301 DPA10103-DPB13101 DPA10103-DPB13401 DPA10103-DPB13901 DPA10103-DPB14001 DPA10103-DPB14101 DPA10103-DPB14801 DPA10103-DPB15001 DPA10103-DPB15901 DPA10104-DPB10101 DPA10104-DPB11501 DPA10105-DPB10101 DPA10105-DPB10401 DPA10105-DPB11801 DPA10105-DPB15001 DPA10106-DPB10101 DPA10201-DPB10101 DPA10201-DPB10202 DPA10201-DPB110601 DPA10201-DPB11501 DPA10201-DPB11601 DPA10201-DPB11901 DPA10202-DPB10101 DPA10202-DPB10201 DPA10202-DPB10202 DPA10202-DPB10401 DPA10202-DPB110601 DPA10202-DPB11901 DPA10202-DPB13101 DPA10202-DPB16501 DPA10301-DPB10101 DPA10301-DPB10201 DPA10301-DPB10202 DPA10301-DPB10401 DPA10301-DPB10402 DPA10301-DPB110501 DPA10301-DPB110601 DPA10301-DPB11801 DPA10301-DPB12301 DPA10301-DPB13901 DPA10301-DPB14001 DPA10301-DPB14901 DPA10301-DPB15501 DPA10301-DPB16501; note = HLAs: DPA10301-DPB17501 DPA10301-DPB18001 DPA10401-DPB10101 DPA10401-DPB10201 DPA10401-DPB10202 DPA10401-DPB10402 DPA10401-DPB10501 DPA10401-DPB110501 DPA10401-DPB14901 DQA10101-DQB10501 DQA10102-DQB10501 DQA10102-DQB10502 DQA10102-DQB10503 DQA10103-DQB10501 DQA10104-DQB10501 DQA10105-DQB10501
KHQKEPPFLWMGYELHPDKWTVQ

SEQ ID NO: 4120 - protein, 24 aa, Human immunodeficiency virus 1
  source 1..24: note = HLAs: DRB1_0101 DRB1_0405 DRB1_1001 DRB1_1501 DPA10103-DPB10101 DPA10103-DPB10201 DPA10103-DPB10202 DPA10103-DPB10401 DPA10103-DPB10501 DPA10103-DPB112601 DPA10103-DPB11501 DPA10103-DPB11601 DPA10103-DPB11801 DPA10103-DPB11901 DPA10103-DPB12301 DPA10103-DPB13101 DPA10103-DPB13401 DPA10103-DPB13901 DPA10103-DPB14001 DPA10103-DPB14101 DPA10103-DPB14801 DPA10103-DPB15001 DPA10103-DPB15901 DPA10104-DPB10101 DPA10104-DPB11501 DPA10105-DPB10101 DPA10105-DPB10401 DPA10105-DPB11801 DPA10105-DPB15001 DPA10106-DPB10101 DPA10201-DPB10101 DPA10201-DPB10202 DPA10201-DPB110601 DPA10201-DPB11501 DPA10201-DPB11601 DPA10201-DPB11901 DPA10202-DPB10101 DPA10202-DPB10201 DPA10202-DPB10202 DPA10202-DPB10401 DPA10202-DPB110601 DPA10202-DPB11901 DPA10202-DPB13101 DPA10202-DPB16501 DPA10301-DPB10101 DPA10301-DPB10201 DPA10301-DPB10202 DPA10301-DPB10401 DPA10301-DPB10402 DPA10301-DPB110501 DPA10301-DPB110601 DPA10301-DPB11301 DPA10301-DPB11801 DPA10301-DPB12301 DPA10301-DPB13901 DPA10301-DPB14001; note = HLAs: DPA10301-DPB14901 DPA10301-DPB15501 DPA10301-DPB16501 DPA10301-DPB17501 DPA10301-DPB18001 DPA10401-DPB10101 DPA10401-DPB10201 DPA10401-DPB10202 DPA10401-DPB10402 DPA10401-DPB10501 DPA10401-DPB110501 DPA10401-DPB14901 DQA10101-DQB10501 DQA10102-DQB10501 DQA10102-DQB10502 DQA10102-DQB10503 DQA10103-DQB10501 DQA10104-DQB10501 DQA10105-DQB10501
KHQKEPPFLWMGYELHPDKWTVQP

SEQ ID NO: 4121 - protein, 25 aa, Human immunodeficiency virus 1
  source 1..25: note = HLAs: DRB1_0101 DRB1_0405 DRB1_1001 DRB1_1501 DPA10103-DPB10101 DPA10103-DPB10201 DPA10103-DPB10202 DPA10103-DPB10401 DPA10103-DPB10501 DPA10103-DPB112601 DPA10103-DPB11501 DPA10103-DPB11601 DPA10103-DPB11801 DPA10103-DPB11901 DPA10103-DPB12301 DPA10103-DPB13101 DPA10103-DPB13401 DPA10103-DPB13901 DPA10103-DPB14001 DPA10103-DPB14101 DPA10103-DPB14801 DPA10103-DPB15001 DPA10103-DPB15901 DPA10104-DPB10101 DPA10104-DPB11501 DPA10105-DPB10101 DPA10105-DPB10401 DPA10105-DPB11801 DPA10105-DPB15001 DPA10106-DPB10101 DPA10201-DPB10101 DPA10201-DPB10202 DPA10201-DPB110601 DPA10201-DPB11501 DPA10201-DPB11601 DPA10201-DPB11901 DPA10201-DPB13401 DPA10202-DPB10101 DPA10202-DPB10201 DPA10202-DPB10202 DPA10202-DPB10401 DPA10202-DPB110601 DPA10202-DPB11901 DPA10202-DPB13101 DPA10202-DPB15501 DPA10202-DPB16501 DPA10301-DPB10101 DPA10301-DPB10201 DPA10301-DPB10202 DPA10301-DPB10401 DPA10301-DPB10402 DPA10301-DPB110501 DPA10301-DPB110601 DPA10301-DPB11301 DPA10301-DPB11801 DPA10301-DPB12301; note = HLAs: DPA10301-DPB13901 DPA10301-DPB14001 DPA10301-DPB14901 DPA10301-DPB15501 DPA10301-DPB16501 DPA10301-DPB17501 DPA10301-DPB18001 DPA10401-DPB10101 DPA10401-DPB10201 DPA10401-DPB10202 DPA10401-DPB10402 DPA10401-DPB10501 DPA10401-DPB110501 DPA10401-DPB14901 DQA10101-DQB10501 DQA10101-DQB10503 DQA10102-DQB10501 DQA10102-DQB10502 DQA10102-DQB10503 DQA10103-DQB10501 DQA10104-DQB10501 DQA10104-DQB10503 DQA10105-DQB10501 DQA10107-DQB10503
KHQKEPPFLWMGYELHPDKWTVQPI

SEQ ID NO: 4122 - protein, 20 aa, Human immunodeficiency virus 1
  source 1..20: note = HLAs: DRB1_0806 DRB1_1103 DRB1_1104 DPA10401-DPB10101 DQA10103-DQB10601
KIGPENPYNTPVFAIKKKDS

SEQ ID NO: 4123 - protein, 21 aa, Human immunodeficiency virus 1
  source 1..21: note = HLAs: DRB1_0806 DRB1_1101 DRB1_1103 DRB1_1104 DRB1_1305
KIGPENPYNTPVFAIKKKDST

SEQ ID NO: 4124 - protein, 22 aa, Human immunodeficiency virus 1
  source 1..22: note = HLAs: DRB1_0804 DRB1_0806 DRB1_1101 DRB1_1103 DRB1_1104 DRB1_1304 DRB1_1305
KIGPENPYNTPVFAIKKKDSTK

SEQ ID NO: 4125 - protein, 23 aa, Human immunodeficiency virus 1
  source 1..23: note = HLAs: DRB1_0801 DRB1_0804 DRB1_0806 DRB1_1101 DRB1_1102 DRB1_1103 DRB1_1104 DRB1_1301 DRB1_1304 DRB1_1305 DRB1_1406
KIGPENPYNTPVFAIKKKDSTKW

SEQ ID NO: 4126 - protein, 24 aa, Human immunodeficiency virus 1
  source 1..24: note = HLAs: DRB1_0801 DRB1_0804 DRB1_0806 DRB1_1101 DRB1_1102 DRB1_1103 DRB1_1104 DRB1_1301 DRB1_1304 DRB1_1305 DRB1_1406
KIGPENPYNTPVFAIKKKDSTKWR

SEQ ID NO: 4127 - protein, 25 aa, Human immunodeficiency virus 1
  source 1..25: note = HLAs: DRB1_0801 DRB1_0804 DRB1_0806 DRB1_1101 DRB1_1102 DRB1_1103 DRB1_1104 DRB1_1301 DRB1_1304 DRB1_1305 DRB1_1406
KIGPENPYNTPVFAIKKKDSTKWRK

SEQ ID NO: 4128 - protein, 14 aa, Human immunodeficiency virus 1
  source 1..14: note = HLAs: DQA10102-DQB10501 DQA10102-DQB10604 DQA10102-DQB10609
KIIGQVRDQAEHLK

SEQ ID NO: 4129 - protein, 15 aa, Human immunodeficiency virus 1
  source 1..15: note = HLAs: DRB1_0410 DRB1_0806 DRB1_1102 DRB1_1103 DRB1_1104 DRB1_1301 DRB1_1304 DRB1_1406 DQA10102-DQB10501 DQA10102-DQB10609
KIIGQVRDQAEHLKT

SEQ ID NO: 4130 - protein, 16 aa, Human immunodeficiency virus 1
  source 1..16: note = HLAs: DQA10102-DQB10501 DQA10102-DQB10604 DQA10102-DQB10609
KIIGQVRDQAEHLKTA

SEQ ID NO: 4131 - protein, 17 aa, Human immunodeficiency virus 1
  source 1..17: note = HLAs: DQA10102-DQB10501 DQA10102-DQB10609
KIIGQVRDQAEHLKTAV

SEQ ID NO: 4132 - protein, 19 aa, Human immunodeficiency virus 1
  source 1..19: note = HLAs: DQA10102-DQB10501 DQA10102-DQB10609
KIIGQVRDQAEHLKTAVQM

SEQ ID NO: 4133 - protein, 20 aa, Human immunodeficiency virus 1
  source 1..20: note = HLAs: DRB1_1304 DQA10102-DQB10501 DQA10102-DQB10604 DQA10102-DQB10609 DQA10103-DQB10609
KIIGQVRDQAEHLKTAVQMA

SEQ ID NO: 4134 - protein, 21 aa, Human immunodeficiency virus 1
  source 1..21: note = HLAs: DRB1_1001 DPA10301-DPB10101 DPA10401-DPB10101 DQA10102-DQB10501 DQA10102-DQB10609 DQA10103-DQB10609
KIIGQVRDQAEHLKTAVQMAV

SEQ ID NO: 4135 - protein, 22 aa, Human immunodeficiency virus 1
  source 1..22: note = HLAs: DRB1_1001 DRB1_1304 DRB1_1406 DPA10301-DPB10101 DPA10301-DPB10201 DPA10301-DPB10202 DPA10301-DPB110601 DPA10301-DPB11801 DPA10401-DPB10101 DQA10102-DQB10501 DQA10102-DQB10609 DQA10103-DQB10501 DQA10103-DQB10609
KIIGQVRDQAEHLKTAVQMAVF

SEQ ID NO: 4136 - protein, 23 aa, Human immunodeficiency virus 1
  source 1..23: note = HLAs: DRB1_0101 DRB1_1001 DRB1_1304 DRB1_1406 DPA10301-DPB10101 DPA10301-DPB10201 DPA10301-DPB10202 DPA10301-DPB110601 DPA10301-DPB11801 DPA10301-DPB14001 DPA10301-DPB16501 DPA10401-DPB10101 DQA10102-DQB10501 DQA10102-DQB10609 DQA10103-DQB10501 DQA10103-DQB10601 DQA10103-DQB10609
KIIGQVRDQAEHLKTAVQMAVFI

SEQ ID NO: 4137 - protein, 24 aa, Human immunodeficiency virus 1
  source 1..24: note = HLAs: DRB1_0101 DRB1_1001 DRB1_1304 DRB1_1406 DPA10103-DPB10101 DPA10103-DPB11501 DPA10103-DPB15001 DPA10104-DPB10101 DPA10104-DPB11501 DPA10105-DPB10101 DPA10105-DPB15001 DPA10301-DPB10101 DPA10301-DPB10201 DPA10301-DPB10202 DPA10301-DPB10401 DPA10301-DPB110601 DPA10301-DPB11801 DPA10301-DPB12301 DPA10301-DPB13901 DPA10301-DPB14001 DPA10301-DPB16501 DPA10401-DPB10101 DPA10401-DPB10501 DQA10102-DQB10501 DQA10102-DQB10601 DQA10102-DQB10609 DQA10103-DQB10501 DQA10103-DQB10601 DQA10103-DQB10609
KIIGQVRDQAEHLKTAVQMAVFIH

SEQ ID NO: 4138 - protein, 25 aa, Human immunodeficiency virus 1
  source 1..25: note = HLAs: DRB1_0101 DRB1_0701 DRB1_1001 DRB1_1304 DRB1_1406 DPA10103-DPB10101 DPA10103-DPB11501 DPA10103-DPB11901 DPA10103-DPB15001 DPA10104-DPB10101 DPA10104-DPB11501 DPA10105-DPB10101 DPA10105-DPB15001 DPA10202-DPB10101 DPA10301-DPB10101 DPA10301-DPB10201 DPA10301-DPB10202 DPA10301-DPB10401 DPA10301-DPB10402 DPA10301-DPB110501 DPA10301-DPB110601 DPA10301-DPB11801 DPA10301-DPB12301 DPA10301-DPB13901 DPA10301-DPB14001 DPA10301-DPB14901 DPA10301-DPB16501 DPA10301-DPB18001 DPA10401-DPB10101 DPA10401-DPB10201 DPA10401-DPB10202 DPA10401-DPB10501 DPA10401-DPB11401 DQA10102-DQB10501 DQA10102-DQB10503 DQA10102-DQB10601 DQA10102-DQB10609 DQA10103-DQB10501 DQA10103-DQB10601 DQA10103-DQB10609
KIIGQVRDQAEHLKTAVQMAVFIHN

SEQ ID NO: 4139 - protein, 13 aa, Human immunodeficiency virus 1
  source 1..13: note = HLAs: DRB1_0101 DRB1_0404 DRB1_0408 DRB1_0802 DRB1_0809 DRB1_0813 DRB1_1001 DQA10102-DQB10501 DQA10102-DQB10611
KIILVAVHVASGY

SEQ ID NO: 4140 - protein, 14 aa, Human immunodeficiency virus 1
  source 1..14: note = HLAs: DRB1_0301 DRB1_1103 DRB1_1304
KIIRDYGKQMAGDD

SEQ ID NO: 4141 - protein, 15 aa, Human immunodeficiency virus 1
  source 1..15: note = HLAs: DRB1_0301 DRB1_1102 DRB1_1103 DRB1_1104 DRB1_1114 DRB1_1301 DRB1_1302 DRB1_1304 DRB1_1406
KIIRDYGKQMAGDDC

SEQ ID NO: 4142 - protein, 16 aa, Human immunodeficiency virus 1
  source 1..16: note = HLAs: DRB1_1103 DRB1_1304
KIIRDYGKQMAGDDCV

SEQ ID NO: 4143 - protein, 17 aa, Human immunodeficiency virus 1
  source 1..17: note = HLAs: DRB1_1103 DRB1_1304
KIIRDYGKQMAGDDCVA

SEQ ID NO: 4144 - protein, 20 aa, Human immunodeficiency virus 1
  source 1..20: note = HLAs: DRB1_1103 DRB1_1304 DQA10102-DQB10501
KIIRDYGKQMAGDDCVAGRQ

SEQ ID NO: 4145 - protein, 21 aa, Human immunodeficiency virus 1
  source 1..21: note = HLAs: DRB1_1304
KIIRDYGKQMAGDDCVAGRQD

SEQ ID NO: 4146 - protein, 22 aa, Human immunodeficiency virus 1
  source 1..22: note = HLAs: DRB1_1304
KIIRDYGKQMAGDDCVAGRQDE

SEQ ID NO: 4147 - protein, 23 aa, Human immunodeficiency virus 1
  source 1..23: note = HLAs: DRB1_1304
KIIRDYGKQMAGDDCVAGRQDED

SEQ ID NO: 4148 - protein, 13 aa, Human immunodeficiency virus 1
  source 1..13: note = HLAs: DRB1_1102 DRB1_1103 DRB1_1301 DRB1_1304 DRB1_1501
KIQNFRVYYRDSR

SEQ ID NO: 4149 - protein, 14 aa, Human immunodeficiency virus 1
  source 1..14: note = HLAs: DRB1_0804 DRB1_0806 DRB1_1102 DRB1_1103 DRB1_1104 DRB1_1301 DRB1_1304 DRB1_1406 DRB1_1501 DRB1_1503 DRB1_1601 DPA10103-DPB11501 DPA10104-DPB11501 DPA10202-DPB110601 DPA10202-DPB11901 DPA10301-DPB11801 DPA10301-DPB14001 DQA10102-DQB10501 DQA10102-DQB10503
KIQNFRVYYRDSRD

SEQ ID NO: 4150 - protein, 15 aa, Human immunodeficiency virus 1
  source 1..15: note = HLAs: DRB1_0404 DRB1_0410 DRB1_0801 DRB1_0804 DRB1_0806 DRB1_1001 DRB1_1101 DRB1_1102 DRB1_1103 DRB1_1104 DRB1_1202 DRB1_1301 DRB1_1304 DRB1_1305 DRB1_1406 DRB1_1501 DRB1_1503 DRB1_1601 DRB1_1602 DPA10103-DPB11501 DPA10103-DPB13401 DPA10104-DPB11501 DPA10201-DPB11501 DPA10202-DPB10501 DPA10202-DPB110601 DPA10202-DPB11801 DPA10202-DPB11901 DPA10202-DPB13101 DPA10202-DPB13801 DPA10301-DPB10201 DPA10301-DPB10202 DPA10301-DPB11801 DPA10301-DPB14001 DQA10102-DQB10501 DQA10102-DQB10503 DQA10103-DQB10501 DQA10505-DQB10402
KIQNFRVYYRDSRDP

SEQ ID NO: 4151 - protein, 23 aa, Human immunodeficiency virus 1
  source 1..23: note = HLAs: DRB1_1104
KISKIGPENPYNTPVFAIKKKDS

SEQ ID NO: 4152 - protein, 24 aa, Human immunodeficiency virus 1
  source 1..24: note = HLAs: DRB1_0806 DRB1_1101 DRB1_1103 DRB1_1104 DRB1_1304 DRB1_1305
KISKIGPENPYNTPVFAIKKKDST

SEQ ID NO: 4153 - protein, 25 aa, Human immunodeficiency virus 1
  source 1..25: note = HLAs: DRB1_0804 DRB1_0806 DRB1_1101 DRB1_1102 DRB1_1103 DRB1_1104 DRB1_1301 DRB1_1304 DRB1_1305
KISKIGPENPYNTPVFAIKKKDSTK

SEQ ID NO: 4154 - protein, 13 aa, Human immunodeficiency virus 1
  source 1..13: note = HLAs: DRB1_0101 DRB1_0102 DRB1_0401 DRB1_0404 DRB1_0405 DRB1_0408 DRB1_0410 DRB1_0813 DRB1_0901 DRB1_1001 DRB1_1114 DRB1_1302 DRB1_1406 DRB1_1501 DRB1_1502 DRB1_1503 DRB1_1601 DRB1_1602 DPA10103-DPB10101 DPA10103-DPB10301 DPA10103-DPB10601 DPA10103-DPB10901 DPA10103-DPB11101 DPA10103-DPB112401 DPA10103-DPB11401 DPA10103-DPB11501 DPA10103-DPB12001 DPA10103-DPB12901 DPA10103-DPB15001 DPA10103-DPB15501 DPA10104-DPB10101 DPA10104-DPB10301 DPA10104-DPB11501 DPA10105-DPB10101 DPA10105-DPB10301 DPA10105-DPB15001 DPA10202-DPB10101 DPA10202-DPB15501 DPA10301-DPB10101 DPA10301-DPB10201 DPA10301-DPB10202 DPA10301-DPB10301 DPA10301-DPB10901 DPA10301-DPB110601 DPA10301-DPB15501 DPA10301-DPB16501 DPA10401-DPB10101 DPA10401-DPB10301 DPA10401-DPB10501 DPA10401-DPB11301 DPA10401-DPB113301 DPA10401-DPB11401 DQA10102-DQB10501 DQA10102-DQB10503 DQA10103-DQB10501 DQA10505-DQB10402
KIVRMYSPVSILD

SEQ ID NO: 4155 - protein, 14 aa, Human immunodeficiency virus 1
  source 1..14: note = HLAs: DRB1_0101 DRB1_0102 DRB1_0401 DRB1_0402 DRB1_0404 DRB1_0405 DRB1_0408 DRB1_0410 DRB1_0701 DRB1_0801 DRB1_0802 DRB1_0803 DRB1_0804 DRB1_0806 DRB1_0809 DRB1_0813 DRB1_0901 DRB1_1001 DRB1_1102 DRB1_1104 DRB1_1114 DRB1_1301 DRB1_1302 DRB1_1304 DRB1_1404 DRB1_1406 DRB1_1501 DRB1_1502 DRB1_1503 DRB1_1601 DRB1_1602 DPA10103-DPB10101 DPA10103-DPB10201 DPA10103-DPB10202 DPA10103-DPB10301 DPA10103-DPB10501 DPA10103-DPB10601 DPA10103-DPB10901 DPA10103-DPB11001 DPA10103-DPB11101 DPA10103-DPB112401 DPA10103-DPB11301 DPA10103-DPB113101 DPA10103-DPB113301 DPA10103-DPB11401 DPA10103-DPB11501 DPA10103-DPB11601 DPA10103-DPB11701 DPA10103-DPB11901 DPA10103-DPB12001 DPA10103-DPB12101 DPA10103-DPB12901 DPA10103-DPB13001 DPA10103-DPB13101 DPA10103-DPB13401 DPA10103-DPB14801 DPA10103-DPB15001 DPA10103-DPB15501 DPA10104-DPB10101 DPA10104-DPB10301 DPA10104-DPB11001 DPA10104-DPB11301 DPA10104-DPB11501 DPA10105-DPB10101 DPA10105-DPB10301 DPA10105-DPB15001 DPA10106-DPB10101 DPA10106-DPB11101; note = HLAs: DPA10201-DPB10101 DPA10201-DPB10301 DPA10201-DPB10601 DPA10201-DPB10901 DPA10201-DPB110601 DPA10201-DPB11101 DPA10201-DPB11301 DPA10201-DPB113301 DPA10201-DPB11401 DPA10201-DPB11501 DPA10201-DPB11901 DPA10201-DPB14501 DPA10201-DPB15501 DPA10201-DPB19101 DPA10202-DPB10101 DPA10202-DPB10201 DPA10202-DPB10202 DPA10202-DPB10301 DPA10202-DPB10401 DPA10202-DPB10901 DPA10202-DPB110601 DPA10202-DPB11101 DPA10202-DPB11301 DPA10202-DPB113101 DPA10202-DPB11401 DPA10202-DPB11701 DPA10202-DPB11901 DPA10202-DPB12101 DPA10202-DPB12901 DPA10202-DPB13001 DPA10202-DPB13101 DPA10202-DPB14501 DPA10202-DPB15501 DPA10202-DPB16501 DPA10202-DPB18501 DPA10301-DPB10101 DPA10301-DPB10201 DPA10301-DPB10202 DPA10301-DPB10301 DPA10301-DPB10401 DPA10301-DPB10402 DPA10301-DPB10901 DPA10301-DPB110501 DPA10301-DPB110601 DPA10301-DPB11101 DPA10301-DPB11301 DPA10301-DPB11701 DPA10301-DPB11801 DPA10301-DPB12301 DPA10301-DPB13901 DPA10301-DPB14001 DPA10301-DPB14901 DPA10301-DPB15501 DPA10301-DPB16501; note = HLAs: DPA10301-DPB17501 DPA10301-DPB18001 DPA10401-DPB10101 DPA10401-DPB10201 DPA10401-DPB10202 DPA10401-DPB10301 DPA10401-DPB10501 DPA10401-DPB11301 DPA10401-DPB113301 DPA10401-DPB11401 DQA10102-DQB10501 DQA10102-DQB10503 DQA10102-DQB10601 DQA10102-DQB10604 DQA10102-DQB10609 DQA10103-DQB10501 DQA10103-DQB10503 DQA10103-DQB10601 DQA10103-DQB10604 DQA10103-DQB10608 DQA10103-DQB10609 DQA10201-DQB10301 DQA10201-DQB10303 DQA10501-DQB10501 DQA10505-DQB10402 DQA10505-DQB10501 DQA10506-DQB10303
KIVRMYSPVSILDI

SEQ ID NO: 4156 - protein, 15 aa, Human immunodeficiency virus 1
  source 1..15: note = HLAs: DRB1_0405 DRB1_0410 DRB1_1103 DRB1_1304
KKDSTKWRKLVDFRE

SEQ ID NO: 4157 - protein, 16 aa, Human immunodeficiency virus 1
  source 1..16: note = HLAs: DRB1_0405 DRB1_0410 DPA10103-DPB10101 DPA10103-DPB10202 DPA10103-DPB11501 DPA10103-DPB11601 DPA10103-DPB11901 DPA10103-DPB13101 DPA10103-DPB13401 DPA10104-DPB10101 DPA10104-DPB11501 DPA10105-DPB10101 DPA10201-DPB110601 DPA10201-DPB11501 DPA10201-DPB11901 DPA10202-DPB10101 DPA10202-DPB110601 DPA10202-DPB11901 DPA10202-DPB13101 DPA10202-DPB16501 DPA10301-DPB10101 DPA10301-DPB10201 DPA10301-DPB10202 DPA10301-DPB10401 DPA10301-DPB110601 DPA10301-DPB11801 DPA10301-DPB12301 DPA10301-DPB13901 DPA10301-DPB14001 DPA10301-DPB16501 DPA10401-DPB10101 DPA10401-DPB10201 DPA10401-DPB10202 DPA10401-DPB10501
KKDSTKWRKLVDFREL

SEQ ID NO: 4158 - protein, 17 aa, Human immunodeficiency virus 1
  source 1..17: note = HLAs: DRB1_0405 DRB1_0410 DRB1_1001 DRB1_1304 DPA10103-DPB10101 DPA10103-DPB10201 DPA10103-DPB10202 DPA10103-DPB11501 DPA10103-DPB11601 DPA10103-DPB11901 DPA10103-DPB13101 DPA10103-DPB13401 DPA10103-DPB14801 DPA10103-DPB15001 DPA10104-DPB10101 DPA10104-DPB11501 DPA10105-DPB10101 DPA10105-DPB15001 DPA10201-DPB110601 DPA10201-DPB11501 DPA10201-DPB11601 DPA10201-DPB11901 DPA10202-DPB10101 DPA10202-DPB110601 DPA10202-DPB11901 DPA10202-DPB13101 DPA10202-DPB16501 DPA10301-DPB10101 DPA10301-DPB10201 DPA10301-DPB10202 DPA10301-DPB10401 DPA10301-DPB110601 DPA10301-DPB11801 DPA10301-DPB12301 DPA10301-DPB13901 DPA10301-DPB14001 DPA10301-DPB16501 DPA10401-DPB10101 DPA10401-DPB10201 DPA10401-DPB10202 DPA10401-DPB10501
KKDSTKWRKLVDFRELN

SEQ ID NO: 4159 - protein, 18 aa, Human immunodeficiency virus 1
  source 1..18: note = HLAs: DRB1_0405 DPA10103-DPB10101 DPA10103-DPB11501 DPA10103-DPB11601 DPA10103-DPB11901 DPA10103-DPB13101 DPA10104-DPB10101 DPA10104-DPB11501 DPA10105-DPB10101 DPA10202-DPB10101 DPA10202-DPB110601 DPA10202-DPB11901 DPA10202-DPB13101 DPA10301-DPB10101 DPA10301-DPB10201 DPA10301-DPB10202 DPA10301-DPB110601 DPA10301-DPB11801 DPA10301-DPB14001 DPA10301-DPB16501 DPA10401-DPB10101 DPA10401-DPB10202
KKDSTKWRKLVDFRELNK

SEQ ID NO: 4160 - protein, 19 aa, Human immunodeficiency virus 1
  source 1..19: note = HLAs: DRB1_0405 DRB1_0410 DRB1_1001 DRB1_1304 DPA10103-DPB10101 DPA10103-DPB10201 DPA10103-DPB10202 DPA10103-DPB10501 DPA10103-DPB11501 DPA10103-DPB11601 DPA10103-DPB11901 DPA10103-DPB13101 DPA10103-DPB13401 DPA10103-DPB14001 DPA10103-DPB14101 DPA10103-DPB14801 DPA10103-DPB15001 DPA10104-DPB10101 DPA10104-DPB11501 DPA10105-DPB10101 DPA10105-DPB15001 DPA10106-DPB10101 DPA10201-DPB10101 DPA10201-DPB110601 DPA10201-DPB11501 DPA10201-DPB11601 DPA10201-DPB11901 DPA10202-DPB10101 DPA10202-DPB10202 DPA10202-DPB10501 DPA10202-DPB110601 DPA10202-DPB11901 DPA10202-DPB13101 DPA10202-DPB13801 DPA10202-DPB15501 DPA10202-DPB16501 DPA10301-DPB10101 DPA10301-DPB10201 DPA10301-DPB10202 DPA10301-DPB10401 DPA10301-DPB10402 DPA10301-DPB110501 DPA10301-DPB110601 DPA10301-DPB11801 DPA10301-DPB12301 DPA10301-DPB13901 DPA10301-DPB14001 DPA10301-DPB14901 DPA10301-DPB15501 DPA10301-DPB16501 DPA10301-DPB18001 DPA10401-DPB10101 DPA10401-DPB10201 DPA10401-DPB10202 DPA10401-DPB10501
KKDSTKWRKLVDFRELNKR

SEQ ID NO: 4161 - protein, 20 aa, Human immunodeficiency virus 1
  source 1..20: note = HLAs: DRB1_0405 DRB1_0410 DRB1_0801 DRB1_0806 DRB1_1001 DRB1_1103 DRB1_1304 DPA10103-DPB10101 DPA10103-DPB10201 DPA10103-DPB10202 DPA10103-DPB10501 DPA10103-DPB10601 DPA10103-DPB11101 DPA10103-DPB11501 DPA10103-DPB11601 DPA10103-DPB11801 DPA10103-DPB11901 DPA10103-DPB13101 DPA10103-DPB13401 DPA10103-DPB14001 DPA10103-DPB14101 DPA10103-DPB14801 DPA10103-DPB15001 DPA10103-DPB15501 DPA10103-DPB15901 DPA10104-DPB10101 DPA10104-DPB11501 DPA10105-DPB10101 DPA10105-DPB11801 DPA10105-DPB15001 DPA10106-DPB10101 DPA10201-DPB10101 DPA10201-DPB10501 DPA10201-DPB110601 DPA10201-DPB11501 DPA10201-DPB11601 DPA10201-DPB11901 DPA10201-DPB13401 DPA10202-DPB10101 DPA10202-DPB10201 DPA10202-DPB10202 DPA10202-DPB10501 DPA10202-DPB110601 DPA10202-DPB11101 DPA10202-DPB11801 DPA10202-DPB11901 DPA10202-DPB13101 DPA10202-DPB13801 DPA10202-DPB15501 DPA10202-DPB16501 DPA10301-DPB10101 DPA10301-DPB10201 DPA10301-DPB10202 DPA10301-DPB10401 DPA10301-DPB10402 DPA10301-DPB110501 DPA10301-DPB110601 DPA10301-DPB11101; note = HLAs: DPA10301-DPB11801 DPA10301-DPB12301 DPA10301-DPB13901 DPA10301-DPB14001 DPA10301-DPB14901 DPA10301-DPB15501 DPA10301-DPB16501 DPA10301-DPB18001 DPA10401-DPB10101 DPA10401-DPB10201 DPA10401-DPB10202 DPA10401-DPB10501 DQA10102-DQB10501
KKDSTKWRKLVDFRELNKRT

SEQ ID NO: 4162 - protein, 21 aa, Human immunodeficiency virus 1
  source 1..21: note = HLAs: DRB1_0405 DRB1_0410 DRB1_0801 DRB1_0806 DRB1_1001 DRB1_1101 DRB1_1103 DRB1_1104 DRB1_1304 DRB1_1305 DPA10103-DPB10101 DPA10103-DPB10201 DPA10103-DPB10202 DPA10103-DPB10501 DPA10103-DPB11501 DPA10103-DPB11601 DPA10103-DPB11901 DPA10103-DPB13101 DPA10103-DPB13401 DPA10103-DPB14001 DPA10103-DPB14101 DPA10103-DPB14801 DPA10103-DPB15001 DPA10104-DPB10101 DPA10104-DPB11501 DPA10105-DPB10101 DPA10105-DPB15001 DPA10106-DPB10101 DPA10201-DPB10101 DPA10201-DPB10501 DPA10201-DPB110601 DPA10201-DPB11501 DPA10201-DPB11601 DPA10201-DPB11901 DPA10202-DPB10101 DPA10202-DPB10501 DPA10202-DPB110601 DPA10202-DPB11901 DPA10202-DPB13101 DPA10202-DPB13801 DPA10202-DPB16501 DPA10301-DPB10101 DPA10301-DPB10201 DPA10301-DPB10202 DPA10301-DPB10401 DPA10301-DPB10402 DPA10301-DPB110501 DPA10301-DPB110601 DPA10301-DPB11801 DPA10301-DPB12301 DPA10301-DPB13901 DPA10301-DPB14001 DPA10301-DPB14901 DPA10301-DPB15501 DPA10301-DPB16501 DPA10301-DPB18001 DPA10401-DPB10101 DPA10401-DPB10201 DPA10401-DPB10202; note = HLAs: DPA10401-DPB10501
KKDSTKWRKLVDFRELNKRTQ

SEQ ID NO: 4163 - protein, 22 aa, Human immunodeficiency virus 1
  source 1..22: note = HLAs: DRB1_0405 DRB1_0410 DRB1_0801 DRB1_0806 DRB1_1001 DRB1_1101 DRB1_1103 DRB1_1104 DRB1_1304 DRB1_1305 DPA10103-DPB10101 DPA10103-DPB10201 DPA10103-DPB10202 DPA10103-DPB10501 DPA10103-DPB11501 DPA10103-DPB11601 DPA10103-DPB11901 DPA10103-DPB13101 DPA10103-DPB13401 DPA10103-DPB14001 DPA10103-DPB14101 DPA10103-DPB14801 DPA10103-DPB15001 DPA10104-DPB10101 DPA10104-DPB11501 DPA10105-DPB10101 DPA10105-DPB15001 DPA10106-DPB10101 DPA10201-DPB10101 DPA10201-DPB10501 DPA10201-DPB110601 DPA10201-DPB11501 DPA10201-DPB11601 DPA10201-DPB11901 DPA10202-DPB10101 DPA10202-DPB10501 DPA10202-DPB110601 DPA10202-DPB11901 DPA10202-DPB13101 DPA10202-DPB13801 DPA10202-DPB16501 DPA10301-DPB10101 DPA10301-DPB10201 DPA10301-DPB10202 DPA10301-DPB10401 DPA10301-DPB10402 DPA10301-DPB110501 DPA10301-DPB110601 DPA10301-DPB11801 DPA10301-DPB12301 DPA10301-DPB13901 DPA10301-DPB14001 DPA10301-DPB14901 DPA10301-DPB15501 DPA10301-DPB16501 DPA10301-DPB18001 DPA10401-DPB10101 DPA10401-DPB10201 DPA10401-DPB10202; note = HLAs: DPA10401-DPB10501
KKDSTKWRKLVDFRELNKRTQD

SEQ ID NO: 4164 - protein, 23 aa, Human immunodeficiency virus 1
  source 1..23: note = HLAs: DRB1_0405 DRB1_0410 DRB1_0801 DRB1_0806 DRB1_1001 DRB1_1101 DRB1_1103 DRB1_1104 DRB1_1304 DRB1_1305 DPA10103-DPB10101 DPA10103-DPB10201 DPA10103-DPB10202 DPA10103-DPB10501 DPA10103-DPB11501 DPA10103-DPB11601 DPA10103-DPB11901 DPA10103-DPB13101 DPA10103-DPB13401 DPA10103-DPB14001 DPA10103-DPB14101 DPA10103-DPB14801 DPA10103-DPB15001 DPA10104-DPB10101 DPA10104-DPB11501 DPA10105-DPB10101 DPA10105-DPB15001 DPA10106-DPB10101 DPA10201-DPB10101 DPA10201-DPB10501 DPA10201-DPB110601 DPA10201-DPB11501 DPA10201-DPB11601 DPA10201-DPB11901 DPA10202-DPB10101 DPA10202-DPB10501 DPA10202-DPB110601 DPA10202-DPB11901 DPA10202-DPB13101 DPA10202-DPB13801 DPA10202-DPB16501 DPA10301-DPB10101 DPA10301-DPB10201 DPA10301-DPB10202 DPA10301-DPB10401 DPA10301-DPB10402 DPA10301-DPB110501 DPA10301-DPB110601 DPA10301-DPB11801 DPA10301-DPB12301 DPA10301-DPB13901 DPA10301-DPB14001 DPA10301-DPB14901 DPA10301-DPB15501 DPA10301-DPB16501 DPA10301-DPB18001 DPA10401-DPB10101 DPA10401-DPB10201 DPA10401-DPB10202; note = HLAs: DPA10401-DPB10501
KKDSTKWRKLVDFRELNKRTQDF

SEQ ID NO: 4165 - protein, 24 aa, Human immunodeficiency virus 1
  source 1..24: note = HLAs: DRB1_0405 DRB1_0410 DRB1_0801 DRB1_0806 DRB1_1001 DRB1_1101 DRB1_1102 DRB1_1103 DRB1_1104 DRB1_1301 DRB1_1304 DRB1_1305 DPA10103-DPB10101 DPA10103-DPB10201 DPA10103-DPB10202 DPA10103-DPB10501 DPA10103-DPB11501 DPA10103-DPB11601 DPA10103-DPB11901 DPA10103-DPB13101 DPA10103-DPB13401 DPA10103-DPB14001 DPA10103-DPB14101 DPA10103-DPB14801 DPA10103-DPB15001 DPA10104-DPB10101 DPA10104-DPB11501 DPA10105-DPB10101 DPA10105-DPB15001 DPA10106-DPB10101 DPA10201-DPB10101 DPA10201-DPB10501 DPA10201-DPB110601 DPA10201-DPB11501 DPA10201-DPB11601 DPA10201-DPB11901 DPA10202-DPB10101 DPA10202-DPB10501 DPA10202-DPB110601 DPA10202-DPB11901 DPA10202-DPB13101 DPA10202-DPB13801 DPA10202-DPB16501 DPA10301-DPB10101 DPA10301-DPB10201 DPA10301-DPB10202 DPA10301-DPB10401 DPA10301-DPB10402 DPA10301-DPB110501 DPA10301-DPB110601 DPA10301-DPB11801 DPA10301-DPB12301 DPA10301-DPB13901 DPA10301-DPB14001 DPA10301-DPB14901 DPA10301-DPB15501 DPA10301-DPB16501 DPA10301-DPB18001 DPA10401-DPB10101 DPA10401-DPB10201; note = HLAs: DPA10401-DPB10202 DPA10401-DPB10501
KKDSTKWRKLVDFRELNKRTQDFW

SEQ ID NO: 4166 - protein, 25 aa, Human immunodeficiency virus 1
  source 1..25: note = HLAs: DRB1_0405 DRB1_0410 DRB1_0801 DRB1_0804 DRB1_0806 DRB1_1001 DRB1_1101 DRB1_1102 DRB1_1103 DRB1_1104 DRB1_1301 DRB1_1304 DRB1_1305 DPA10103-DPB10101 DPA10103-DPB10201 DPA10103-DPB10202 DPA10103-DPB10501 DPA10103-DPB11501 DPA10103-DPB11601 DPA10103-DPB11901 DPA10103-DPB13101 DPA10103-DPB13401 DPA10103-DPB14001 DPA10103-DPB14101 DPA10103-DPB14801 DPA10103-DPB15001 DPA10104-DPB10101 DPA10104-DPB11501 DPA10105-DPB10101 DPA10105-DPB15001 DPA10106-DPB10101 DPA10201-DPB10101 DPA10201-DPB10501 DPA10201-DPB110601 DPA10201-DPB11501 DPA10201-DPB11601 DPA10201-DPB11901 DPA10202-DPB10101 DPA10202-DPB10501 DPA10202-DPB110601 DPA10202-DPB11901 DPA10202-DPB13101 DPA10202-DPB13801 DPA10202-DPB16501 DPA10301-DPB10101 DPA10301-DPB10201 DPA10301-DPB10202 DPA10301-DPB10401 DPA10301-DPB10402 DPA10301-DPB110501 DPA10301-DPB110601 DPA10301-DPB11801 DPA10301-DPB12301 DPA10301-DPB13901 DPA10301-DPB14001 DPA10301-DPB14901 DPA10301-DPB15501 DPA10301-DPB16501 DPA10301-DPB18001 DPA10401-DPB10101; note = HLAs: DPA10401-DPB10201 DPA10401-DPB10202 DPA10401-DPB10501
KKDSTKWRKLVDFRELNKRTQDFWE

SEQ ID NO: 4167 - protein, 17 aa, Human immunodeficiency virus 1
  source 1..17: note = HLAs: DRB1_1001 DPA10103-DPB10101 DPA10103-DPB10201 DPA10103-DPB10202 DPA10103-DPB10401 DPA10103-DPB112601 DPA10103-DPB11501 DPA10103-DPB11601 DPA10103-DPB11901 DPA10103-DPB12301 DPA10103-DPB13101 DPA10103-DPB13401 DPA10103-DPB13901 DPA10103-DPB14001 DPA10103-DPB14101 DPA10103-DPB14801 DPA10103-DPB15001 DPA10104-DPB10101 DPA10104-DPB11501 DPA10105-DPB10101 DPA10105-DPB10401 DPA10105-DPB15001 DPA10106-DPB10101 DPA10201-DPB10101 DPA10201-DPB11501 DPA10202-DPB10101 DPA10202-DPB110601 DPA10202-DPB11901 DPA10202-DPB13101 DPA10202-DPB16501 DPA10301-DPB10101 DPA10301-DPB10201 DPA10301-DPB10202 DPA10301-DPB10401 DPA10301-DPB10402 DPA10301-DPB110501 DPA10301-DPB110601 DPA10301-DPB11801 DPA10301-DPB12301 DPA10301-DPB13901 DPA10301-DPB14001 DPA10301-DPB14901 DPA10301-DPB16501 DPA10301-DPB18001 DPA10401-DPB10101 DPA10401-DPB10201 DPA10401-DPB10202 DQA10102-DQB10501
KKHQKEPPFLWMGYELH

SEQ ID NO: 4168 - protein, 18 aa, Human immunodeficiency virus 1
  source 1..18: note = HLAs: DPA10103-DPB10101 DPA10103-DPB10201 DPA10103-DPB10202 DPA10103-DPB10401 DPA10103-DPB112601 DPA10103-DPB11501 DPA10103-DPB11601 DPA10103-DPB12301 DPA10103-DPB13101 DPA10103-DPB13401 DPA10103-DPB13901 DPA10103-DPB14801 DPA10104-DPB10101 DPA10104-DPB11501 DPA10105-DPB10101 DPA10105-DPB10401 DPA10106-DPB10101 DPA10201-DPB10101 DPA10201-DPB11501 DPA10202-DPB10101 DPA10202-DPB13101 DPA10301-DPB10101 DPA10301-DPB10201 DPA10301-DPB10202 DPA10301-DPB10401 DPA10301-DPB10402 DPA10301-DPB110501 DPA10301-DPB110601 DPA10301-DPB11801 DPA10301-DPB12301 DPA10301-DPB13901 DPA10301-DPB14001 DPA10301-DPB14901 DPA10301-DPB16501 DPA10301-DPB18001 DPA10401-DPB10101 DPA10401-DPB10201 DPA10401-DPB10202
KKHQKEPPFLWMGYELHP

SEQ ID NO: 4169 - protein, 19 aa, Human immunodeficiency virus 1
  source 1..19: note = HLAs: DRB1_1001 DPA10103-DPB10101 DPA10103-DPB10201 DPA10103-DPB10202 DPA10103-DPB10401 DPA10103-DPB112601 DPA10103-DPB11501 DPA10103-DPB11601 DPA10103-DPB11901 DPA10103-DPB12301 DPA10103-DPB13101 DPA10103-DPB13401 DPA10103-DPB13901 DPA10103-DPB14001 DPA10103-DPB14101 DPA10103-DPB14801 DPA10103-DPB15001 DPA10103-DPB15901 DPA10104-DPB10101 DPA10104-DPB11501 DPA10105-DPB10101 DPA10105-DPB10401 DPA10105-DPB15001 DPA10106-DPB10101 DPA10201-DPB10101 DPA10201-DPB110601 DPA10201-DPB11501 DPA10201-DPB11601 DPA10201-DPB11901 DPA10202-DPB10101 DPA10202-DPB10202 DPA10202-DPB10401 DPA10202-DPB110601 DPA10202-DPB11901 DPA10202-DPB13101 DPA10202-DPB16501 DPA10301-DPB10101 DPA10301-DPB10201 DPA10301-DPB10202 DPA10301-DPB10401 DPA10301-DPB10402 DPA10301-DPB110501 DPA10301-DPB110601 DPA10301-DPB11801 DPA10301-DPB12301 DPA10301-DPB13901 DPA10301-DPB14001 DPA10301-DPB14901 DPA10301-DPB15501 DPA10301-DPB16501 DPA10301-DPB17501 DPA10301-DPB18001 DPA10401-DPB10101 DPA10401-DPB10201 DPA10401-DPB10202; note = HLAs: DPA10401-DPB10402 DPA10401-DPB10501 DPA10401-DPB110501 DPA10401-DPB14901 DQA10101-DQB10501 DQA10102-DQB10501 DQA10102-DQB10502 DQA10102-DQB10503 DQA10103-DQB10501 DQA10104-DQB10501 DQA10105-DQB10501
KKHQKEPPFLWMGYELHPD

SEQ ID NO: 4170 - protein, 20 aa, Human immunodeficiency virus 1
  source 1..20: note = HLAs: DRB1_0101 DRB1_0405 DRB1_1001 DRB1_1501 DRB1_1602 DPA10103-DPB10101 DPA10103-DPB10201 DPA10103-DPB10202 DPA10103-DPB10401 DPA10103-DPB10402 DPA10103-DPB10501 DPA10103-DPB110501 DPA10103-DPB11101 DPA10103-DPB112601 DPA10103-DPB11501 DPA10103-DPB11601 DPA10103-DPB11801 DPA10103-DPB11901 DPA10103-DPB12301 DPA10103-DPB13101 DPA10103-DPB13401 DPA10103-DPB13901 DPA10103-DPB14001 DPA10103-DPB14101 DPA10103-DPB14801 DPA10103-DPB14901 DPA10103-DPB15001 DPA10103-DPB15101 DPA10103-DPB15501 DPA10103-DPB15901 DPA10103-DPB18001 DPA10104-DPB10101 DPA10104-DPB11501 DPA10105-DPB10101 DPA10105-DPB10401 DPA10105-DPB11801 DPA10105-DPB15001 DPA10106-DPB10101 DPA10201-DPB10101 DPA10201-DPB10201 DPA10201-DPB10202 DPA10201-DPB10401 DPA10201-DPB10501 DPA10201-DPB110601 DPA10201-DPB11501 DPA10201-DPB11601 DPA10201-DPB11901 DPA10201-DPB13401 DPA10201-DPB15501 DPA10202-DPB10101 DPA10202-DPB10201 DPA10202-DPB10202 DPA10202-DPB10401 DPA10202-DPB10501 DPA10202-DPB110601 DPA10202-DPB11101 DPA10202-DPB11301; note = HLAs: DPA10202-DPB11801 DPA10202-DPB11901 DPA10202-DPB13101 DPA10202-DPB13801 DPA10202-DPB15501 DPA10202-DPB16501 DPA10301-DPB10101 DPA10301-DPB10201 DPA10301-DPB10202 DPA10301-DPB10401 DPA10301-DPB10402 DPA10301-DPB110501 DPA10301-DPB110601 DPA10301-DPB11101 DPA10301-DPB11301 DPA10301-DPB11801 DPA10301-DPB12301 DPA10301-DPB13901 DPA10301-DPB14001 DPA10301-DPB14901 DPA10301-DPB15501 DPA10301-DPB16501 DPA10301-DPB17501 DPA10301-DPB18001 DPA10401-DPB10101 DPA10401-DPB10201 DPA10401-DPB10202 DPA10401-DPB10402 DPA10401-DPB10501 DPA10401-DPB110501 DPA10401-DPB11301 DPA10401-DPB113301 DPA10401-DPB14901 DQA10101-DQB10501 DQA10102-DQB10501 DQA10102-DQB10502 DQA10102-DQB10503 DQA10103-DQB10501 DQA10104-DQB10501 DQA10105-DQB10501 DQA10505-DQB10402
KKHQKEPPFLWMGYELHPDK

SEQ ID NO: 4171 - protein, 21 aa, Human immunodeficiency virus 1
  source 1..21: note = HLAs: DRB1_1001 DPA10103-DPB10101 DPA10103-DPB10201 DPA10103-DPB10202 DPA10103-DPB10401 DPA10103-DPB10501 DPA10103-DPB112601 DPA10103-DPB11501 DPA10103-DPB11601 DPA10103-DPB11801 DPA10103-DPB11901 DPA10103-DPB12301 DPA10103-DPB13101 DPA10103-DPB13401 DPA10103-DPB13901 DPA10103-DPB14001 DPA10103-DPB14101 DPA10103-DPB14801 DPA10103-DPB15001 DPA10103-DPB15901 DPA10104-DPB10101 DPA10104-DPB11501 DPA10105-DPB10101 DPA10105-DPB10401 DPA10105-DPB11801 DPA10105-DPB15001 DPA10106-DPB10101 DPA10201-DPB10101 DPA10201-DPB10202 DPA10201-DPB110601 DPA10201-DPB11501 DPA10201-DPB11601 DPA10201-DPB11901 DPA10202-DPB10101 DPA10202-DPB10201 DPA10202-DPB10202 DPA10202-DPB10401 DPA10202-DPB110601 DPA10202-DPB11901 DPA10202-DPB13101 DPA10202-DPB16501 DPA10301-DPB10101 DPA10301-DPB10201 DPA10301-DPB10202 DPA10301-DPB10401 DPA10301-DPB10402 DPA10301-DPB110501 DPA10301-DPB110601 DPA10301-DPB11801 DPA10301-DPB12301 DPA10301-DPB13901 DPA10301-DPB14001 DPA10301-DPB14901 DPA10301-DPB15501 DPA10301-DPB16501; note = HLAs: DPA10301-DPB17501 DPA10301-DPB18001 DPA10401-DPB10101 DPA10401-DPB10201 DPA10401-DPB10202 DPA10401-DPB10402 DPA10401-DPB10501 DPA10401-DPB110501 DPA10401-DPB14901 DQA10101-DQB10501 DQA10102-DQB10501 DQA10102-DQB10502 DQA10102-DQB10503 DQA10103-DQB10501 DQA10104-DQB10501 DQA10105-DQB10501
KKHQKEPPFLWMGYELHPDKW

SEQ ID NO: 4172 - protein, 22 aa, Human immunodeficiency virus 1
  source 1..22: note = HLAs: DRB1_0101 DRB1_1001 DPA10103-DPB10101 DPA10103-DPB10201 DPA10103-DPB10202 DPA10103-DPB10401 DPA10103-DPB10501 DPA10103-DPB112601 DPA10103-DPB11501 DPA10103-DPB11601 DPA10103-DPB11801 DPA10103-DPB11901 DPA10103-DPB12301 DPA10103-DPB13101 DPA10103-DPB13401 DPA10103-DPB13901 DPA10103-DPB14001 DPA10103-DPB14101 DPA10103-DPB14801 DPA10103-DPB15001 DPA10103-DPB15901 DPA10104-DPB10101 DPA10104-DPB11501 DPA10105-DPB10101 DPA10105-DPB10401 DPA10105-DPB11801 DPA10105-DPB15001 DPA10106-DPB10101 DPA10201-DPB10101 DPA10201-DPB10202 DPA10201-DPB110601 DPA10201-DPB11501 DPA10201-DPB11601 DPA10201-DPB11901 DPA10202-DPB10101 DPA10202-DPB10201 DPA10202-DPB10202 DPA10202-DPB10401 DPA10202-DPB110601 DPA10202-DPB11901 DPA10202-DPB13101 DPA10202-DPB16501 DPA10301-DPB10101 DPA10301-DPB10201 DPA10301-DPB10202 DPA10301-DPB10401 DPA10301-DPB10402 DPA10301-DPB110501 DPA10301-DPB110601 DPA10301-DPB11801 DPA10301-DPB12301 DPA10301-DPB13901 DPA10301-DPB14001 DPA10301-DPB14901 DPA10301-DPB15501; note = HLAs: DPA10301-DPB16501 DPA10301-DPB17501 DPA10301-DPB18001 DPA10401-DPB10101 DPA10401-DPB10201 DPA10401-DPB10202 DPA10401-DPB10402 DPA10401-DPB10501 DPA10401-DPB110501 DPA10401-DPB14901 DQA10101-DQB10501 DQA10102-DQB10501 DQA10102-DQB10502 DQA10102-DQB10503 DQA10103-DQB10501 DQA10104-DQB10501 DQA10105-DQB10501
KKHQKEPPFLWMGYELHPDKWT

SEQ ID NO: 4173 - protein, 23 aa, Human immunodeficiency virus 1
  source 1..23: note = HLAs: DRB1_0101 DRB1_0405 DRB1_1001 DRB1_1501 DPA10103-DPB10101 DPA10103-DPB10201 DPA10103-DPB10202 DPA10103-DPB10401 DPA10103-DPB10501 DPA10103-DPB112601 DPA10103-DPB11501 DPA10103-DPB11601 DPA10103-DPB11801 DPA10103-DPB11901 DPA10103-DPB12301 DPA10103-DPB13101 DPA10103-DPB13401 DPA10103-DPB13901 DPA10103-DPB14001 DPA10103-DPB14101 DPA10103-DPB14801 DPA10103-DPB15001 DPA10103-DPB15901 DPA10104-DPB10101 DPA10104-DPB11501 DPA10105-DPB10101 DPA10105-DPB10401 DPA10105-DPB11801 DPA10105-DPB15001 DPA10106-DPB10101 DPA10201-DPB10101 DPA10201-DPB10202 DPA10201-DPB110601 DPA10201-DPB11501 DPA10201-DPB11601 DPA10201-DPB11901 DPA10201-DPB13401 DPA10202-DPB10101 DPA10202-DPB10201 DPA10202-DPB10202 DPA10202-DPB10401 DPA10202-DPB10501 DPA10202-DPB110601 DPA10202-DPB11901 DPA10202-DPB13101 DPA10202-DPB13801 DPA10202-DPB15501 DPA10202-DPB16501 DPA10301-DPB10101 DPA10301-DPB10201 DPA10301-DPB10202 DPA10301-DPB10401 DPA10301-DPB10402 DPA10301-DPB110501 DPA10301-DPB110601 DPA10301-DPB11301; note = HLAs: DPA10301-DPB11801 DPA10301-DPB12301 DPA10301-DPB13901 DPA10301-DPB14001 DPA10301-DPB14901 DPA10301-DPB15501 DPA10301-DPB16501 DPA10301-DPB17501 DPA10301-DPB18001 DPA10401-DPB10101 DPA10401-DPB10201 DPA10401-DPB10202 DPA10401-DPB10402 DPA10401-DPB10501 DPA10401-DPB110501 DPA10401-DPB14901 DQA10101-DQB10501 DQA10102-DQB10501 DQA10102-DQB10502 DQA10102-DQB10503 DQA10103-DQB10501 DQA10104-DQB10501 DQA10105-DQB10501
KKHQKEPPFLWMGYELHPDKWTV

SEQ ID NO: 4174 - protein, 24 aa, Human immunodeficiency virus 1
  source 1..24: note = HLAs: DRB1_0101 DRB1_0405 DRB1_1001 DRB1_1501 DPA10103-DPB10101 DPA10103-DPB10201 DPA10103-DPB10202 DPA10103-DPB10401 DPA10103-DPB10501 DPA10103-DPB112601 DPA10103-DPB11501 DPA10103-DPB11601 DPA10103-DPB11801 DPA10103-DPB11901 DPA10103-DPB12301 DPA10103-DPB13101 DPA10103-DPB13401 DPA10103-DPB13901 DPA10103-DPB14001 DPA10103-DPB14101 DPA10103-DPB14801 DPA10103-DPB15001 DPA10103-DPB15901 DPA10104-DPB10101 DPA10104-DPB11501 DPA10105-DPB10101 DPA10105-DPB10401 DPA10105-DPB11801 DPA10105-DPB15001 DPA10106-DPB10101 DPA10201-DPB10101 DPA10201-DPB10202 DPA10201-DPB110601 DPA10201-DPB11501 DPA10201-DPB11601 DPA10201-DPB11901 DPA10201-DPB13401 DPA10202-DPB10101 DPA10202-DPB10201 DPA10202-DPB10202 DPA10202-DPB10401 DPA10202-DPB10501 DPA10202-DPB110601 DPA10202-DPB11901 DPA10202-DPB13101 DPA10202-DPB13801 DPA10202-DPB15501 DPA10202-DPB16501 DPA10301-DPB10101 DPA10301-DPB10201 DPA10301-DPB10202 DPA10301-DPB10401 DPA10301-DPB10402 DPA10301-DPB110501 DPA10301-DPB110601 DPA10301-DPB11301; note = HLAs: DPA10301-DPB11801 DPA10301-DPB12301 DPA10301-DPB13901 DPA10301-DPB14001 DPA10301-DPB14901 DPA10301-DPB15501 DPA10301-DPB16501 DPA10301-DPB17501 DPA10301-DPB18001 DPA10401-DPB10101 DPA10401-DPB10201 DPA10401-DPB10202 DPA10401-DPB10402 DPA10401-DPB10501 DPA10401-DPB110501 DPA10401-DPB14901 DQA10101-DQB10501 DQA10102-DQB10501 DQA10102-DQB10502 DQA10102-DQB10503 DQA10103-DQB10501 DQA10104-DQB10501 DQA10105-DQB10501
KKHQKEPPFLWMGYELHPDKWTVQ

SEQ ID NO: 4175 - protein, 25 aa, Human immunodeficiency virus 1
  source 1..25: note = HLAs: DRB1_0101 DRB1_0405 DRB1_1001 DRB1_1501 DRB1_1602 DPA10103-DPB10101 DPA10103-DPB10201 DPA10103-DPB10202 DPA10103-DPB10401 DPA10103-DPB10501 DPA10103-DPB112601 DPA10103-DPB11501 DPA10103-DPB11601 DPA10103-DPB11801 DPA10103-DPB11901 DPA10103-DPB12301 DPA10103-DPB13101 DPA10103-DPB13401 DPA10103-DPB13901 DPA10103-DPB14001 DPA10103-DPB14101 DPA10103-DPB14801 DPA10103-DPB15001 DPA10103-DPB15901 DPA10104-DPB10101 DPA10104-DPB11501 DPA10105-DPB10101 DPA10105-DPB10401 DPA10105-DPB11801 DPA10105-DPB15001 DPA10106-DPB10101 DPA10201-DPB10101 DPA10201-DPB10202 DPA10201-DPB110601 DPA10201-DPB11501 DPA10201-DPB11601 DPA10201-DPB11901 DPA10201-DPB13401 DPA10202-DPB10101 DPA10202-DPB10201 DPA10202-DPB10202 DPA10202-DPB10401 DPA10202-DPB10501 DPA10202-DPB110601 DPA10202-DPB11901 DPA10202-DPB13101 DPA10202-DPB13801 DPA10202-DPB15501 DPA10202-DPB16501 DPA10301-DPB10101 DPA10301-DPB10201 DPA10301-DPB10202 DPA10301-DPB10401 DPA10301-DPB10402 DPA10301-DPB110501 DPA10301-DPB110601 DPA10301-DPB11301; note = HLAs: DPA10301-DPB11801 DPA10301-DPB12301 DPA10301-DPB13901 DPA10301-DPB14001 DPA10301-DPB14901 DPA10301-DPB15501 DPA10301-DPB16501 DPA10301-DPB17501 DPA10301-DPB18001 DPA10401-DPB10101 DPA10401-DPB10201 DPA10401-DPB10202 DPA10401-DPB10402 DPA10401-DPB10501 DPA10401-DPB110501 DPA10401-DPB14901 DQA10101-DQB10501 DQA10102-DQB10501 DQA10102-DQB10502 DQA10102-DQB10503 DQA10103-DQB10501 DQA10104-DQB10501 DQA10105-DQB10501
KKHQKEPPFLWMGYELHPDKWTVQP

SEQ ID NO: 4176 - protein, 14 aa, Human immunodeficiency virus 1
  source 1..14: note = HLAs: DRB1_1103 DRB1_1104 DRB1_1406 DQA10102-DQB10501 DQA10102-DQB10604 DQA10102-DQB10609
KKIIGQVRDQAEHL

SEQ ID NO: 4177 - protein, 15 aa, Human immunodeficiency virus 1
  source 1..15: note = HLAs: DRB1_0404 DRB1_0410 DRB1_0804 DRB1_0806 DRB1_1101 DRB1_1102 DRB1_1103 DRB1_1104 DRB1_1301 DRB1_1304 DRB1_1305 DRB1_1406 DQA10102-DQB10501 DQA10102-DQB10604 DQA10102-DQB10609
KKIIGQVRDQAEHLK

SEQ ID NO: 4178 - protein, 16 aa, Human immunodeficiency virus 1
  source 1..16: note = HLAs: DRB1_1103 DRB1_1104 DRB1_1304 DRB1_1406 DQA10102-DQB10501 DQA10102-DQB10503 DQA10102-DQB10604 DQA10102-DQB10609
KKIIGQVRDQAEHLKT

SEQ ID NO: 4179 - protein, 17 aa, Human immunodeficiency virus 1
  source 1..17: note = HLAs: DRB1_1103 DRB1_1104 DRB1_1304 DRB1_1406 DQA10102-DQB10501 DQA10102-DQB10604 DQA10102-DQB10609
KKIIGQVRDQAEHLKTA

SEQ ID NO: 4180 - protein, 19 aa, Human immunodeficiency virus 1
  source 1..19: note = HLAs: DRB1_1104 DRB1_1304 DRB1_1406 DQA10102-DQB10501 DQA10102-DQB10604 DQA10102-DQB10609
KKIIGQVRDQAEHLKTAVQ

SEQ ID NO: 4181 - protein, 20 aa, Human immunodeficiency virus 1
  source 1..20: note = HLAs: DRB1_0804 DRB1_0806 DRB1_1102 DRB1_1103 DRB1_1104 DRB1_1301 DRB1_1304 DRB1_1406 DQA10102-DQB10501 DQA10102-DQB10503 DQA10102-DQB10604 DQA10102-DQB10609
KKIIGQVRDQAEHLKTAVQM

SEQ ID NO: 4182 - protein, 21 aa, Human immunodeficiency virus 1
  source 1..21: note = HLAs: DRB1_1102 DRB1_1103 DRB1_1104 DRB1_1301 DRB1_1304 DRB1_1406 DQA10102-DQB10501 DQA10102-DQB10609
KKIIGQVRDQAEHLKTAVQMA

SEQ ID NO: 4183 - protein, 22 aa, Human immunodeficiency virus 1
  source 1..22: note = HLAs: DRB1_1001 DRB1_1102 DRB1_1103 DRB1_1104 DRB1_1301 DRB1_1304 DRB1_1406 DPA10301-DPB10101 DPA10401-DPB10101 DQA10102-DQB10501 DQA10102-DQB10604 DQA10102-DQB10609 DQA10103-DQB10501 DQA10103-DQB10609
KKIIGQVRDQAEHLKTAVQMAV

SEQ ID NO: 4184 - protein, 23 aa, Human immunodeficiency virus 1
  source 1..23: note = HLAs: DRB1_0101 DRB1_0410 DRB1_0806 DRB1_1001 DRB1_1102 DRB1_1103 DRB1_1104 DRB1_1301 DRB1_1304 DRB1_1406 DPA10301-DPB10101 DPA10301-DPB10201 DPA10301-DPB10202 DPA10301-DPB110601 DPA10301-DPB11801 DPA10301-DPB14001 DPA10401-DPB10101 DQA10102-DQB10501 DQA10102-DQB10604 DQA10102-DQB10609 DQA10103-DQB10501 DQA10103-DQB10609
KKIIGQVRDQAEHLKTAVQMAVF

SEQ ID NO: 4185 - protein, 24 aa, Human immunodeficiency virus 1
  source 1..24: note = HLAs: DRB1_0101 DRB1_0410 DRB1_0806 DRB1_1001 DRB1_1102 DRB1_1103 DRB1_1104 DRB1_1301 DRB1_1304 DRB1_1406 DPA10103-DPB11501 DPA10103-DPB15001 DPA10104-DPB11501 DPA10105-DPB15001 DPA10301-DPB10101 DPA10301-DPB10201 DPA10301-DPB10202 DPA10301-DPB110601 DPA10301-DPB11801 DPA10301-DPB14001 DPA10301-DPB16501 DPA10401-DPB10101 DQA10102-DQB10501 DQA10102-DQB10503 DQA10102-DQB10601 DQA10102-DQB10604 DQA10102-DQB10609 DQA10103-DQB10501 DQA10103-DQB10601 DQA10103-DQB10609
KKIIGQVRDQAEHLKTAVQMAVFI

SEQ ID NO: 4186 - protein, 25 aa, Human immunodeficiency virus 1
  source 1..25: note = HLAs: DRB1_0101 DRB1_0410 DRB1_0806 DRB1_1001 DRB1_1102 DRB1_1103 DRB1_1104 DRB1_1301 DRB1_1304 DRB1_1406 DPA10103-DPB10101 DPA10103-DPB11501 DPA10103-DPB15001 DPA10104-DPB10101 DPA10104-DPB11501 DPA10105-DPB10101 DPA10105-DPB15001 DPA10202-DPB10101 DPA10301-DPB10101 DPA10301-DPB10201 DPA10301-DPB10202 DPA10301-DPB10401 DPA10301-DPB110601 DPA10301-DPB11801 DPA10301-DPB12301 DPA10301-DPB13901 DPA10301-DPB14001 DPA10301-DPB16501 DPA10401-DPB10101 DPA10401-DPB10501 DQA10102-DQB10501 DQA10102-DQB10503 DQA10102-DQB10601 DQA10102-DQB10604 DQA10102-DQB10609 DQA10103-DQB10501 DQA10103-DQB10601 DQA10103-DQB10609
KKIIGQVRDQAEHLKTAVQMAVFIH

SEQ ID NO: 4187 - protein, 15 aa, Human immunodeficiency virus 1
  source 1..15: note = HLAs: DRB1_1103 DRB1_1304
KKKDSTKWRKLVDFR

SEQ ID NO: 4188 - protein, 17 aa, Human immunodeficiency virus 1
  source 1..17: note = HLAs: DRB1_0405 DRB1_0410 DRB1_1304 DPA10103-DPB10101 DPA10103-DPB10201 DPA10103-DPB10202 DPA10103-DPB11501 DPA10103-DPB11601 DPA10103-DPB11901 DPA10103-DPB13101 DPA10103-DPB13401 DPA10103-DPB14801 DPA10104-DPB10101 DPA10104-DPB11501 DPA10105-DPB10101 DPA10201-DPB110601 DPA10201-DPB11501 DPA10201-DPB11601 DPA10201-DPB11901 DPA10202-DPB10101 DPA10202-DPB110601 DPA10202-DPB11901 DPA10202-DPB13101 DPA10202-DPB16501 DPA10301-DPB10101 DPA10301-DPB10201 DPA10301-DPB10202 DPA10301-DPB10401 DPA10301-DPB110601 DPA10301-DPB11801 DPA10301-DPB12301 DPA10301-DPB13901 DPA10301-DPB14001 DPA10301-DPB16501 DPA10401-DPB10101 DPA10401-DPB10201 DPA10401-DPB10202 DPA10401-DPB10501
KKKDSTKWRKLVDFREL

SEQ ID NO: 4189 - protein, 18 aa, Human immunodeficiency virus 1
  source 1..18: note = HLAs: DPA10103-DPB11501 DPA10103-DPB11601 DPA10103-DPB11901 DPA10103-DPB13101 DPA10104-DPB11501 DPA10202-DPB10101 DPA10202-DPB110601 DPA10202-DPB11901 DPA10202-DPB13101 DPA10301-DPB10101 DPA10301-DPB10201 DPA10301-DPB10202 DPA10301-DPB110601 DPA10301-DPB14001 DPA10301-DPB16501 DPA10401-DPB10101
KKKDSTKWRKLVDFRELN

SEQ ID NO: 4190 - protein, 19 aa, Human immunodeficiency virus 1
  source 1..19: note = HLAs: DRB1_0405 DRB1_0410 DRB1_1001 DRB1_1304 DPA10103-DPB10101 DPA10103-DPB10201 DPA10103-DPB10202 DPA10103-DPB10501 DPA10103-DPB11501 DPA10103-DPB11601 DPA10103-DPB11901 DPA10103-DPB13101 DPA10103-DPB13401 DPA10103-DPB14101 DPA10103-DPB14801 DPA10103-DPB15001 DPA10104-DPB10101 DPA10104-DPB11501 DPA10105-DPB10101 DPA10105-DPB15001 DPA10106-DPB10101 DPA10201-DPB10101 DPA10201-DPB110601 DPA10201-DPB11501 DPA10201-DPB11601 DPA10201-DPB11901 DPA10202-DPB10101 DPA10202-DPB10501 DPA10202-DPB110601 DPA10202-DPB11901 DPA10202-DPB13101 DPA10202-DPB13801 DPA10202-DPB16501 DPA10301-DPB10101 DPA10301-DPB10201 DPA10301-DPB10202 DPA10301-DPB10401 DPA10301-DPB110601 DPA10301-DPB11801 DPA10301-DPB12301 DPA10301-DPB13901 DPA10301-DPB14001 DPA10301-DPB15501 DPA10301-DPB16501 DPA10401-DPB10101 DPA10401-DPB10201 DPA10401-DPB10202 DPA10401-DPB10501
KKKDSTKWRKLVDFRELNK

SEQ ID NO: 4191 - protein, 20 aa, Human immunodeficiency virus 1
  source 1..20: note = HLAs: DRB1_0405 DRB1_0410 DRB1_0801 DRB1_0806 DRB1_1001 DRB1_1103 DRB1_1304 DPA10103-DPB10101 DPA10103-DPB10201 DPA10103-DPB10202 DPA10103-DPB10501 DPA10103-DPB10601 DPA10103-DPB11101 DPA10103-DPB11501 DPA10103-DPB11601 DPA10103-DPB11801 DPA10103-DPB11901 DPA10103-DPB13101 DPA10103-DPB13401 DPA10103-DPB14001 DPA10103-DPB14101 DPA10103-DPB14801 DPA10103-DPB15001 DPA10103-DPB15501 DPA10103-DPB15901 DPA10104-DPB10101 DPA10104-DPB11501 DPA10105-DPB10101 DPA10105-DPB11801 DPA10105-DPB15001 DPA10106-DPB10101 DPA10201-DPB10101 DPA10201-DPB10501 DPA10201-DPB110601 DPA10201-DPB11501 DPA10201-DPB11601 DPA10201-DPB11901 DPA10201-DPB13401 DPA10202-DPB10101 DPA10202-DPB10201 DPA10202-DPB10202 DPA10202-DPB10501 DPA10202-DPB110601 DPA10202-DPB11101 DPA10202-DPB11801 DPA10202-DPB11901 DPA10202-DPB13101 DPA10202-DPB13801 DPA10202-DPB15501 DPA10202-DPB16501 DPA10301-DPB10101 DPA10301-DPB10201 DPA10301-DPB10202 DPA10301-DPB10401 DPA10301-DPB10402 DPA10301-DPB110501 DPA10301-DPB110601 DPA10301-DPB11101; note = HLAs: DPA10301-DPB11801 DPA10301-DPB12301 DPA10301-DPB13901 DPA10301-DPB14001 DPA10301-DPB14901 DPA10301-DPB15501 DPA10301-DPB16501 DPA10301-DPB18001 DPA10401-DPB10101 DPA10401-DPB10201 DPA10401-DPB10202 DPA10401-DPB10501 DQA10102-DQB10501
KKKDSTKWRKLVDFRELNKR

SEQ ID NO: 4192 - protein, 21 aa, Human immunodeficiency virus 1
  source 1..21: note = HLAs: DRB1_0405 DRB1_0410 DRB1_0806 DRB1_1001 DRB1_1103 DRB1_1304 DPA10103-DPB10101 DPA10103-DPB10201 DPA10103-DPB10202 DPA10103-DPB10501 DPA10103-DPB11501 DPA10103-DPB11601 DPA10103-DPB11901 DPA10103-DPB13101 DPA10103-DPB13401 DPA10103-DPB14001 DPA10103-DPB14101 DPA10103-DPB14801 DPA10103-DPB15001 DPA10104-DPB10101 DPA10104-DPB11501 DPA10105-DPB10101 DPA10105-DPB15001 DPA10106-DPB10101 DPA10201-DPB10101 DPA10201-DPB10501 DPA10201-DPB110601 DPA10201-DPB11501 DPA10201-DPB11601 DPA10201-DPB11901 DPA10202-DPB10101 DPA10202-DPB10202 DPA10202-DPB10501 DPA10202-DPB110601 DPA10202-DPB11901 DPA10202-DPB13101 DPA10202-DPB13801 DPA10202-DPB16501 DPA10301-DPB10101 DPA10301-DPB10201 DPA10301-DPB10202 DPA10301-DPB10401 DPA10301-DPB10402 DPA10301-DPB110501 DPA10301-DPB110601 DPA10301-DPB11801 DPA10301-DPB12301 DPA10301-DPB13901 DPA10301-DPB14001 DPA10301-DPB14901 DPA10301-DPB15501 DPA10301-DPB16501 DPA10301-DPB18001 DPA10401-DPB10101 DPA10401-DPB10201 DPA10401-DPB10202 DPA10401-DPB10501
KKKDSTKWRKLVDFRELNKRT

SEQ ID NO: 4193 - protein, 22 aa, Human immunodeficiency virus 1
  source 1..22: note = HLAs: DRB1_0405 DRB1_0410 DRB1_0801 DRB1_0806 DRB1_1001 DRB1_1101 DRB1_1102 DRB1_1103 DRB1_1104 DRB1_1301 DRB1_1304 DRB1_1305 DPA10103-DPB10101 DPA10103-DPB10201 DPA10103-DPB10202 DPA10103-DPB10501 DPA10103-DPB11501 DPA10103-DPB11601 DPA10103-DPB11901 DPA10103-DPB13101 DPA10103-DPB13401 DPA10103-DPB14001 DPA10103-DPB14101 DPA10103-DPB14801 DPA10103-DPB15001 DPA10104-DPB10101 DPA10104-DPB11501 DPA10105-DPB10101 DPA10105-DPB15001 DPA10106-DPB10101 DPA10201-DPB10101 DPA10201-DPB10501 DPA10201-DPB110601 DPA10201-DPB11501 DPA10201-DPB11601 DPA10201-DPB11901 DPA10202-DPB10101 DPA10202-DPB10202 DPA10202-DPB10501 DPA10202-DPB110601 DPA10202-DPB11901 DPA10202-DPB13101 DPA10202-DPB13801 DPA10202-DPB16501 DPA10301-DPB10101 DPA10301-DPB10201 DPA10301-DPB10202 DPA10301-DPB10401 DPA10301-DPB10402 DPA10301-DPB110501 DPA10301-DPB110601 DPA10301-DPB11801 DPA10301-DPB12301 DPA10301-DPB13901 DPA10301-DPB14001 DPA10301-DPB14901 DPA10301-DPB15501 DPA10301-DPB16501 DPA10301-DPB18001 DPA10401-DPB10101; note = HLAs: DPA10401-DPB10201 DPA10401-DPB10202 DPA10401-DPB10501
KKKDSTKWRKLVDFRELNKRTQ

SEQ ID NO: 4194 - protein, 23 aa, Human immunodeficiency virus 1
  source 1..23: note = HLAs: DRB1_0405 DRB1_0410 DRB1_0801 DRB1_0806 DRB1_1001 DRB1_1101 DRB1_1103 DRB1_1104 DRB1_1304 DRB1_1305 DPA10103-DPB10101 DPA10103-DPB10201 DPA10103-DPB10202 DPA10103-DPB10501 DPA10103-DPB11501 DPA10103-DPB11601 DPA10103-DPB11901 DPA10103-DPB13101 DPA10103-DPB13401 DPA10103-DPB14001 DPA10103-DPB14101 DPA10103-DPB14801 DPA10103-DPB15001 DPA10104-DPB10101 DPA10104-DPB11501 DPA10105-DPB10101 DPA10105-DPB15001 DPA10106-DPB10101 DPA10201-DPB10101 DPA10201-DPB10501 DPA10201-DPB110601 DPA10201-DPB11501 DPA10201-DPB11601 DPA10201-DPB11901 DPA10202-DPB10101 DPA10202-DPB10201 DPA10202-DPB10202 DPA10202-DPB10501 DPA10202-DPB110601 DPA10202-DPB11901 DPA10202-DPB13101 DPA10202-DPB13801 DPA10202-DPB16501 DPA10301-DPB10101 DPA10301-DPB10201 DPA10301-DPB10202 DPA10301-DPB10401 DPA10301-DPB10402 DPA10301-DPB110501 DPA10301-DPB110601 DPA10301-DPB11801 DPA10301-DPB12301 DPA10301-DPB13901 DPA10301-DPB14001 DPA10301-DPB14901 DPA10301-DPB15501 DPA10301-DPB16501 DPA10301-DPB18001 DPA10401-DPB10101; note = HLAs: DPA10401-DPB10201 DPA10401-DPB10202 DPA10401-DPB10501
KKKDSTKWRKLVDFRELNKRTQD

SEQ ID NO: 4195 - protein, 24 aa, Human immunodeficiency virus 1
  source 1..24: note = HLAs: DRB1_0405 DRB1_0410 DRB1_0801 DRB1_0806 DRB1_1001 DRB1_1101 DRB1_1102 DRB1_1103 DRB1_1104 DRB1_1301 DRB1_1304 DRB1_1305 DPA10103-DPB10101 DPA10103-DPB10201 DPA10103-DPB10202 DPA10103-DPB10501 DPA10103-DPB11501 DPA10103-DPB11601 DPA10103-DPB11801 DPA10103-DPB11901 DPA10103-DPB13101 DPA10103-DPB13401 DPA10103-DPB14001 DPA10103-DPB14101 DPA10103-DPB14801 DPA10103-DPB15001 DPA10104-DPB10101 DPA10104-DPB11501 DPA10105-DPB10101 DPA10105-DPB11801 DPA10105-DPB15001 DPA10106-DPB10101 DPA10201-DPB10101 DPA10201-DPB10501 DPA10201-DPB110601 DPA10201-DPB11501 DPA10201-DPB11601 DPA10201-DPB11901 DPA10202-DPB10101 DPA10202-DPB10201 DPA10202-DPB10202 DPA10202-DPB10501 DPA10202-DPB110601 DPA10202-DPB11901 DPA10202-DPB13101 DPA10202-DPB13801 DPA10202-DPB16501 DPA10301-DPB10101 DPA10301-DPB10201 DPA10301-DPB10202 DPA10301-DPB10401 DPA10301-DPB10402 DPA10301-DPB110501 DPA10301-DPB110601 DPA10301-DPB11801 DPA10301-DPB12301 DPA10301-DPB13901 DPA10301-DPB14001 DPA10301-DPB14901 DPA10301-DPB15501; note = HLAs: DPA10301-DPB16501 DPA10301-DPB18001 DPA10401-DPB10101 DPA10401-DPB10201 DPA10401-DPB10202 DPA10401-DPB10501
KKKDSTKWRKLVDFRELNKRTQDF

SEQ ID NO: 4196 - protein, 25 aa, Human immunodeficiency virus 1
  source 1..25: note = HLAs: DRB1_0405 DRB1_0410 DRB1_0801 DRB1_0804 DRB1_0806 DRB1_1001 DRB1_1101 DRB1_1102 DRB1_1103 DRB1_1104 DRB1_1301 DRB1_1304 DRB1_1305 DPA10103-DPB10101 DPA10103-DPB10201 DPA10103-DPB10202 DPA10103-DPB10501 DPA10103-DPB11501 DPA10103-DPB11601 DPA10103-DPB11801 DPA10103-DPB11901 DPA10103-DPB13101 DPA10103-DPB13401 DPA10103-DPB14001 DPA10103-DPB14101 DPA10103-DPB14801 DPA10103-DPB15001 DPA10104-DPB10101 DPA10104-DPB11501 DPA10105-DPB10101 DPA10105-DPB11801 DPA10105-DPB15001 DPA10106-DPB10101 DPA10201-DPB10101 DPA10201-DPB10501 DPA10201-DPB110601 DPA10201-DPB11501 DPA10201-DPB11601 DPA10201-DPB11901 DPA10202-DPB10101 DPA10202-DPB10201 DPA10202-DPB10202 DPA10202-DPB10501 DPA10202-DPB110601 DPA10202-DPB11901 DPA10202-DPB13101 DPA10202-DPB13801 DPA10202-DPB16501 DPA10301-DPB10101 DPA10301-DPB10201 DPA10301-DPB10202 DPA10301-DPB10401 DPA10301-DPB10402 DPA10301-DPB110501 DPA10301-DPB110601 DPA10301-DPB11801 DPA10301-DPB12301 DPA10301-DPB13901 DPA10301-DPB14001 DPA10301-DPB14901; note = HLAs: DPA10301-DPB15501 DPA10301-DPB16501 DPA10301-DPB18001 DPA10401-DPB10101 DPA10401-DPB10201 DPA10401-DPB10202 DPA10401-DPB10501
KKKDSTKWRKLVDFRELNKRTQDFW

SEQ ID NO: 4197 - protein, 14 aa, Human immunodeficiency virus 1
  source 1..14: note = HLAs: DPA10301-DPB10101 DPA10401-DPB10101
KKKKSVTVLDVGDA

SEQ ID NO: 4198 - protein, 15 aa, Human immunodeficiency virus 1
  source 1..15: note = HLAs: DRB1_0101 DRB1_0404 DRB1_0410 DRB1_1001 DPA10103-DPB11501 DPA10103-DPB15001 DPA10104-DPB11501 DPA10105-DPB15001 DPA10301-DPB10101 DPA10301-DPB10201 DPA10301-DPB10202 DPA10301-DPB110601 DPA10301-DPB11801 DPA10401-DPB10101 DQA10102-DQB10501 DQA10102-DQB10609
KKKKSVTVLDVGDAY

SEQ ID NO: 4199 - protein, 16 aa, Human immunodeficiency virus 1
  source 1..16: note = HLAs: DRB1_0404 DRB1_1001 DPA10103-DPB11501 DPA10103-DPB15001 DPA10104-DPB11501 DPA10105-DPB15001 DPA10202-DPB10101 DPA10301-DPB10101 DPA10301-DPB10201 DPA10301-DPB10202 DPA10301-DPB110601 DPA10301-DPB11801 DPA10301-DPB16501 DPA10401-DPB10101 DQA10102-DQB10501 DQA10102-DQB10503 DQA10102-DQB10604 DQA10102-DQB10609 DQA10103-DQB10501 DQA10103-DQB10604 DQA10103-DQB10609 DQA10501-DQB10201 DQA10505-DQB10201 DQA10505-DQB10202
KKKKSVTVLDVGDAYF

SEQ ID NO: 4200 - protein, 17 aa, Human immunodeficiency virus 1
  source 1..17: note = HLAs: DRB1_0101 DRB1_0404 DRB1_0410 DRB1_1001 DPA10103-DPB11501 DPA10103-DPB15001 DPA10104-DPB11501 DPA10105-DPB15001 DPA10202-DPB10101 DPA10301-DPB10101 DPA10301-DPB10201 DPA10301-DPB10202 DPA10301-DPB110601 DPA10301-DPB11801 DPA10301-DPB16501 DPA10401-DPB10101 DQA10102-DQB10501 DQA10102-DQB10503 DQA10102-DQB10604 DQA10102-DQB10609 DQA10103-DQB10501 DQA10103-DQB10609 DQA10501-DQB10201 DQA10505-DQB10201 DQA10505-DQB10202
KKKKSVTVLDVGDAYFS

SEQ ID NO: 4201 - protein, 18 aa, Human immunodeficiency virus 1
  source 1..18: note = HLAs: DPA10301-DPB10101 DPA10401-DPB10101 DQA10102-DQB10501 DQA10102-DQB10604 DQA10102-DQB10609
KKKKSVTVLDVGDAYFSV

SEQ ID NO: 4202 - protein, 19 aa, Human immunodeficiency virus 1
  source 1..19: note = HLAs: DRB1_0404 DRB1_1001 DPA10103-DPB10101 DPA10103-DPB11501 DPA10103-DPB15001 DPA10104-DPB10101 DPA10104-DPB11501 DPA10105-DPB10101 DPA10105-DPB15001 DPA10202-DPB10101 DPA10301-DPB10101 DPA10301-DPB10201 DPA10301-DPB10202 DPA10301-DPB10401 DPA10301-DPB110601 DPA10301-DPB11801 DPA10301-DPB12301 DPA10301-DPB13901 DPA10301-DPB14001 DPA10301-DPB16501 DPA10401-DPB10101 DQA10102-DQB10501 DQA10102-DQB10503 DQA10102-DQB10604 DQA10102-DQB10609 DQA10103-DQB10501 DQA10103-DQB10609 DQA10501-DQB10201 DQA10505-DQB10201 DQA10505-DQB10202
KKKKSVTVLDVGDAYFSVP

SEQ ID NO: 4203 - protein, 20 aa, Human immunodeficiency virus 1
  source 1..20: note = HLAs: DRB1_0101 DRB1_0301 DRB1_0404 DRB1_0410 DRB1_1001 DPA10103-DPB10101 DPA10103-DPB11501 DPA10103-DPB11901 DPA10103-DPB13101 DPA10103-DPB15001 DPA10104-DPB10101 DPA10104-DPB11501 DPA10105-DPB10101 DPA10105-DPB15001 DPA10202-DPB10101 DPA10202-DPB110601 DPA10202-DPB11901 DPA10301-DPB10101 DPA10301-DPB10201 DPA10301-DPB10202 DPA10301-DPB10401 DPA10301-DPB110601 DPA10301-DPB11801 DPA10301-DPB12301 DPA10301-DPB13901 DPA10301-DPB14001 DPA10301-DPB15501 DPA10301-DPB16501 DPA10401-DPB10101 DPA10401-DPB10201 DPA10401-DPB10202 DPA10401-DPB10301 DPA10401-DPB10501 DPA10401-DPB11401 DQA10101-DQB10501 DQA10102-DQB10501 DQA10102-DQB10503 DQA10102-DQB10604 DQA10102-DQB10609 DQA10103-DQB10501 DQA10103-DQB10609 DQA10104-DQB10501 DQA10105-DQB10501 DQA10501-DQB10201 DQA10505-DQB10201 DQA10505-DQB10202
KKKKSVTVLDVGDAYFSVPL

SEQ ID NO: 4204 - protein, 21 aa, Human immunodeficiency virus 1
  source 1..21: note = HLAs: DRB1_0101 DRB1_0404 DRB1_0410 DRB1_1001 DPA10103-DPB10101 DPA10103-DPB11501 DPA10103-DPB15001 DPA10104-DPB10101 DPA10104-DPB11501 DPA10105-DPB10101 DPA10105-DPB15001 DPA10202-DPB10101 DPA10301-DPB10101 DPA10301-DPB10201 DPA10301-DPB10202 DPA10301-DPB10401 DPA10301-DPB110601 DPA10301-DPB11801 DPA10301-DPB12301 DPA10301-DPB13901 DPA10301-DPB14001 DPA10301-DPB16501 DPA10401-DPB10101 DQA10102-DQB10501 DQA10102-DQB10503 DQA10102-DQB10604 DQA10102-DQB10609 DQA10103-DQB10501 DQA10103-DQB10609
KKKKSVTVLDVGDAYFSVPLD

SEQ ID NO: 4205 - protein, 15 aa, Human immunodeficiency virus 1
  source 1..15: note = HLAs: DRB1_0101 DRB1_0102 DRB1_0301 DRB1_0404 DRB1_0408 DRB1_0410 DRB1_1001 DPA10301-DPB10101 DPA10301-DPB11801 DPA10401-DPB10101 DQA10102-DQB10501 DQA10102-DQB10503 DQA10102-DQB10604 DQA10102-DQB10609 DQA10103-DQB10501 DQA10103-DQB10604 DQA10103-DQB10609 DQA10501-DQB10201 DQA10505-DQB10201 DQA10505-DQB10202
KKKSVTVLDVGDAYF

SEQ ID NO: 4206 - protein, 16 aa, Human immunodeficiency virus 1
  source 1..16: note = HLAs: DRB1_0404 DRB1_1001 DPA10301-DPB10101 DPA10401-DPB10101 DQA10102-DQB10501 DQA10102-DQB10503 DQA10102-DQB10604 DQA10102-DQB10609 DQA10103-DQB10501 DQA10103-DQB10604 DQA10103-DQB10609 DQA10201-DQB10301 DQA10201-DQB10303 DQA10501-DQB10201 DQA10505-DQB10201 DQA10505-DQB10202
KKKSVTVLDVGDAYFS

SEQ ID NO: 4207 - protein, 17 aa, Human immunodeficiency virus 1
  source 1..17: note = HLAs: DRB1_0101 DRB1_0301 DRB1_0404 DRB1_0410 DRB1_1001 DPA10103-DPB11501 DPA10104-DPB11501 DPA10301-DPB10101 DPA10301-DPB10202 DPA10301-DPB11801 DPA10301-DPB16501 DPA10401-DPB10101 DQA10102-DQB10501 DQA10102-DQB10503 DQA10102-DQB10604 DQA10102-DQB10609 DQA10103-DQB10501 DQA10103-DQB10609 DQA10201-DQB10301 DQA10501-DQB10201 DQA10505-DQB10201 DQA10505-DQB10202
KKKSVTVLDVGDAYFSV

SEQ ID NO: 4208 - protein, 18 aa, Human immunodeficiency virus 1
  source 1..18: note = HLAs: DPA10301-DPB10101 DQA10102-DQB10501 DQA10102-DQB10604 DQA10102-DQB10609 DQA10501-DQB10201 DQA10505-DQB10201 DQA10505-DQB10202
KKKSVTVLDVGDAYFSVP

SEQ ID NO: 4209 - protein, 19 aa, Human immunodeficiency virus 1
  source 1..19: note = HLAs: DRB1_0404 DRB1_1001 DPA10103-DPB10101 DPA10103-DPB11501 DPA10104-DPB10101 DPA10104-DPB11501 DPA10105-DPB10101 DPA10301-DPB10101 DPA10301-DPB10201 DPA10301-DPB10202 DPA10301-DPB10401 DPA10301-DPB110601 DPA10301-DPB11801 DPA10301-DPB12301 DPA10301-DPB13901 DPA10301-DPB14001 DPA10301-DPB16501 DPA10401-DPB10101 DQA10102-DQB10501 DQA10102-DQB10503 DQA10102-DQB10604 DQA10102-DQB10609 DQA10103-DQB10501 DQA10103-DQB10609 DQA10501-DQB10201 DQA10505-DQB10201 DQA10505-DQB10202
KKKSVTVLDVGDAYFSVPL

SEQ ID NO: 4210 - protein, 20 aa, Human immunodeficiency virus 1
  source 1..20: note = HLAs: DRB1_0101 DRB1_0301 DRB1_0404 DRB1_0410 DRB1_1001 DPA10103-DPB10101 DPA10103-DPB11501 DPA10103-DPB15001 DPA10104-DPB10101 DPA10104-DPB11501 DPA10105-DPB10101 DPA10105-DPB15001 DPA10202-DPB10101 DPA10301-DPB10101 DPA10301-DPB10201 DPA10301-DPB10202 DPA10301-DPB10401 DPA10301-DPB110601 DPA10301-DPB11801 DPA10301-DPB12301 DPA10301-DPB13901 DPA10301-DPB14001 DPA10301-DPB16501 DPA10401-DPB10101 DPA10401-DPB10201 DPA10401-DPB10202 DPA10401-DPB10501 DQA10101-DQB10501 DQA10102-DQB10501 DQA10102-DQB10502 DQA10102-DQB10503 DQA10102-DQB10604 DQA10102-DQB10609 DQA10103-DQB10501 DQA10103-DQB10609 DQA10104-DQB10501 DQA10105-DQB10501 DQA10501-DQB10201 DQA10505-DQB10201 DQA10505-DQB10202
KKKSVTVLDVGDAYFSVPLD

SEQ ID NO: 4211 - protein, 14 aa, Human immunodeficiency virus 1
  source 1..14: note = HLAs: DRB1_0404 DRB1_1001 DQA10102-DQB10501 DQA10102-DQB10604 DQA10102-DQB10609 DQA10501-DQB10201 DQA10505-DQB10201 DQA10505-DQB10202
KKSVTVLDVGDAYF

SEQ ID NO: 4212 - protein, 15 aa, Human immunodeficiency virus 1
  source 1..15: note = HLAs: DRB1_0101 DRB1_0102 DRB1_0301 DRB1_0404 DRB1_0408 DRB1_0410 DRB1_1001 DPA10301-DPB10101 DQA10102-DQB10501 DQA10102-DQB10503 DQA10102-DQB10604 DQA10102-DQB10609 DQA10103-DQB10501 DQA10103-DQB10609 DQA10201-DQB10301 DQA10201-DQB10303 DQA10501-DQB10201 DQA10505-DQB10201 DQA10505-DQB10202
KKSVTVLDVGDAYFS

SEQ ID NO: 4213 - protein, 16 aa, Human immunodeficiency virus 1
  source 1..16: note = HLAs: DRB1_0101 DRB1_0301 DRB1_0404 DRB1_1001 DPA10301-DPB10101 DPA10401-DPB10101 DQA10102-DQB10501 DQA10102-DQB10503 DQA10102-DQB10604 DQA10102-DQB10609 DQA10103-DQB10501 DQA10103-DQB10609 DQA10201-DQB10301 DQA10501-DQB10201 DQA10505-DQB10201 DQA10505-DQB10202
KKSVTVLDVGDAYFSV

SEQ ID NO: 4214 - protein, 17 aa, Human immunodeficiency virus 1
  source 1..17: note = HLAs: DRB1_0101 DRB1_0301 DRB1_0404 DRB1_1001 DPA10301-DPB10101 DPA10401-DPB10101 DQA10102-DQB10501 DQA10102-DQB10503 DQA10102-DQB10604 DQA10102-DQB10609 DQA10103-DQB10501 DQA10103-DQB10609 DQA10201-DQB10301 DQA10501-DQB10201 DQA10505-DQB10201 DQA10505-DQB10202
KKSVTVLDVGDAYFSVP

SEQ ID NO: 4215 - protein, 18 aa, Human immunodeficiency virus 1
  source 1..18: note = HLAs: DQA10102-DQB10501 DQA10102-DQB10609 DQA10501-DQB10201 DQA10505-DQB10201 DQA10505-DQB10202
KKSVTVLDVGDAYFSVPL

SEQ ID NO: 4216 - protein, 19 aa, Human immunodeficiency virus 1
  source 1..19: note = HLAs: DRB1_1001 DPA10301-DPB10101 DPA10301-DPB10202 DPA10401-DPB10101 DQA10101-DQB10501 DQA10102-DQB10501 DQA10102-DQB10502 DQA10102-DQB10503 DQA10102-DQB10604 DQA10102-DQB10609 DQA10103-DQB10501 DQA10103-DQB10609 DQA10104-DQB10501 DQA10105-DQB10501 DQA10501-DQB10201 DQA10505-DQB10201 DQA10505-DQB10202
KKSVTVLDVGDAYFSVPLD

SEQ ID NO: 4217 - protein, 24 aa, Human immunodeficiency virus 1
  source 1..24: note = HLAs: DPA10301-DPB10101
KLKPGMDGPKVKQWPLTEEKIKAL

SEQ ID NO: 4218 - protein, 13 aa, Human immunodeficiency virus 1
  source 1..13: note = HLAs: DRB1_0101 DRB1_0701 DRB1_0901 DRB1_1001
KLLWKGEGAVVIQ

SEQ ID NO: 4219 - protein, 14 aa, Human immunodeficiency virus 1
  source 1..14: note = HLAs: DRB1_0101 DRB1_0102 DRB1_0701 DRB1_0901 DRB1_1001 DRB1_1114 DRB1_1302 DPA10301-DPB10101 DPA10301-DPB10201 DPA10301-DPB10202 DQA10102-DQB10501 DQA10102-DQB10609 DQA10201-DQB10301 DQA10401-DQB10301 DQA10401-DQB10319 DQA10501-DQB10301 DQA10501-DQB10319 DQA10503-DQB10301 DQA10505-DQB10301 DQA10505-DQB10309 DQA10505-DQB10319 DQA10508-DQB10301 DQA10509-DQB10301 DQA10601-DQB10301
KLLWKGEGAVVIQD

SEQ ID NO: 4220 - protein, 15 aa, Human immunodeficiency virus 1
  source 1..15: note = HLAs: DRB1_0101 DRB1_0102 DRB1_0103 DRB1_0701 DRB1_0813 DRB1_0901 DRB1_1001 DRB1_1114 DRB1_1302 DRB1_1304 DRB1_1602 DPA10301-DPB10101 DPA10301-DPB10201 DPA10301-DPB10202 DPA10401-DPB10101 DQA10102-DQB10501 DQA10102-DQB10601 DQA10102-DQB10609 DQA10102-DQB10611 DQA10103-DQB10601 DQA10103-DQB10609 DQA10201-DQB10301 DQA10201-DQB10303 DQA10301-DQB10301 DQA10301-DQB10304 DQA10302-DQB10301 DQA10302-DQB10304 DQA10303-DQB10301 DQA10303-DQB10304 DQA10401-DQB10301 DQA10401-DQB10319 DQA10501-DQB10301 DQA10501-DQB10319 DQA10503-DQB10301 DQA10505-DQB10301 DQA10505-DQB10302 DQA10505-DQB10309 DQA10505-DQB10319 DQA10506-DQB10303 DQA10508-DQB10301 DQA10509-DQB10301 DQA10601-DQB10301
KLLWKGEGAVVIQDN

SEQ ID NO: 4221 - protein, 16 aa, Human immunodeficiency virus 1
  source 1..16: note = HLAs: DRB1_0101 DRB1_0102 DRB1_0701 DRB1_0901 DRB1_1001 DRB1_1114 DRB1_1302 DRB1_1602 DPA10301-DPB10101 DPA10301-DPB10201 DPA10301-DPB10202 DPA10401-DPB10101 DQA10102-DQB10501 DQA10102-DQB10601 DQA10102-DQB10602 DQA10102-DQB10609 DQA10102-DQB10611 DQA10103-DQB10501 DQA10103-DQB10601 DQA10201-DQB10301 DQA10201-DQB10303 DQA10301-DQB10301 DQA10301-DQB10304 DQA10302-DQB10301 DQA10302-DQB10304 DQA10303-DQB10301 DQA10303-DQB10304 DQA10401-DQB10301 DQA10401-DQB10319 DQA10501-DQB10301 DQA10501-DQB10319 DQA10503-DQB10301 DQA10505-DQB10301 DQA10505-DQB10302 DQA10505-DQB10309 DQA10505-DQB10319 DQA10506-DQB10303 DQA10508-DQB10301 DQA10509-DQB10301 DQA10601-DQB10301
KLLWKGEGAVVIQDNS

SEQ ID NO: 4222 - protein, 13 aa, Human immunodeficiency virus 1
  source 1..13: note = HLAs: DPA10301-DPB10201 DQA10101-DQB10601 DQA10102-DQB10601 DQA10102-DQB10602 DQA10102-DQB10609 DQA10102-DQB10610 DQA10102-DQB10611 DQA10103-DQB10601 DQA10103-DQB10602 DQA10103-DQB10609 DQA10201-DQB10301
KLNWASQIYPGIK

SEQ ID NO: 4223 - protein, 14 aa, Human immunodeficiency virus 1
  source 1..14: note = HLAs: DRB1_1001 DRB1_1501 DPA10103-DPB10201 DPA10103-DPB10202 DPA10103-DPB11501 DPA10103-DPB14801 DPA10104-DPB11501 DPA10202-DPB10101 DPA10301-DPB10101 DPA10301-DPB10201 DPA10301-DPB10202 DPA10301-DPB10401 DPA10301-DPB11801 DPA10301-DPB12301 DPA10301-DPB13901 DPA10301-DPB14001 DPA10401-DPB10101 DPA10401-DPB10201 DPA10401-DPB10202 DQA10101-DQB10601 DQA10101-DQB10602 DQA10102-DQB10501 DQA10102-DQB10503 DQA10102-DQB10601 DQA10102-DQB10602 DQA10102-DQB10603 DQA10102-DQB10609 DQA10102-DQB10610 DQA10102-DQB10611 DQA10102-DQB10614 DQA10103-DQB10501 DQA10103-DQB10601 DQA10103-DQB10602 DQA10103-DQB10603 DQA10103-DQB10609 DQA10103-DQB10614 DQA10104-DQB10602 DQA10105-DQB10602 DQA10201-DQB10301 DQA10201-DQB10303 DQA10301-DQB10301 DQA10302-DQB10301 DQA10303-DQB10301 DQA10401-DQB10301 DQA10401-DQB10319 DQA10501-DQB10301 DQA10501-DQB10319 DQA10503-DQB10301 DQA10505-DQB10301 DQA10505-DQB10309 DQA10505-DQB10319 DQA10505-DQB10402 DQA10506-DQB10303 DQA10508-DQB10301 DQA10509-DQB10301 DQA10601-DQB10301
KLNWASQIYPGIKV

SEQ ID NO: 4224 - protein, 13 aa, Human immunodeficiency virus 1
  source 1..13: note = HLAs: DRB1_1101 DRB1_1305
KLVDFRELNKRTQ

SEQ ID NO: 4225 - protein, 14 aa, Human immunodeficiency virus 1
  source 1..14: note = HLAs: DRB1_1101 DRB1_1104 DRB1_1305
KLVDFRELNKRTQD

SEQ ID NO: 4226 - protein, 15 aa, Human immunodeficiency virus 1
  source 1..15: note = HLAs: DRB1_0801 DRB1_0802 DRB1_0804 DRB1_0806 DRB1_0809 DRB1_1101 DRB1_1102 DRB1_1103 DRB1_1104 DRB1_1301 DRB1_1304 DRB1_1305 DRB1_1406
KLVDFRELNKRTQDF

SEQ ID NO: 4227 - protein, 16 aa, Human immunodeficiency virus 1
  source 1..16: note = HLAs: DRB1_0801 DRB1_0806 DRB1_1101 DRB1_1103 DRB1_1104 DRB1_1305
KLVDFRELNKRTQDFW

SEQ ID NO: 4228 - protein, 17 aa, Human immunodeficiency virus 1
  source 1..17: note = HLAs: DRB1_0801 DRB1_0806 DRB1_1101 DRB1_1103 DRB1_1104 DRB1_1305
KLVDFRELNKRTQDFWE

SEQ ID NO: 4229 - protein, 18 aa, Human immunodeficiency virus 1
  source 1..18: note = HLAs: DRB1_1101 DRB1_1305
KLVDFRELNKRTQDFWEV

SEQ ID NO: 4230 - protein, 19 aa, Human immunodeficiency virus 1
  source 1..19: note = HLAs: DRB1_0801 DRB1_1101 DRB1_1103 DRB1_1104 DRB1_1305 DPA10401-DPB10101
KLVDFRELNKRTQDFWEVQ

SEQ ID NO: 4231 - protein, 20 aa, Human immunodeficiency virus 1
  source 1..20: note = HLAs: DRB1_0801 DRB1_0806 DRB1_1101 DRB1_1103 DRB1_1104 DRB1_1304 DRB1_1305 DPA10103-DPB10101 DPA10103-DPB11501 DPA10103-DPB13101 DPA10104-DPB10101 DPA10104-DPB11501 DPA10105-DPB10101 DPA10202-DPB10101 DPA10202-DPB110601 DPA10202-DPB11901 DPA10202-DPB13101 DPA10301-DPB10101 DPA10301-DPB10201 DPA10301-DPB10202 DPA10301-DPB10401 DPA10301-DPB110601 DPA10301-DPB11801 DPA10301-DPB12301 DPA10301-DPB13901 DPA10301-DPB14001 DPA10301-DPB16501 DPA10401-DPB10101 DPA10401-DPB10501 DQA10102-DQB10501
KLVDFRELNKRTQDFWEVQL

SEQ ID NO: 4232 - protein, 21 aa, Human immunodeficiency virus 1
  source 1..21: note = HLAs: DRB1_0801 DRB1_0806 DRB1_1101 DRB1_1103 DRB1_1104 DRB1_1304 DRB1_1305 DPA10103-DPB11501 DPA10103-DPB13101 DPA10104-DPB11501 DPA10301-DPB10101 DPA10301-DPB10201 DPA10301-DPB10202 DPA10301-DPB14001 DPA10401-DPB10101 DQA10102-DQB10501
KLVDFRELNKRTQDFWEVQLG

SEQ ID NO: 4233 - protein, 22 aa, Human immunodeficiency virus 1
  source 1..22: note = HLAs: DRB1_0801 DRB1_0806 DRB1_1101 DRB1_1103 DRB1_1104 DRB1_1304 DRB1_1305 DPA10103-DPB10101 DPA10103-DPB11501 DPA10103-DPB13101 DPA10104-DPB10101 DPA10104-DPB11501 DPA10105-DPB10101 DPA10301-DPB10101 DPA10301-DPB10201 DPA10301-DPB10202 DPA10301-DPB110601 DPA10301-DPB11801 DPA10301-DPB14001 DPA10301-DPB16501 DPA10401-DPB10101 DQA10102-DQB10501
KLVDFRELNKRTQDFWEVQLGI

SEQ ID NO: 4234 - protein, 23 aa, Human immunodeficiency virus 1
  source 1..23: note = HLAs: DRB1_0801 DRB1_0806 DRB1_1101 DRB1_1103 DRB1_1104 DRB1_1304 DRB1_1305 DPA10103-DPB10101 DPA10103-DPB11501 DPA10103-DPB13101 DPA10103-DPB15001 DPA10104-DPB10101 DPA10104-DPB11501 DPA10105-DPB10101 DPA10105-DPB15001 DPA10202-DPB10101 DPA10202-DPB13101 DPA10301-DPB10101 DPA10301-DPB10201 DPA10301-DPB10202 DPA10301-DPB10401 DPA10301-DPB110601 DPA10301-DPB11801 DPA10301-DPB12301 DPA10301-DPB13901 DPA10301-DPB14001 DPA10301-DPB16501 DPA10401-DPB10101 DPA10401-DPB10501 DQA10102-DQB10501
KLVDFRELNKRTQDFWEVQLGIP

SEQ ID NO: 4235 - protein, 24 aa, Human immunodeficiency virus 1
  source 1..24: note = HLAs: DRB1_0801 DRB1_0806 DRB1_1001 DRB1_1101 DRB1_1103 DRB1_1104 DRB1_1304 DRB1_1305 DPA10103-DPB10101 DPA10103-DPB11501 DPA10103-DPB11601 DPA10103-DPB13101 DPA10103-DPB15001 DPA10104-DPB10101 DPA10104-DPB11501 DPA10105-DPB10101 DPA10105-DPB15001 DPA10202-DPB10101 DPA10202-DPB110601 DPA10202-DPB11901 DPA10202-DPB13101 DPA10301-DPB10101 DPA10301-DPB10201 DPA10301-DPB10202 DPA10301-DPB10401 DPA10301-DPB110601 DPA10301-DPB11801 DPA10301-DPB12301 DPA10301-DPB13901 DPA10301-DPB14001 DPA10301-DPB16501 DPA10401-DPB10101 DPA10401-DPB10201 DPA10401-DPB10202 DPA10401-DPB10501 DQA10102-DQB10501 DQA10102-DQB10503
KLVDFRELNKRTQDFWEVQLGIPH

SEQ ID NO: 4236 - protein, 25 aa, Human immunodeficiency virus 1
  source 1..25: note = HLAs: DRB1_0801 DRB1_0806 DRB1_1001 DRB1_1101 DRB1_1103 DRB1_1104 DRB1_1304 DRB1_1305 DPA10103-DPB10101 DPA10103-DPB11501 DPA10103-DPB11601 DPA10103-DPB13101 DPA10103-DPB15001 DPA10104-DPB10101 DPA10104-DPB11501 DPA10105-DPB10101 DPA10105-DPB15001 DPA10202-DPB10101 DPA10202-DPB110601 DPA10202-DPB11901 DPA10202-DPB13101 DPA10301-DPB10101 DPA10301-DPB10201 DPA10301-DPB10202 DPA10301-DPB10401 DPA10301-DPB110601 DPA10301-DPB11801 DPA10301-DPB12301 DPA10301-DPB13901 DPA10301-DPB14001 DPA10301-DPB16501 DPA10401-DPB10101 DPA10401-DPB10201 DPA10401-DPB10202 DPA10401-DPB10501 DQA10102-DQB10501 DQA10102-DQB10503
KLVDFRELNKRTQDFWEVQLGIPHP

SEQ ID NO: 4237 - protein, 13 aa, Human immunodeficiency virus 1
  source 1..13: note = HLAs: DRB1_1114 DRB1_1302
KLVGKLNWASQIY

SEQ ID NO: 4238 - protein, 14 aa, Human immunodeficiency virus 1
  source 1..14: note = HLAs: DRB1_1114 DRB1_1302 DQA10102-DQB10501 DQA10103-DQB10501
KLVGKLNWASQIYP

SEQ ID NO: 4239 - protein, 15 aa, Human immunodeficiency virus 1
  source 1..15: note = HLAs: DRB1_0101 DRB1_0804 DRB1_0806 DRB1_0813 DRB1_0901 DRB1_1001 DRB1_1102 DRB1_1103 DRB1_1104 DRB1_1114 DRB1_1301 DRB1_1302 DRB1_1304 DRB1_1406 DRB1_1501 DRB1_1503 DQA10101-DQB10601 DQA10102-DQB10501 DQA10102-DQB10503 DQA10102-DQB10601 DQA10102-DQB10602 DQA10102-DQB10609 DQA10102-DQB10610 DQA10102-DQB10611 DQA10103-DQB10501 DQA10103-DQB10601 DQA10103-DQB10602 DQA10103-DQB10609 DQA10201-DQB10301 DQA10201-DQB10303 DQA10301-DQB10301 DQA10302-DQB10301 DQA10303-DQB10301 DQA10501-DQB10301 DQA10501-DQB10319 DQA10503-DQB10301 DQA10505-DQB10301 DQA10505-DQB10309 DQA10505-DQB10319 DQA10505-DQB10402 DQA10508-DQB10301 DQA10509-DQB10301 DQA10601-DQB10301
KLVGKLNWASQIYPG

SEQ ID NO: 4240 - protein, 16 aa, Human immunodeficiency virus 1
  source 1..16: note = HLAs: DRB1_0101 DRB1_1001 DRB1_1114 DRB1_1302 DRB1_1304 DPA10103-DPB11501 DPA10104-DPB11501 DPA10301-DPB10101 DPA10301-DPB10201 DPA10301-DPB10202 DPA10301-DPB10401 DPA10301-DPB11801 DPA10301-DPB12301 DPA10301-DPB13901 DPA10301-DPB14001 DPA10401-DPB10101 DPA10401-DPB10201 DPA10401-DPB10202 DQA10101-DQB10601 DQA10101-DQB10602 DQA10102-DQB10501 DQA10102-DQB10503 DQA10102-DQB10601 DQA10102-DQB10602 DQA10102-DQB10603 DQA10102-DQB10604 DQA10102-DQB10609 DQA10102-DQB10610 DQA10102-DQB10611 DQA10102-DQB10614 DQA10103-DQB10501 DQA10103-DQB10503 DQA10103-DQB10601 DQA10103-DQB10602 DQA10103-DQB10603 DQA10103-DQB10609 DQA10103-DQB10614 DQA10104-DQB10602 DQA10105-DQB10602 DQA10201-DQB10301 DQA10201-DQB10303 DQA10301-DQB10301 DQA10302-DQB10301 DQA10303-DQB10301 DQA10401-DQB10301 DQA10401-DQB10319 DQA10501-DQB10301 DQA10501-DQB10319 DQA10503-DQB10301 DQA10505-DQB10301 DQA10505-DQB10309 DQA10505-DQB10319 DQA10505-DQB10402 DQA10506-DQB10303 DQA10508-DQB10301 DQA10509-DQB10301 DQA10601-DQB10301
KLVGKLNWASQIYPGI

SEQ ID NO: 4241 - protein, 17 aa, Human immunodeficiency virus 1
  source 1..17: note = HLAs: DRB1_0101 DRB1_0804 DRB1_0806 DRB1_0901 DRB1_1001 DRB1_1102 DRB1_1114 DRB1_1301 DRB1_1302 DRB1_1304 DPA10103-DPB11501 DPA10103-DPB13401 DPA10104-DPB11501 DPA10202-DPB10101 DPA10301-DPB10101 DPA10301-DPB10201 DPA10301-DPB10202 DPA10301-DPB10401 DPA10301-DPB110601 DPA10301-DPB11801 DPA10301-DPB12301 DPA10301-DPB13901 DPA10301-DPB14001 DPA10401-DPB10101 DPA10401-DPB10201 DPA10401-DPB10202 DQA10101-DQB10601 DQA10101-DQB10602 DQA10102-DQB10501 DQA10102-DQB10503 DQA10102-DQB10601 DQA10102-DQB10602 DQA10102-DQB10603 DQA10102-DQB10609 DQA10102-DQB10610 DQA10102-DQB10611 DQA10102-DQB10614 DQA10103-DQB10501 DQA10103-DQB10601 DQA10103-DQB10602 DQA10103-DQB10603 DQA10103-DQB10609 DQA10103-DQB10614 DQA10104-DQB10602 DQA10105-DQB10602 DQA10201-DQB10301 DQA10201-DQB10303 DQA10301-DQB10301 DQA10302-DQB10301 DQA10303-DQB10301 DQA10501-DQB10301 DQA10501-DQB10319 DQA10503-DQB10301 DQA10505-DQB10301 DQA10505-DQB10309 DQA10505-DQB10319 DQA10505-DQB10402 DQA10506-DQB10303 DQA10508-DQB10301; note = HLAs: DQA10509-DQB10301 DQA10601-DQB10301
KLVGKLNWASQIYPGIK

SEQ ID NO: 4242 - protein, 18 aa, Human immunodeficiency virus 1
  source 1..18: note = HLAs: DPA10103-DPB11501 DPA10104-DPB11501 DPA10301-DPB10101 DPA10301-DPB10201 DPA10301-DPB10202 DPA10401-DPB10101 DPA10401-DPB10201 DQA10101-DQB10601 DQA10101-DQB10602 DQA10102-DQB10501 DQA10102-DQB10503 DQA10102-DQB10601 DQA10102-DQB10602 DQA10102-DQB10603 DQA10102-DQB10609 DQA10102-DQB10610 DQA10102-DQB10611 DQA10102-DQB10614 DQA10103-DQB10501 DQA10103-DQB10601 DQA10103-DQB10602 DQA10103-DQB10609 DQA10104-DQB10602 DQA10105-DQB10602 DQA10201-DQB10301 DQA10301-DQB10301 DQA10302-DQB10301 DQA10303-DQB10301 DQA10501-DQB10301 DQA10501-DQB10319 DQA10503-DQB10301 DQA10505-DQB10301 DQA10505-DQB10309 DQA10505-DQB10319 DQA10508-DQB10301 DQA10509-DQB10301
KLVGKLNWASQIYPGIKV

SEQ ID NO: 4243 - protein, 13 aa, Human immunodeficiency virus 1
  source 1..13: note = HLAs: DRB1_0101 DRB1_0701 DRB1_0901 DRB1_1102 DRB1_1114 DRB1_1301 DRB1_1302 DRB1_1304 DRB1_1406 DPA10103-DPB11501 DPA10104-DPB11501 DPA10202-DPB10101 DPA10301-DPB10101 DPA10301-DPB10201 DPA10301-DPB10202 DPA10301-DPB10401 DPA10301-DPB10402 DPA10301-DPB110501 DPA10301-DPB110601 DPA10301-DPB11801 DPA10301-DPB12301 DPA10301-DPB13901 DPA10301-DPB14001 DPA10301-DPB14901 DPA10301-DPB18001 DPA10401-DPB10101 DPA10401-DPB10201 DPA10401-DPB10202 DQA10102-DQB10501 DQA10102-DQB10601 DQA10103-DQB10601 DQA10103-DQB10609
KLVSSGIRKVLFL

SEQ ID NO: 4244 - protein, 14 aa, Human immunodeficiency virus 1
  source 1..14: note = HLAs: DRB1_0101 DRB1_0102 DRB1_0701 DRB1_0806 DRB1_0901 DRB1_1001 DRB1_1102 DRB1_1103 DRB1_1104 DRB1_1114 DRB1_1301 DRB1_1302 DRB1_1304 DRB1_1401 DRB1_1404 DRB1_1406 DRB1_1454 DRB1_1501 DPA10103-DPB10201 DPA10103-DPB10202 DPA10103-DPB11501 DPA10103-DPB13401 DPA10103-DPB14801 DPA10104-DPB11501 DPA10202-DPB10101 DPA10202-DPB10201 DPA10202-DPB10202 DPA10202-DPB110601 DPA10202-DPB11801 DPA10202-DPB11901 DPA10202-DPB13101 DPA10202-DPB16501 DPA10301-DPB10101 DPA10301-DPB10201 DPA10301-DPB10202 DPA10301-DPB10401 DPA10301-DPB10402 DPA10301-DPB110501 DPA10301-DPB110601 DPA10301-DPB11801 DPA10301-DPB12301 DPA10301-DPB13901 DPA10301-DPB14001 DPA10301-DPB14901 DPA10301-DPB16501 DPA10301-DPB17501 DPA10301-DPB18001 DPA10401-DPB10101 DPA10401-DPB10201 DPA10401-DPB10202 DQA10102-DQB10501 DQA10102-DQB10601 DQA10102-DQB10602 DQA10102-DQB10609 DQA10103-DQB10501 DQA10103-DQB10601 DQA10103-DQB10602 DQA10103-DQB10609 DQA10201-DQB10301 DQA10201-DQB10303 DQA10505-DQB10402
KLVSSGIRKVLFLD

SEQ ID NO: 4245 - protein, 15 aa, Human immunodeficiency virus 1
  source 1..15: note = HLAs: DRB1_0101 DRB1_0102 DRB1_0404 DRB1_0410 DRB1_0701 DRB1_0801 DRB1_0804 DRB1_0806 DRB1_0813 DRB1_0901 DRB1_1001 DRB1_1101 DRB1_1102 DRB1_1103 DRB1_1104 DRB1_1114 DRB1_1201 DRB1_1202 DRB1_1301 DRB1_1302 DRB1_1303 DRB1_1304 DRB1_1305 DRB1_1312 DRB1_1401 DRB1_1402 DRB1_1404 DRB1_1405 DRB1_1406 DRB1_1418 DRB1_1454 DRB1_1501 DRB1_1503 DRB1_1602 DPA10103-DPB10101 DPA10103-DPB10201 DPA10103-DPB10202 DPA10103-DPB10401 DPA10103-DPB112601 DPA10103-DPB11501 DPA10103-DPB11601 DPA10103-DPB11801 DPA10103-DPB11901 DPA10103-DPB12301 DPA10103-DPB13101 DPA10103-DPB13401 DPA10103-DPB13901 DPA10103-DPB14001 DPA10103-DPB14101 DPA10103-DPB14801 DPA10103-DPB15001 DPA10103-DPB15901 DPA10104-DPB10101 DPA10104-DPB11501 DPA10105-DPB10101 DPA10105-DPB10401 DPA10105-DPB11801 DPA10105-DPB15001 DPA10106-DPB10101 DPA10201-DPB10101 DPA10201-DPB10201 DPA10201-DPB10202 DPA10201-DPB110601 DPA10201-DPB11501 DPA10201-DPB11601 DPA10201-DPB11801 DPA10201-DPB11901 DPA10201-DPB13401 DPA10202-DPB10101 DPA10202-DPB10201; note = HLAs: DPA10202-DPB10202 DPA10202-DPB10401 DPA10202-DPB10501 DPA10202-DPB110601 DPA10202-DPB11801 DPA10202-DPB11901 DPA10202-DPB13101 DPA10202-DPB13801 DPA10202-DPB15501 DPA10202-DPB16501 DPA10301-DPB10101 DPA10301-DPB10201 DPA10301-DPB10202 DPA10301-DPB10401 DPA10301-DPB10402 DPA10301-DPB110501 DPA10301-DPB110601 DPA10301-DPB11801 DPA10301-DPB12301 DPA10301-DPB13901 DPA10301-DPB14001 DPA10301-DPB14901 DPA10301-DPB15501 DPA10301-DPB16501 DPA10301-DPB17501 DPA10301-DPB18001 DPA10401-DPB10101 DPA10401-DPB10201 DPA10401-DPB10202 DPA10401-DPB10402 DPA10401-DPB10501 DPA10401-DPB110501 DPA10401-DPB14901 DQA10102-DQB10501 DQA10102-DQB10601 DQA10102-DQB10602 DQA10102-DQB10609 DQA10103-DQB10501 DQA10103-DQB10601 DQA10103-DQB10602 DQA10103-DQB10608 DQA10103-DQB10609 DQA10201-DQB10301 DQA10201-DQB10303 DQA10505-DQB10402
KLVSSGIRKVLFLDG

SEQ ID NO: 4246 - protein, 16 aa, Human immunodeficiency virus 1
  source 1..16: note = HLAs: DRB1_0101 DRB1_0102 DRB1_0701 DRB1_0804 DRB1_0806 DRB1_0901 DRB1_1001 DRB1_1102 DRB1_1103 DRB1_1104 DRB1_1114 DRB1_1301 DRB1_1302 DRB1_1304 DRB1_1401 DRB1_1404 DRB1_1406 DRB1_1454 DRB1_1501 DPA10103-DPB10101 DPA10103-DPB10201 DPA10103-DPB10202 DPA10103-DPB10401 DPA10103-DPB10501 DPA10103-DPB112601 DPA10103-DPB11501 DPA10103-DPB11601 DPA10103-DPB11801 DPA10103-DPB11901 DPA10103-DPB12301 DPA10103-DPB13101 DPA10103-DPB13401 DPA10103-DPB13901 DPA10103-DPB14001 DPA10103-DPB14101 DPA10103-DPB14801 DPA10103-DPB15001 DPA10104-DPB10101 DPA10104-DPB11501 DPA10105-DPB10101 DPA10105-DPB10401 DPA10105-DPB11801 DPA10105-DPB15001 DPA10106-DPB10101 DPA10201-DPB10101 DPA10201-DPB10202 DPA10201-DPB110601 DPA10201-DPB11501 DPA10201-DPB11601 DPA10201-DPB11901 DPA10202-DPB10101 DPA10202-DPB10201 DPA10202-DPB10202 DPA10202-DPB10501 DPA10202-DPB110601 DPA10202-DPB11801 DPA10202-DPB11901 DPA10202-DPB13101 DPA10202-DPB13801 DPA10202-DPB15501 DPA10202-DPB16501 DPA10301-DPB10101 DPA10301-DPB10201; note = HLAs: DPA10301-DPB10202 DPA10301-DPB10401 DPA10301-DPB10402 DPA10301-DPB110501 DPA10301-DPB110601 DPA10301-DPB11801 DPA10301-DPB12301 DPA10301-DPB13901 DPA10301-DPB14001 DPA10301-DPB14901 DPA10301-DPB15501 DPA10301-DPB16501 DPA10301-DPB17501 DPA10301-DPB18001 DPA10401-DPB10101 DPA10401-DPB10201 DPA10401-DPB10202 DPA10401-DPB10402 DPA10401-DPB10501 DPA10401-DPB110501 DPA10401-DPB14901 DQA10102-DQB10501 DQA10102-DQB10503 DQA10102-DQB10601 DQA10102-DQB10602 DQA10102-DQB10609 DQA10102-DQB10611 DQA10103-DQB10501 DQA10103-DQB10601 DQA10103-DQB10602 DQA10103-DQB10608 DQA10103-DQB10609 DQA10201-DQB10301 DQA10201-DQB10303 DQA10505-DQB10402
KLVSSGIRKVLFLDGI

SEQ ID NO: 4247 - protein, 13 aa, Human immunodeficiency virus 1
  source 1..13: note = HLAs: DQA10201-DQB10301 DQA10501-DQB10301 DQA10501-DQB10319 DQA10503-DQB10301 DQA10505-DQB10301 DQA10505-DQB10309 DQA10505-DQB10319 DQA10508-DQB10301 DQA10509-DQB10301
KMIGGIGGFIKVR

SEQ ID NO: 4248 - protein, 14 aa, Human immunodeficiency virus 1
  source 1..14: note = HLAs: DRB1_0101 DRB1_0806 DRB1_0901 DRB1_1103 DRB1_1104 DRB1_1304 DQA10201-DQB10301 DQA10501-DQB10301 DQA10501-DQB10319 DQA10503-DQB10301 DQA10505-DQB10301 DQA10505-DQB10309 DQA10505-DQB10319 DQA10508-DQB10301 DQA10509-DQB10301
KMIGGIGGFIKVRQ

SEQ ID NO: 4249 - protein, 15 aa, Human immunodeficiency virus 1
  source 1..15: note = HLAs: DRB1_0101 DRB1_0102 DRB1_0410 DRB1_0701 DRB1_0801 DRB1_0804 DRB1_0806 DRB1_0901 DRB1_1001 DRB1_1101 DRB1_1102 DRB1_1103 DRB1_1104 DRB1_1202 DRB1_1301 DRB1_1304 DRB1_1305 DRB1_1406 DRB1_1501 DRB1_1503 DRB1_1601 DQA10102-DQB10501 DQA10102-DQB10601 DQA10103-DQB10601 DQA10201-DQB10301 DQA10501-DQB10301 DQA10501-DQB10319 DQA10503-DQB10301 DQA10505-DQB10301 DQA10505-DQB10309 DQA10505-DQB10319 DQA10505-DQB10402 DQA10508-DQB10301 DQA10509-DQB10301
KMIGGIGGFIKVRQY

SEQ ID NO: 4250 - protein, 16 aa, Human immunodeficiency virus 1
  source 1..16: note = HLAs: DRB1_0101 DRB1_0804 DRB1_0806 DRB1_0901 DRB1_1102 DRB1_1103 DRB1_1104 DRB1_1301 DRB1_1304 DRB1_1501 DQA10102-DQB10501 DQA10102-DQB10601 DQA10103-DQB10601 DQA10201-DQB10301 DQA10501-DQB10301 DQA10501-DQB10319 DQA10503-DQB10301 DQA10505-DQB10301 DQA10505-DQB10309 DQA10505-DQB10319 DQA10508-DQB10301 DQA10509-DQB10301
KMIGGIGGFIKVRQYD

SEQ ID NO: 4251 - protein, 17 aa, Human immunodeficiency virus 1
  source 1..17: note = HLAs: DRB1_0101 DRB1_0804 DRB1_0806 DRB1_1102 DRB1_1103 DRB1_1104 DRB1_1301 DRB1_1304 DRB1_1406 DRB1_1501 DQA10102-DQB10501 DQA10102-DQB10601 DQA10103-DQB10601 DQA10201-DQB10301 DQA10501-DQB10301 DQA10501-DQB10319 DQA10503-DQB10301 DQA10505-DQB10301 DQA10505-DQB10309 DQA10505-DQB10319 DQA10508-DQB10301 DQA10509-DQB10301
KMIGGIGGFIKVRQYDQ

SEQ ID NO: 4252 - protein, 20 aa, Human immunodeficiency virus 1
  source 1..20: note = HLAs: DPA10301-DPB10101
KPGMDGPKVKQWPLTEEKIK

SEQ ID NO: 4253 - protein, 22 aa, Human immunodeficiency virus 1
  source 1..22: note = HLAs: DPA10301-DPB10101
KPGMDGPKVKQWPLTEEKIKAL

SEQ ID NO: 4254 - protein, 13 aa, Human immunodeficiency virus 1
  source 1..13: note = HLAs: DQA10201-DQB10301 DQA10501-DQB10301 DQA10501-DQB10319 DQA10503-DQB10301 DQA10505-DQB10301 DQA10505-DQB10309 DQA10505-DQB10319 DQA10508-DQB10301 DQA10509-DQB10301
KPKMIGGIGGFIK

SEQ ID NO: 4255 - protein, 14 aa, Human immunodeficiency virus 1
  source 1..14: note = HLAs: DRB1_0101 DRB1_0901 DQA10201-DQB10301 DQA10501-DQB10301 DQA10501-DQB10319 DQA10503-DQB10301 DQA10505-DQB10301 DQA10505-DQB10309 DQA10505-DQB10319 DQA10508-DQB10301 DQA10509-DQB10301
KPKMIGGIGGFIKV

SEQ ID NO: 4256 - protein, 15 aa, Human immunodeficiency virus 1
  source 1..15: note = HLAs: DRB1_0101 DRB1_0102 DRB1_0701 DRB1_0901 DRB1_1001 DRB1_1102 DRB1_1103 DRB1_1104 DRB1_1114 DRB1_1301 DRB1_1302 DRB1_1304 DRB1_1406 DRB1_1501 DRB1_1503 DRB1_1601 DRB1_1602 DQA10102-DQB10501 DQA10102-DQB10601 DQA10103-DQB10601 DQA10201-DQB10301 DQA10501-DQB10301 DQA10501-DQB10319 DQA10503-DQB10301 DQA10505-DQB10301 DQA10505-DQB10309 DQA10505-DQB10319 DQA10505-DQB10402 DQA10506-DQB10303 DQA10508-DQB10301 DQA10509-DQB10301 DQA10601-DQB10301
KPKMIGGIGGFIKVR

SEQ ID NO: 4257 - protein, 16 aa, Human immunodeficiency virus 1
  source 1..16: note = HLAs: DRB1_0101 DRB1_0102 DRB1_0701 DRB1_0806 DRB1_0901 DRB1_1001 DRB1_1102 DRB1_1103 DRB1_1104 DRB1_1301 DRB1_1304 DRB1_1501 DQA10102-DQB10501 DQA10102-DQB10601 DQA10103-DQB10601 DQA10201-DQB10301 DQA10501-DQB10301 DQA10501-DQB10319 DQA10503-DQB10301 DQA10505-DQB10301 DQA10505-DQB10309 DQA10505-DQB10319 DQA10508-DQB10301 DQA10509-DQB10301 DQA10601-DQB10301
KPKMIGGIGGFIKVRQ

SEQ ID NO: 4258 - protein, 17 aa, Human immunodeficiency virus 1
  source 1..17: note = HLAs: DRB1_0101 DRB1_0102 DRB1_0701 DRB1_0804 DRB1_0806 DRB1_0901 DRB1_1001 DRB1_1102 DRB1_1103 DRB1_1104 DRB1_1301 DRB1_1304 DRB1_1406 DRB1_1501 DRB1_1503 DRB1_1601 DQA10102-DQB10501 DQA10102-DQB10601 DQA10103-DQB10601 DQA10201-DQB10301 DQA10501-DQB10301 DQA10501-DQB10319 DQA10503-DQB10301 DQA10505-DQB10301 DQA10505-DQB10309 DQA10505-DQB10319 DQA10508-DQB10301 DQA10509-DQB10301
KPKMIGGIGGFIKVRQY

SEQ ID NO: 4259 - protein, 18 aa, Human immunodeficiency virus 1
  source 1..18: note = HLAs: DRB1_0901 DQA10201-DQB10301 DQA10501-DQB10301 DQA10501-DQB10319 DQA10503-DQB10301 DQA10505-DQB10301 DQA10505-DQB10309 DQA10505-DQB10319 DQA10508-DQB10301 DQA10509-DQB10301
KPKMIGGIGGFIKVRQYD

SEQ ID NO: 4260 - protein, 19 aa, Human immunodeficiency virus 1
  source 1..19: note = HLAs: DRB1_0101 DRB1_0804 DRB1_0806 DRB1_0901 DRB1_1102 DRB1_1103 DRB1_1104 DRB1_1301 DRB1_1304 DRB1_1501 DQA10102-DQB10501 DQA10102-DQB10601 DQA10103-DQB10601 DQA10201-DQB10301 DQA10501-DQB10301 DQA10501-DQB10319 DQA10503-DQB10301 DQA10505-DQB10301 DQA10505-DQB10309 DQA10505-DQB10319 DQA10508-DQB10301 DQA10509-DQB10301
KPKMIGGIGGFIKVRQYDQ

SEQ ID NO: 4261 - protein, 13 aa, Human immunodeficiency virus 1
  source 1..13: note = HLAs: DRB1_0101 DRB1_0102 DRB1_0404 DRB1_0405 DRB1_0408 DRB1_0410 DRB1_0701 DRB1_0804 DRB1_0806 DRB1_0813 DRB1_1001 DRB1_1102 DRB1_1103 DRB1_1104 DRB1_1114 DRB1_1201 DRB1_1301 DRB1_1302 DRB1_1304 DRB1_1404 DRB1_1406 DRB1_1501 DRB1_1502 DRB1_1503 DRB1_1601 DRB1_1602 DPA10202-DPB10101 DPA10301-DPB10202 DQA10102-DQB10501
KQITKIQNFRVYY

SEQ ID NO: 4262 - protein, 14 aa, Human immunodeficiency virus 1
  source 1..14: note = HLAs: DRB1_0101 DRB1_0102 DRB1_0103 DRB1_0401 DRB1_0402 DRB1_0404 DRB1_0405 DRB1_0408 DRB1_0410 DRB1_0701 DRB1_0801 DRB1_0802 DRB1_0803 DRB1_0804 DRB1_0806 DRB1_0809 DRB1_0813 DRB1_0901 DRB1_1001 DRB1_1101 DRB1_1102 DRB1_1103 DRB1_1104 DRB1_1114 DRB1_1201 DRB1_1202 DRB1_1301 DRB1_1302 DRB1_1304 DRB1_1305 DRB1_1312 DRB1_1401 DRB1_1402 DRB1_1403 DRB1_1404 DRB1_1405 DRB1_1406 DRB1_1454 DRB1_1501 DRB1_1502 DRB1_1503 DRB1_1601 DRB1_1602 DPA10103-DPB11501 DPA10103-DPB11801 DPA10103-DPB13401 DPA10103-DPB14001 DPA10104-DPB11501 DPA10105-DPB11801 DPA10106-DPB10101 DPA10201-DPB10101 DPA10201-DPB10501 DPA10201-DPB110601 DPA10201-DPB11501 DPA10201-DPB11601 DPA10201-DPB11901 DPA10201-DPB13401 DPA10202-DPB10101 DPA10202-DPB10201 DPA10202-DPB10202 DPA10202-DPB10401 DPA10202-DPB10501 DPA10202-DPB110001 DPA10202-DPB110601 DPA10202-DPB11801 DPA10202-DPB11901 DPA10202-DPB13101 DPA10202-DPB13801 DPA10202-DPB15501 DPA10202-DPB16501 DPA10301-DPB10101 DPA10301-DPB10201 DPA10301-DPB10202 DPA10301-DPB10401; note = HLAs: DPA10301-DPB110601 DPA10301-DPB11801 DPA10301-DPB12301 DPA10301-DPB13901 DPA10301-DPB14001 DPA10301-DPB16501 DPA10401-DPB10101 DPA10401-DPB10201 DPA10401-DPB10202 DPA10401-DPB10501 DQA10102-DQB10501 DQA10102-DQB10503 DQA10103-DQB10501 DQA10103-DQB10503 DQA10505-DQB10402
KQITKIQNFRVYYR

SEQ ID NO: 4263 - protein, 15 aa, Human immunodeficiency virus 1
  source 1..15: note = HLAs: DRB1_0101 DRB1_0102 DRB1_0103 DRB1_0401 DRB1_0402 DRB1_0403 DRB1_0404 DRB1_0405 DRB1_0406 DRB1_0408 DRB1_0410 DRB1_0411 DRB1_0701 DRB1_0801 DRB1_0802 DRB1_0803 DRB1_0804 DRB1_0806 DRB1_0809 DRB1_0813 DRB1_0901 DRB1_1001 DRB1_1101 DRB1_1102 DRB1_1103 DRB1_1104 DRB1_1114 DRB1_1201 DRB1_1202 DRB1_1301 DRB1_1302 DRB1_1303 DRB1_1304 DRB1_1305 DRB1_1312 DRB1_1401 DRB1_1402 DRB1_1403 DRB1_1404 DRB1_1405 DRB1_1406 DRB1_1418 DRB1_1454 DRB1_1501 DRB1_1502 DRB1_1503 DRB1_1601 DRB1_1602 DPA10103-DPB10101 DPA10103-DPB10201 DPA10103-DPB10202 DPA10103-DPB10501 DPA10103-DPB11501 DPA10103-DPB11601 DPA10103-DPB11801 DPA10103-DPB11901 DPA10103-DPB13101 DPA10103-DPB13401 DPA10103-DPB14001 DPA10103-DPB14101 DPA10103-DPB14801 DPA10103-DPB15001 DPA10103-DPB15901 DPA10104-DPB10101 DPA10104-DPB11501 DPA10105-DPB10101 DPA10105-DPB11801 DPA10105-DPB15001 DPA10106-DPB10101 DPA10201-DPB10101 DPA10201-DPB10202 DPA10201-DPB10501 DPA10201-DPB110601 DPA10201-DPB11501 DPA10201-DPB11601 DPA10201-DPB11801; note = HLAs: DPA10201-DPB11901 DPA10201-DPB13401 DPA10202-DPB10101 DPA10202-DPB10201 DPA10202-DPB10202 DPA10202-DPB10401 DPA10202-DPB10402 DPA10202-DPB10501 DPA10202-DPB110001 DPA10202-DPB110501 DPA10202-DPB110601 DPA10202-DPB11801 DPA10202-DPB11901 DPA10202-DPB13101 DPA10202-DPB13801 DPA10202-DPB15501 DPA10202-DPB16501 DPA10301-DPB10101 DPA10301-DPB10201 DPA10301-DPB10202 DPA10301-DPB10401 DPA10301-DPB10402 DPA10301-DPB110501 DPA10301-DPB110601 DPA10301-DPB11801 DPA10301-DPB12301 DPA10301-DPB13901 DPA10301-DPB14001 DPA10301-DPB14901 DPA10301-DPB16501 DPA10301-DPB17501 DPA10301-DPB18001 DPA10401-DPB10101 DPA10401-DPB10201 DPA10401-DPB10202 DPA10401-DPB10501 DQA10102-DQB10501 DQA10102-DQB10503 DQA10103-DQB10501 DQA10103-DQB10503 DQA10103-DQB10601 DQA10103-DQB10608 DQA10103-DQB10609 DQA10501-DQB10501 DQA10505-DQB10402 DQA10505-DQB10501
KQITKIQNFRVYYRD

SEQ ID NO: 4264 - protein, 15 aa, Human immunodeficiency virus 1
  source 1..15: note = HLAs: DQA10201-DQB10301
KRKGGIGGYSAGERI

SEQ ID NO: 4265 - protein, 16 aa, Human immunodeficiency virus 1
  source 1..16: note = HLAs: DQA10201-DQB10301
KRKGGIGGYSAGERII

SEQ ID NO: 4266 - protein, 20 aa, Human immunodeficiency virus 1
  source 1..20: note = HLAs: DQA10102-DQB10501 DQA10102-DQB10609 DQA10201-DQB10301
KRKGGIGGYSAGERIIDIIA

SEQ ID NO: 4267 - protein, 14 aa, Human immunodeficiency virus 1
  source 1..14: note = HLAs: DPA10301-DPB10101 DPA10301-DPB16501 DPA10401-DPB10101 DQA10102-DQB10501
KRTQDFWEVQLGIP

SEQ ID NO: 4268 - protein, 15 aa, Human immunodeficiency virus 1
  source 1..15: note = HLAs: DRB1_0101 DRB1_1001 DPA10103-DPB10101 DPA10103-DPB11501 DPA10103-DPB13101 DPA10104-DPB10101 DPA10104-DPB11501 DPA10105-DPB10101 DPA10202-DPB10101 DPA10301-DPB10101 DPA10301-DPB10201 DPA10301-DPB10202 DPA10301-DPB10401 DPA10301-DPB110601 DPA10301-DPB11801 DPA10301-DPB12301 DPA10301-DPB13901 DPA10301-DPB14001 DPA10301-DPB16501 DPA10401-DPB10101 DQA10102-DQB10501 DQA10102-DQB10503
KRTQDFWEVQLGIPH

SEQ ID NO: 4269 - protein, 16 aa, Human immunodeficiency virus 1
  source 1..16: note = HLAs: DRB1_1001 DPA10103-DPB10101 DPA10103-DPB11501 DPA10103-DPB13101 DPA10104-DPB10101 DPA10104-DPB11501 DPA10105-DPB10101 DPA10202-DPB10101 DPA10301-DPB10101 DPA10301-DPB10201 DPA10301-DPB10202 DPA10301-DPB10401 DPA10301-DPB110601 DPA10301-DPB11801 DPA10301-DPB12301 DPA10301-DPB13901 DPA10301-DPB14001 DPA10301-DPB16501 DPA10401-DPB10101 DQA10102-DQB10501 DQA10102-DQB10503
KRTQDFWEVQLGIPHP

SEQ ID NO: 4270 - protein, 17 aa, Human immunodeficiency virus 1
  source 1..17: note = HLAs: DRB1_0101 DRB1_1001 DPA10103-DPB10101 DPA10103-DPB11501 DPA10103-DPB13101 DPA10103-DPB15001 DPA10104-DPB10101 DPA10104-DPB11501 DPA10105-DPB10101 DPA10105-DPB15001 DPA10202-DPB10101 DPA10301-DPB10101 DPA10301-DPB10201 DPA10301-DPB10202 DPA10301-DPB10401 DPA10301-DPB110601 DPA10301-DPB11801 DPA10301-DPB12301 DPA10301-DPB13901 DPA10301-DPB14001 DPA10301-DPB16501 DPA10401-DPB10101 DQA10102-DQB10501 DQA10102-DQB10503 DQA10102-DQB10601 DQA10103-DQB10501 DQA10103-DQB10601 DQA10201-DQB10301 DQA10201-DQB10303 DQA10301-DQB10301 DQA10302-DQB10301 DQA10303-DQB10301 DQA10401-DQB10301 DQA10401-DQB10319 DQA10501-DQB10301 DQA10501-DQB10319 DQA10503-DQB10301 DQA10505-DQB10301 DQA10505-DQB10309 DQA10505-DQB10319 DQA10505-DQB10402 DQA10506-DQB10303 DQA10508-DQB10301 DQA10509-DQB10301 DQA10601-DQB10301
KRTQDFWEVQLGIPHPA

SEQ ID NO: 4271 - protein, 18 aa, Human immunodeficiency virus 1
  source 1..18: note = HLAs: DRB1_1001 DPA10301-DPB10101 DPA10401-DPB10101 DQA10102-DQB10501 DQA10102-DQB10503 DQA10102-DQB10601 DQA10103-DQB10601 DQA10201-DQB10301 DQA10301-DQB10301 DQA10302-DQB10301 DQA10303-DQB10301 DQA10401-DQB10301 DQA10401-DQB10319 DQA10501-DQB10301 DQA10501-DQB10319 DQA10503-DQB10301 DQA10505-DQB10301 DQA10505-DQB10309 DQA10505-DQB10319 DQA10506-DQB10303 DQA10508-DQB10301 DQA10509-DQB10301 DQA10601-DQB10301
KRTQDFWEVQLGIPHPAG

SEQ ID NO: 4272 - protein, 19 aa, Human immunodeficiency virus 1
  source 1..19: note = HLAs: DRB1_0101 DRB1_0102 DRB1_1001 DPA10103-DPB10101 DPA10103-DPB11501 DPA10103-DPB15001 DPA10104-DPB10101 DPA10104-DPB11501 DPA10105-DPB10101 DPA10105-DPB15001 DPA10202-DPB10101 DPA10301-DPB10101 DPA10301-DPB10201 DPA10301-DPB10202 DPA10301-DPB10401 DPA10301-DPB110601 DPA10301-DPB11801 DPA10301-DPB12301 DPA10301-DPB13901 DPA10301-DPB14001 DPA10301-DPB16501 DPA10401-DPB10101 DQA10101-DQB10601 DQA10102-DQB10501 DQA10102-DQB10503 DQA10102-DQB10601 DQA10103-DQB10501 DQA10103-DQB10601 DQA10201-DQB10301 DQA10201-DQB10303 DQA10301-DQB10301 DQA10302-DQB10301 DQA10303-DQB10301 DQA10401-DQB10301 DQA10401-DQB10319 DQA10501-DQB10301 DQA10501-DQB10319 DQA10503-DQB10301 DQA10505-DQB10301 DQA10505-DQB10309 DQA10505-DQB10319 DQA10505-DQB10402 DQA10506-DQB10303 DQA10508-DQB10301 DQA10509-DQB10301 DQA10601-DQB10301
KRTQDFWEVQLGIPHPAGL

SEQ ID NO: 4273 - protein, 20 aa, Human immunodeficiency virus 1
  source 1..20: note = HLAs: DRB1_0101 DRB1_0102 DRB1_0901 DRB1_1001 DPA10103-DPB10101 DPA10103-DPB11501 DPA10103-DPB13101 DPA10103-DPB15001 DPA10104-DPB10101 DPA10104-DPB11501 DPA10105-DPB10101 DPA10105-DPB15001 DPA10106-DPB10101 DPA10201-DPB10101 DPA10202-DPB10101 DPA10202-DPB13101 DPA10301-DPB10101 DPA10301-DPB10201 DPA10301-DPB10202 DPA10301-DPB10401 DPA10301-DPB110601 DPA10301-DPB11801 DPA10301-DPB12301 DPA10301-DPB13901 DPA10301-DPB14001 DPA10301-DPB16501 DPA10401-DPB10101 DPA10401-DPB10202 DPA10401-DPB10501 DQA10101-DQB10601 DQA10102-DQB10501 DQA10102-DQB10503 DQA10102-DQB10601 DQA10102-DQB10602 DQA10102-DQB10609 DQA10102-DQB10611 DQA10103-DQB10501 DQA10103-DQB10503 DQA10103-DQB10601 DQA10103-DQB10602 DQA10103-DQB10609 DQA10201-DQB10301 DQA10201-DQB10303 DQA10301-DQB10301 DQA10302-DQB10301 DQA10303-DQB10301 DQA10401-DQB10301 DQA10401-DQB10319 DQA10501-DQB10301 DQA10501-DQB10319 DQA10503-DQB10301 DQA10505-DQB10301 DQA10505-DQB10309 DQA10505-DQB10319 DQA10505-DQB10402 DQA10506-DQB10303; note = HLAs: DQA10508-DQB10301 DQA10509-DQB10301 DQA10601-DQB10301
KRTQDFWEVQLGIPHPAGLK

SEQ ID NO: 4274 - protein, 21 aa, Human immunodeficiency virus 1
  source 1..21: note = HLAs: DRB1_0101 DRB1_0102 DRB1_0901 DRB1_1001 DPA10103-DPB10101 DPA10103-DPB11501 DPA10103-DPB15001 DPA10104-DPB10101 DPA10104-DPB11501 DPA10105-DPB10101 DPA10105-DPB15001 DPA10202-DPB10101 DPA10301-DPB10101 DPA10301-DPB10201 DPA10301-DPB10202 DPA10301-DPB10401 DPA10301-DPB110601 DPA10301-DPB11801 DPA10301-DPB12301 DPA10301-DPB13901 DPA10301-DPB16501 DPA10401-DPB10101 DQA10102-DQB10501 DQA10102-DQB10503 DQA10102-DQB10601 DQA10103-DQB10501 DQA10103-DQB10601 DQA10103-DQB10602 DQA10201-DQB10301 DQA10201-DQB10303 DQA10301-DQB10301 DQA10302-DQB10301 DQA10303-DQB10301 DQA10401-DQB10301 DQA10401-DQB10319 DQA10501-DQB10301 DQA10501-DQB10319 DQA10503-DQB10301 DQA10505-DQB10301 DQA10505-DQB10309 DQA10505-DQB10319 DQA10505-DQB10402 DQA10506-DQB10303 DQA10508-DQB10301 DQA10509-DQB10301 DQA10601-DQB10301
KRTQDFWEVQLGIPHPAGLKK

SEQ ID NO: 4275 - protein, 22 aa, Human immunodeficiency virus 1
  source 1..22: note = HLAs: DRB1_0101 DRB1_0102 DRB1_0901 DRB1_1001 DPA10103-DPB10101 DPA10103-DPB11501 DPA10103-DPB15001 DPA10104-DPB10101 DPA10104-DPB11501 DPA10105-DPB10101 DPA10105-DPB15001 DPA10202-DPB10101 DPA10301-DPB10101 DPA10301-DPB10201 DPA10301-DPB10202 DPA10301-DPB10401 DPA10301-DPB110601 DPA10301-DPB11801 DPA10301-DPB12301 DPA10301-DPB13901 DPA10301-DPB16501 DPA10401-DPB10101 DQA10102-DQB10501 DQA10102-DQB10503 DQA10102-DQB10601 DQA10103-DQB10501 DQA10103-DQB10601 DQA10103-DQB10602 DQA10201-DQB10301 DQA10201-DQB10303 DQA10301-DQB10301 DQA10302-DQB10301 DQA10303-DQB10301 DQA10401-DQB10301 DQA10401-DQB10319 DQA10501-DQB10301 DQA10501-DQB10319 DQA10503-DQB10301 DQA10505-DQB10301 DQA10505-DQB10309 DQA10505-DQB10319 DQA10505-DQB10402 DQA10506-DQB10303 DQA10508-DQB10301 DQA10509-DQB10301 DQA10601-DQB10301
KRTQDFWEVQLGIPHPAGLKKK

SEQ ID NO: 4276 - protein, 23 aa, Human immunodeficiency virus 1
  source 1..23: note = HLAs: DRB1_0101 DRB1_0102 DRB1_0901 DRB1_1001 DPA10103-DPB10101 DPA10103-DPB11501 DPA10103-DPB15001 DPA10104-DPB10101 DPA10104-DPB11501 DPA10105-DPB10101 DPA10105-DPB15001 DPA10202-DPB10101 DPA10301-DPB10101 DPA10301-DPB10201 DPA10301-DPB10202 DPA10301-DPB10401 DPA10301-DPB110601 DPA10301-DPB11801 DPA10301-DPB12301 DPA10301-DPB13901 DPA10301-DPB16501 DPA10401-DPB10101 DQA10102-DQB10501 DQA10102-DQB10503 DQA10102-DQB10601 DQA10103-DQB10501 DQA10103-DQB10601 DQA10103-DQB10602 DQA10201-DQB10301 DQA10201-DQB10303 DQA10301-DQB10301 DQA10302-DQB10301 DQA10303-DQB10301 DQA10401-DQB10301 DQA10401-DQB10319 DQA10501-DQB10301 DQA10501-DQB10319 DQA10503-DQB10301 DQA10505-DQB10301 DQA10505-DQB10309 DQA10505-DQB10319 DQA10505-DQB10402 DQA10506-DQB10303 DQA10508-DQB10301 DQA10509-DQB10301 DQA10601-DQB10301
KRTQDFWEVQLGIPHPAGLKKKK

SEQ ID NO: 4277 - protein, 24 aa, Human immunodeficiency virus 1
  source 1..24: note = HLAs: DRB1_0101 DRB1_0102 DRB1_0901 DRB1_1001 DPA10103-DPB10101 DPA10103-DPB11501 DPA10103-DPB15001 DPA10104-DPB10101 DPA10104-DPB11501 DPA10105-DPB10101 DPA10105-DPB15001 DPA10202-DPB10101 DPA10301-DPB10101 DPA10301-DPB10201 DPA10301-DPB10202 DPA10301-DPB10401 DPA10301-DPB110601 DPA10301-DPB11801 DPA10301-DPB12301 DPA10301-DPB13901 DPA10301-DPB16501 DPA10401-DPB10101 DQA10102-DQB10501 DQA10102-DQB10503 DQA10102-DQB10601 DQA10103-DQB10501 DQA10103-DQB10601 DQA10103-DQB10602 DQA10201-DQB10301 DQA10201-DQB10303 DQA10301-DQB10301 DQA10302-DQB10301 DQA10303-DQB10301 DQA10401-DQB10301 DQA10401-DQB10319 DQA10501-DQB10301 DQA10501-DQB10319 DQA10503-DQB10301 DQA10505-DQB10301 DQA10505-DQB10309 DQA10505-DQB10319 DQA10505-DQB10402 DQA10506-DQB10303 DQA10508-DQB10301 DQA10509-DQB10301 DQA10601-DQB10301
KRTQDFWEVQLGIPHPAGLKKKKS

SEQ ID NO: 4278 - protein, 25 aa, Human immunodeficiency virus 1
  source 1..25: note = HLAs: DRB1_0101 DRB1_0102 DRB1_0901 DRB1_1001 DPA10103-DPB10101 DPA10103-DPB11501 DPA10103-DPB15001 DPA10104-DPB10101 DPA10104-DPB11501 DPA10105-DPB10101 DPA10105-DPB15001 DPA10202-DPB10101 DPA10301-DPB10101 DPA10301-DPB10201 DPA10301-DPB10202 DPA10301-DPB10401 DPA10301-DPB110601 DPA10301-DPB11801 DPA10301-DPB12301 DPA10301-DPB13901 DPA10301-DPB16501 DPA10401-DPB10101 DQA10102-DQB10501 DQA10102-DQB10503 DQA10102-DQB10601 DQA10103-DQB10501 DQA10103-DQB10601 DQA10103-DQB10602 DQA10201-DQB10301 DQA10201-DQB10303 DQA10301-DQB10301 DQA10302-DQB10301 DQA10303-DQB10301 DQA10401-DQB10301 DQA10401-DQB10319 DQA10501-DQB10301 DQA10501-DQB10319 DQA10503-DQB10301 DQA10505-DQB10301 DQA10505-DQB10309 DQA10505-DQB10319 DQA10505-DQB10402 DQA10506-DQB10303 DQA10508-DQB10301 DQA10509-DQB10301 DQA10601-DQB10301
KRTQDFWEVQLGIPHPAGLKKKKSV

SEQ ID NO: 4279 - protein, 13 aa, Human immunodeficiency virus 1
  source 1..13: note = HLAs: DRB1_0101 DRB1_0102 DRB1_0103 DRB1_0401 DRB1_0404 DRB1_0405 DRB1_0408 DRB1_0410 DRB1_0701 DRB1_0801 DRB1_0802 DRB1_0804 DRB1_0806 DRB1_0809 DRB1_0813 DRB1_0901 DRB1_1001 DRB1_1101 DRB1_1102 DRB1_1103 DRB1_1104 DRB1_1114 DRB1_1201 DRB1_1301 DRB1_1302 DRB1_1304 DRB1_1305 DRB1_1312 DRB1_1401 DRB1_1402 DRB1_1403 DRB1_1404 DRB1_1406 DRB1_1454 DRB1_1501 DRB1_1502 DRB1_1503 DRB1_1601 DRB1_1602 DPA10103-DPB10101 DPA10103-DPB10201 DPA10103-DPB10202 DPA10103-DPB10401 DPA10103-DPB112601 DPA10103-DPB11501 DPA10103-DPB11601 DPA10103-DPB12301 DPA10103-DPB13401 DPA10103-DPB13901 DPA10103-DPB14001 DPA10103-DPB14801 DPA10103-DPB15001 DPA10104-DPB10101 DPA10104-DPB11501 DPA10105-DPB10101 DPA10105-DPB10401 DPA10105-DPB15001 DPA10106-DPB10101 DPA10201-DPB10101 DPA10201-DPB11501 DPA10202-DPB10101 DPA10202-DPB10201 DPA10202-DPB10202 DPA10202-DPB10401 DPA10202-DPB110601 DPA10202-DPB11801 DPA10202-DPB11901 DPA10202-DPB13101 DPA10202-DPB15501 DPA10202-DPB16501 DPA10301-DPB10101 DPA10301-DPB10201; note = HLAs: DPA10301-DPB10202 DPA10301-DPB10401 DPA10301-DPB10402 DPA10301-DPB110501 DPA10301-DPB110601 DPA10301-DPB11801 DPA10301-DPB12301 DPA10301-DPB13901 DPA10301-DPB14001 DPA10301-DPB14901 DPA10301-DPB15501 DPA10301-DPB16501 DPA10301-DPB17501 DPA10301-DPB18001 DPA10401-DPB10101 DPA10401-DPB10201 DPA10401-DPB10202 DPA10401-DPB10501 DQA10102-DQB10501 DQA10103-DQB10501
KRWIILGLNKIVR

SEQ ID NO: 4280 - protein, 14 aa, Human immunodeficiency virus 1
  source 1..14: note = HLAs: DRB1_0101 DRB1_0102 DRB1_0103 DRB1_0401 DRB1_0402 DRB1_0404 DRB1_0405 DRB1_0408 DRB1_0410 DRB1_0701 DRB1_0801 DRB1_0802 DRB1_0803 DRB1_0804 DRB1_0806 DRB1_0809 DRB1_0813 DRB1_0901 DRB1_1001 DRB1_1101 DRB1_1102 DRB1_1103 DRB1_1104 DRB1_1114 DRB1_1201 DRB1_1202 DRB1_1301 DRB1_1302 DRB1_1303 DRB1_1304 DRB1_1305 DRB1_1312 DRB1_1401 DRB1_1402 DRB1_1403 DRB1_1404 DRB1_1405 DRB1_1406 DRB1_1407 DRB1_1418 DRB1_1454 DRB1_1501 DRB1_1502 DRB1_1503 DRB1_1601 DRB1_1602 DPA10103-DPB10101 DPA10103-DPB10201 DPA10103-DPB10202 DPA10103-DPB10401 DPA10103-DPB10501 DPA10103-DPB10601 DPA10103-DPB11101 DPA10103-DPB112601 DPA10103-DPB11501 DPA10103-DPB11601 DPA10103-DPB11801 DPA10103-DPB11901 DPA10103-DPB12001 DPA10103-DPB12301 DPA10103-DPB13101 DPA10103-DPB13401 DPA10103-DPB13901 DPA10103-DPB14001 DPA10103-DPB14101 DPA10103-DPB14801 DPA10103-DPB15001 DPA10103-DPB15501 DPA10103-DPB15901 DPA10104-DPB10101 DPA10104-DPB11501 DPA10105-DPB10101 DPA10105-DPB10401 DPA10105-DPB11801 DPA10105-DPB15001; note = HLAs: DPA10106-DPB10101 DPA10201-DPB10101 DPA10201-DPB10201 DPA10201-DPB10202 DPA10201-DPB110601 DPA10201-DPB11501 DPA10201-DPB11601 DPA10201-DPB11801 DPA10201-DPB11901 DPA10202-DPB10101 DPA10202-DPB10201 DPA10202-DPB10202 DPA10202-DPB10401 DPA10202-DPB10501 DPA10202-DPB10901 DPA10202-DPB110001 DPA10202-DPB110601 DPA10202-DPB11101 DPA10202-DPB11301 DPA10202-DPB113101 DPA10202-DPB11701 DPA10202-DPB11801 DPA10202-DPB11901 DPA10202-DPB12101 DPA10202-DPB13001 DPA10202-DPB13101 DPA10202-DPB13801 DPA10202-DPB15501 DPA10202-DPB16501 DPA10301-DPB10101 DPA10301-DPB10201 DPA10301-DPB10202 DPA10301-DPB10401 DPA10301-DPB10402 DPA10301-DPB110501 DPA10301-DPB110601 DPA10301-DPB11101 DPA10301-DPB11301 DPA10301-DPB11701 DPA10301-DPB11801 DPA10301-DPB12301 DPA10301-DPB13901 DPA10301-DPB14001 DPA10301-DPB14901 DPA10301-DPB15501 DPA10301-DPB16501 DPA10301-DPB17501 DPA10301-DPB18001 DPA10401-DPB10101 DPA10401-DPB10201 DPA10401-DPB10202 DPA10401-DPB10301 DPA10401-DPB10402 DPA10401-DPB10501; note = HLAs: DPA10401-DPB110501 DPA10401-DPB11301 DPA10401-DPB113301 DPA10401-DPB11401 DPA10401-DPB14901 DQA10102-DQB10501 DQA10102-DQB10503 DQA10102-DQB10609 DQA10103-DQB10501 DQA10103-DQB10601 DQA10103-DQB10608 DQA10103-DQB10609
KRWIILGLNKIVRM

SEQ ID NO: 4281 - protein, 15 aa, Human immunodeficiency virus 1
  source 1..15: note = HLAs: DRB1_0101 DRB1_0102 DRB1_0103 DRB1_0301 DRB1_0401 DRB1_0402 DRB1_0403 DRB1_0404 DRB1_0405 DRB1_0406 DRB1_0407 DRB1_0408 DRB1_0410 DRB1_0411 DRB1_0701 DRB1_0801 DRB1_0802 DRB1_0803 DRB1_0804 DRB1_0806 DRB1_0809 DRB1_0813 DRB1_0901 DRB1_1001 DRB1_1101 DRB1_1102 DRB1_1103 DRB1_1104 DRB1_1114 DRB1_1201 DRB1_1202 DRB1_1301 DRB1_1302 DRB1_1303 DRB1_1304 DRB1_1305 DRB1_1312 DRB1_1401 DRB1_1402 DRB1_1403 DRB1_1404 DRB1_1405 DRB1_1406 DRB1_1407 DRB1_1418 DRB1_1454 DRB1_1501 DRB1_1502 DRB1_1503 DRB1_1601 DRB1_1602 DPA10103-DPB10101 DPA10103-DPB10201 DPA10103-DPB10202 DPA10103-DPB10301 DPA10103-DPB10401 DPA10103-DPB10402 DPA10103-DPB10501 DPA10103-DPB10601 DPA10103-DPB110501 DPA10103-DPB11101 DPA10103-DPB112401 DPA10103-DPB112601 DPA10103-DPB11501 DPA10103-DPB11601 DPA10103-DPB11801 DPA10103-DPB11901 DPA10103-DPB12001 DPA10103-DPB12301 DPA10103-DPB12901 DPA10103-DPB13101 DPA10103-DPB13401 DPA10103-DPB13901 DPA10103-DPB14001 DPA10103-DPB14101 DPA10103-DPB14801 DPA10103-DPB14901; note = HLAs: DPA10103-DPB15001 DPA10103-DPB15101 DPA10103-DPB15501 DPA10103-DPB15901 DPA10103-DPB18001 DPA10104-DPB10101 DPA10104-DPB10301 DPA10104-DPB11501 DPA10105-DPB10101 DPA10105-DPB10301 DPA10105-DPB10401 DPA10105-DPB11801 DPA10105-DPB15001 DPA10106-DPB10101 DPA10201-DPB10101 DPA10201-DPB10201 DPA10201-DPB10202 DPA10201-DPB10501 DPA10201-DPB110601 DPA10201-DPB11501 DPA10201-DPB11601 DPA10201-DPB11801 DPA10201-DPB11901 DPA10201-DPB13401 DPA10201-DPB15501 DPA10202-DPB10101 DPA10202-DPB10201 DPA10202-DPB10202 DPA10202-DPB10401 DPA10202-DPB10402 DPA10202-DPB10501 DPA10202-DPB10901 DPA10202-DPB110001 DPA10202-DPB110501 DPA10202-DPB110601 DPA10202-DPB11101 DPA10202-DPB11301 DPA10202-DPB113101 DPA10202-DPB11401 DPA10202-DPB11701 DPA10202-DPB11801 DPA10202-DPB11901 DPA10202-DPB12101 DPA10202-DPB12901 DPA10202-DPB13001 DPA10202-DPB13101 DPA10202-DPB13801 DPA10202-DPB15501 DPA10202-DPB16501 DPA10202-DPB18501 DPA10301-DPB10101 DPA10301-DPB10201 DPA10301-DPB10202 DPA10301-DPB10401; note = HLAs: DPA10301-DPB10402 DPA10301-DPB10901 DPA10301-DPB110501 DPA10301-DPB110601 DPA10301-DPB11101 DPA10301-DPB11301 DPA10301-DPB11701 DPA10301-DPB11801 DPA10301-DPB12301 DPA10301-DPB13901 DPA10301-DPB14001 DPA10301-DPB14901 DPA10301-DPB15501 DPA10301-DPB16501 DPA10301-DPB17501 DPA10301-DPB18001 DPA10401-DPB10101 DPA10401-DPB10201 DPA10401-DPB10202 DPA10401-DPB10301 DPA10401-DPB10402 DPA10401-DPB10501 DPA10401-DPB110501 DPA10401-DPB11301 DPA10401-DPB113301 DPA10401-DPB11401 DPA10401-DPB14901 DQA10102-DQB10501 DQA10102-DQB10503 DQA10102-DQB10601 DQA10102-DQB10609 DQA10103-DQB10501 DQA10103-DQB10503 DQA10103-DQB10601 DQA10103-DQB10602 DQA10103-DQB10608 DQA10103-DQB10609 DQA10201-DQB10301 DQA10501-DQB10501 DQA10505-DQB10402 DQA10505-DQB10501
KRWIILGLNKIVRMY

SEQ ID NO: 4282 - protein, 16 aa, Human immunodeficiency virus 1
  source 1..16: note = HLAs: DRB1_0101 DRB1_0102 DRB1_0103 DRB1_0301 DRB1_0401 DRB1_0402 DRB1_0404 DRB1_0405 DRB1_0408 DRB1_0410 DRB1_0701 DRB1_0801 DRB1_0802 DRB1_0803 DRB1_0804 DRB1_0806 DRB1_0809 DRB1_0813 DRB1_0901 DRB1_1001 DRB1_1101 DRB1_1102 DRB1_1103 DRB1_1104 DRB1_1114 DRB1_1201 DRB1_1202 DRB1_1301 DRB1_1302 DRB1_1303 DRB1_1304 DRB1_1305 DRB1_1312 DRB1_1401 DRB1_1402 DRB1_1403 DRB1_1404 DRB1_1405 DRB1_1406 DRB1_1407 DRB1_1418 DRB1_1454 DRB1_1501 DRB1_1502 DRB1_1503 DRB1_1601 DRB1_1602 DPA10103-DPB10101 DPA10103-DPB10201 DPA10103-DPB10202 DPA10103-DPB10301 DPA10103-DPB10401 DPA10103-DPB10501 DPA10103-DPB10601 DPA10103-DPB11101 DPA10103-DPB112401 DPA10103-DPB112601 DPA10103-DPB11501 DPA10103-DPB11601 DPA10103-DPB11801 DPA10103-DPB11901 DPA10103-DPB12001 DPA10103-DPB12301 DPA10103-DPB12901 DPA10103-DPB13101 DPA10103-DPB13401 DPA10103-DPB13901 DPA10103-DPB14001 DPA10103-DPB14101 DPA10103-DPB14801 DPA10103-DPB15001 DPA10103-DPB15501 DPA10103-DPB15901 DPA10104-DPB10101 DPA10104-DPB10301 DPA10104-DPB11501; note = HLAs: DPA10105-DPB10101 DPA10105-DPB10301 DPA10105-DPB10401 DPA10105-DPB11801 DPA10105-DPB15001 DPA10106-DPB10101 DPA10106-DPB11101 DPA10201-DPB10101 DPA10201-DPB10201 DPA10201-DPB10202 DPA10201-DPB10501 DPA10201-DPB110601 DPA10201-DPB11101 DPA10201-DPB11501 DPA10201-DPB11601 DPA10201-DPB11801 DPA10201-DPB11901 DPA10201-DPB13401 DPA10201-DPB15501 DPA10202-DPB10101 DPA10202-DPB10201 DPA10202-DPB10202 DPA10202-DPB10401 DPA10202-DPB10402 DPA10202-DPB10501 DPA10202-DPB10901 DPA10202-DPB110001 DPA10202-DPB110501 DPA10202-DPB110601 DPA10202-DPB11101 DPA10202-DPB11301 DPA10202-DPB113101 DPA10202-DPB11701 DPA10202-DPB11801 DPA10202-DPB11901 DPA10202-DPB12101 DPA10202-DPB12901 DPA10202-DPB13001 DPA10202-DPB13101 DPA10202-DPB13801 DPA10202-DPB15501 DPA10202-DPB16501 DPA10202-DPB18501 DPA10301-DPB10101 DPA10301-DPB10201 DPA10301-DPB10202 DPA10301-DPB10301 DPA10301-DPB10401 DPA10301-DPB10402 DPA10301-DPB10901 DPA10301-DPB110501 DPA10301-DPB110601 DPA10301-DPB11101 DPA10301-DPB11301; note = HLAs: DPA10301-DPB11701 DPA10301-DPB11801 DPA10301-DPB12301 DPA10301-DPB13901 DPA10301-DPB14001 DPA10301-DPB14901 DPA10301-DPB15501 DPA10301-DPB16501 DPA10301-DPB17501 DPA10301-DPB18001 DPA10401-DPB10101 DPA10401-DPB10201 DPA10401-DPB10202 DPA10401-DPB10301 DPA10401-DPB10402 DPA10401-DPB10501 DPA10401-DPB110501 DPA10401-DPB11301 DPA10401-DPB113301 DPA10401-DPB11401 DPA10401-DPB14901 DQA10102-DQB10501 DQA10102-DQB10503 DQA10102-DQB10601 DQA10102-DQB10609 DQA10103-DQB10501 DQA10103-DQB10503 DQA10103-DQB10601 DQA10103-DQB10602 DQA10103-DQB10608 DQA10103-DQB10609 DQA10201-DQB10301
KRWIILGLNKIVRMYS

SEQ ID NO: 4283 - protein, 17 aa, Human immunodeficiency virus 1
  source 1..17: note = HLAs: DRB1_0101 DRB1_0102 DRB1_0103 DRB1_0301 DRB1_0401 DRB1_0402 DRB1_0404 DRB1_0405 DRB1_0408 DRB1_0410 DRB1_0701 DRB1_0801 DRB1_0802 DRB1_0803 DRB1_0804 DRB1_0806 DRB1_0809 DRB1_0813 DRB1_0901 DRB1_1001 DRB1_1101 DRB1_1102 DRB1_1103 DRB1_1104 DRB1_1114 DRB1_1201 DRB1_1202 DRB1_1301 DRB1_1302 DRB1_1303 DRB1_1304 DRB1_1305 DRB1_1312 DRB1_1401 DRB1_1402 DRB1_1403 DRB1_1404 DRB1_1405 DRB1_1406 DRB1_1407 DRB1_1418 DRB1_1454 DRB1_1501 DRB1_1502 DRB1_1503 DRB1_1601 DRB1_1602 DPA10103-DPB10101 DPA10103-DPB10201 DPA10103-DPB10202 DPA10103-DPB10401 DPA10103-DPB10501 DPA10103-DPB10601 DPA10103-DPB11101 DPA10103-DPB112601 DPA10103-DPB11501 DPA10103-DPB11601 DPA10103-DPB11801 DPA10103-DPB11901 DPA10103-DPB12001 DPA10103-DPB12301 DPA10103-DPB13101 DPA10103-DPB13401 DPA10103-DPB13901 DPA10103-DPB14001 DPA10103-DPB14101 DPA10103-DPB14801 DPA10103-DPB15001 DPA10103-DPB15901 DPA10104-DPB10101 DPA10104-DPB11501 DPA10105-DPB10101 DPA10105-DPB10401 DPA10105-DPB11801 DPA10105-DPB15001 DPA10106-DPB10101; note = HLAs: DPA10201-DPB10101 DPA10201-DPB10201 DPA10201-DPB10202 DPA10201-DPB10501 DPA10201-DPB110601 DPA10201-DPB11501 DPA10201-DPB11601 DPA10201-DPB11801 DPA10201-DPB11901 DPA10201-DPB13401 DPA10202-DPB10101 DPA10202-DPB10201 DPA10202-DPB10202 DPA10202-DPB10401 DPA10202-DPB10402 DPA10202-DPB10501 DPA10202-DPB10901 DPA10202-DPB110001 DPA10202-DPB110501 DPA10202-DPB110601 DPA10202-DPB11101 DPA10202-DPB11301 DPA10202-DPB113101 DPA10202-DPB11701 DPA10202-DPB11801 DPA10202-DPB11901 DPA10202-DPB12101 DPA10202-DPB12901 DPA10202-DPB13001 DPA10202-DPB13101 DPA10202-DPB13801 DPA10202-DPB15501 DPA10202-DPB16501 DPA10202-DPB18501 DPA10301-DPB10101 DPA10301-DPB10201 DPA10301-DPB10202 DPA10301-DPB10401 DPA10301-DPB10402 DPA10301-DPB110501 DPA10301-DPB110601 DPA10301-DPB11101 DPA10301-DPB11301 DPA10301-DPB11701 DPA10301-DPB11801 DPA10301-DPB12301 DPA10301-DPB13901 DPA10301-DPB14001 DPA10301-DPB14901 DPA10301-DPB15501 DPA10301-DPB16501 DPA10301-DPB17501 DPA10301-DPB18001 DPA10401-DPB10101; note = HLAs: DPA10401-DPB10201 DPA10401-DPB10202 DPA10401-DPB10301 DPA10401-DPB10402 DPA10401-DPB10501 DPA10401-DPB110501 DPA10401-DPB11301 DPA10401-DPB113301 DPA10401-DPB11401 DPA10401-DPB14901 DQA10102-DQB10501 DQA10102-DQB10503 DQA10102-DQB10601 DQA10102-DQB10609 DQA10103-DQB10501 DQA10103-DQB10503 DQA10103-DQB10601 DQA10103-DQB10602 DQA10103-DQB10608 DQA10103-DQB10609
KRWIILGLNKIVRMYSP

SEQ ID NO: 4284 - protein, 18 aa, Human immunodeficiency virus 1
  source 1..18: note = HLAs: DRB1_0101 DRB1_0102 DRB1_0404 DRB1_0408 DRB1_0410 DRB1_0701 DRB1_0801 DRB1_0802 DRB1_0804 DRB1_0806 DRB1_0809 DRB1_0813 DRB1_0901 DRB1_1001 DRB1_1101 DRB1_1102 DRB1_1103 DRB1_1104 DRB1_1114 DRB1_1201 DRB1_1202 DRB1_1301 DRB1_1302 DRB1_1304 DRB1_1305 DRB1_1312 DRB1_1401 DRB1_1402 DRB1_1403 DRB1_1404 DRB1_1405 DRB1_1406 DRB1_1454 DRB1_1501 DRB1_1502 DRB1_1503 DRB1_1601 DRB1_1602 DPA10103-DPB10101 DPA10103-DPB10201 DPA10103-DPB10202 DPA10103-DPB10501 DPA10103-DPB11501 DPA10103-DPB11601 DPA10103-DPB11801 DPA10103-DPB11901 DPA10103-DPB13401 DPA10103-DPB14001 DPA10103-DPB14801 DPA10103-DPB15001 DPA10104-DPB10101 DPA10104-DPB11501 DPA10105-DPB10101 DPA10105-DPB11801 DPA10105-DPB15001 DPA10201-DPB11501 DPA10202-DPB10101 DPA10202-DPB10201 DPA10202-DPB10202 DPA10202-DPB10401 DPA10202-DPB10501 DPA10202-DPB110601 DPA10202-DPB11801 DPA10202-DPB11901 DPA10202-DPB13101 DPA10202-DPB13801 DPA10202-DPB15501 DPA10202-DPB16501 DPA10301-DPB10101 DPA10301-DPB10201 DPA10301-DPB10202 DPA10301-DPB10401; note = HLAs: DPA10301-DPB10402 DPA10301-DPB110501 DPA10301-DPB110601 DPA10301-DPB11801 DPA10301-DPB12301 DPA10301-DPB13901 DPA10301-DPB14001 DPA10301-DPB14901 DPA10301-DPB15501 DPA10301-DPB16501 DPA10301-DPB17501 DPA10301-DPB18001 DPA10401-DPB10101 DPA10401-DPB10201 DPA10401-DPB10202 DPA10401-DPB10501 DQA10102-DQB10501 DQA10102-DQB10503 DQA10102-DQB10609 DQA10103-DQB10501 DQA10103-DQB10601 DQA10103-DQB10609
KRWIILGLNKIVRMYSPV

SEQ ID NO: 4285 - protein, 19 aa, Human immunodeficiency virus 1
  source 1..19: note = HLAs: DRB1_0101 DRB1_0102 DRB1_0103 DRB1_0301 DRB1_0401 DRB1_0402 DRB1_0404 DRB1_0405 DRB1_0408 DRB1_0410 DRB1_0701 DRB1_0801 DRB1_0802 DRB1_0803 DRB1_0804 DRB1_0806 DRB1_0809 DRB1_0813 DRB1_0901 DRB1_1001 DRB1_1101 DRB1_1102 DRB1_1103 DRB1_1104 DRB1_1114 DRB1_1201 DRB1_1202 DRB1_1301 DRB1_1302 DRB1_1303 DRB1_1304 DRB1_1305 DRB1_1312 DRB1_1401 DRB1_1402 DRB1_1403 DRB1_1404 DRB1_1405 DRB1_1406 DRB1_1407 DRB1_1418 DRB1_1454 DRB1_1501 DRB1_1502 DRB1_1503 DRB1_1601 DRB1_1602 DPA10103-DPB10101 DPA10103-DPB10201 DPA10103-DPB10202 DPA10103-DPB10501 DPA10103-DPB11101 DPA10103-DPB11501 DPA10103-DPB11601 DPA10103-DPB11801 DPA10103-DPB11901 DPA10103-DPB13101 DPA10103-DPB13401 DPA10103-DPB14001 DPA10103-DPB14101 DPA10103-DPB14801 DPA10103-DPB15001 DPA10104-DPB10101 DPA10104-DPB11501 DPA10105-DPB10101 DPA10105-DPB11801 DPA10105-DPB15001 DPA10106-DPB10101 DPA10201-DPB10101 DPA10201-DPB10501 DPA10201-DPB110601 DPA10201-DPB11501 DPA10201-DPB11601 DPA10201-DPB11801 DPA10201-DPB11901 DPA10202-DPB10101; note = HLAs: DPA10202-DPB10201 DPA10202-DPB10202 DPA10202-DPB10401 DPA10202-DPB10501 DPA10202-DPB110001 DPA10202-DPB110601 DPA10202-DPB11101 DPA10202-DPB11301 DPA10202-DPB11801 DPA10202-DPB11901 DPA10202-DPB12101 DPA10202-DPB13001 DPA10202-DPB13101 DPA10202-DPB13801 DPA10202-DPB15501 DPA10202-DPB16501 DPA10301-DPB10101 DPA10301-DPB10201 DPA10301-DPB10202 DPA10301-DPB10401 DPA10301-DPB10402 DPA10301-DPB110501 DPA10301-DPB110601 DPA10301-DPB11101 DPA10301-DPB11301 DPA10301-DPB11701 DPA10301-DPB11801 DPA10301-DPB12301 DPA10301-DPB13901 DPA10301-DPB14001 DPA10301-DPB14901 DPA10301-DPB15501 DPA10301-DPB16501 DPA10301-DPB17501 DPA10301-DPB18001 DPA10401-DPB10101 DPA10401-DPB10201 DPA10401-DPB10202 DPA10401-DPB10301 DPA10401-DPB10402 DPA10401-DPB10501 DPA10401-DPB110501 DPA10401-DPB11301 DPA10401-DPB113301 DPA10401-DPB11401 DPA10401-DPB14901 DQA10102-DQB10501 DQA10102-DQB10503 DQA10102-DQB10601 DQA10102-DQB10602 DQA10102-DQB10609 DQA10103-DQB10501 DQA10103-DQB10503 DQA10103-DQB10601; note = HLAs: DQA10103-DQB10602 DQA10103-DQB10608 DQA10103-DQB10609
KRWIILGLNKIVRMYSPVS

SEQ ID NO: 4286 - protein, 20 aa, Human immunodeficiency virus 1
  source 1..20: note = HLAs: DRB1_0101 DRB1_0102 DRB1_0103 DRB1_0301 DRB1_0401 DRB1_0402 DRB1_0403 DRB1_0404 DRB1_0405 DRB1_0406 DRB1_0407 DRB1_0408 DRB1_0410 DRB1_0701 DRB1_0801 DRB1_0802 DRB1_0803 DRB1_0804 DRB1_0806 DRB1_0809 DRB1_0813 DRB1_0901 DRB1_1001 DRB1_1101 DRB1_1102 DRB1_1103 DRB1_1104 DRB1_1114 DRB1_1201 DRB1_1202 DRB1_1301 DRB1_1302 DRB1_1303 DRB1_1304 DRB1_1305 DRB1_1312 DRB1_1401 DRB1_1402 DRB1_1403 DRB1_1404 DRB1_1405 DRB1_1406 DRB1_1407 DRB1_1418 DRB1_1454 DRB1_1501 DRB1_1502 DRB1_1503 DRB1_1601 DRB1_1602 DPA10103-DPB10101 DPA10103-DPB10201 DPA10103-DPB10202 DPA10103-DPB10301 DPA10103-DPB10501 DPA10103-DPB10601 DPA10103-DPB11101 DPA10103-DPB112401 DPA10103-DPB11301 DPA10103-DPB113301 DPA10103-DPB11401 DPA10103-DPB11501 DPA10103-DPB11601 DPA10103-DPB11801 DPA10103-DPB11901 DPA10103-DPB12001 DPA10103-DPB12101 DPA10103-DPB13001 DPA10103-DPB13101 DPA10103-DPB13401 DPA10103-DPB14001 DPA10103-DPB14101 DPA10103-DPB14801 DPA10103-DPB15001 DPA10103-DPB15501 DPA10103-DPB15901 DPA10104-DPB10101; note = HLAs: DPA10104-DPB10301 DPA10104-DPB11301 DPA10104-DPB11501 DPA10105-DPB10101 DPA10105-DPB10301 DPA10105-DPB11801 DPA10105-DPB15001 DPA10106-DPB10101 DPA10201-DPB10101 DPA10201-DPB10201 DPA10201-DPB10202 DPA10201-DPB10501 DPA10201-DPB110601 DPA10201-DPB11501 DPA10201-DPB11601 DPA10201-DPB11801 DPA10201-DPB11901 DPA10201-DPB15501 DPA10202-DPB10101 DPA10202-DPB10201 DPA10202-DPB10202 DPA10202-DPB10401 DPA10202-DPB10402 DPA10202-DPB10501 DPA10202-DPB10901 DPA10202-DPB110001 DPA10202-DPB110501 DPA10202-DPB110601 DPA10202-DPB11101 DPA10202-DPB11301 DPA10202-DPB113101 DPA10202-DPB11401 DPA10202-DPB11701 DPA10202-DPB11801 DPA10202-DPB11901 DPA10202-DPB12101 DPA10202-DPB12901 DPA10202-DPB13001 DPA10202-DPB13101 DPA10202-DPB13801 DPA10202-DPB15501 DPA10202-DPB16501 DPA10202-DPB18501 DPA10301-DPB10101 DPA10301-DPB10201 DPA10301-DPB10202 DPA10301-DPB10301 DPA10301-DPB10401 DPA10301-DPB10402 DPA10301-DPB10901 DPA10301-DPB110501 DPA10301-DPB110601 DPA10301-DPB11101 DPA10301-DPB11301; note = HLAs: DPA10301-DPB11701 DPA10301-DPB11801 DPA10301-DPB12301 DPA10301-DPB13901 DPA10301-DPB14001 DPA10301-DPB14901 DPA10301-DPB15501 DPA10301-DPB16501 DPA10301-DPB17501 DPA10301-DPB18001 DPA10401-DPB10101 DPA10401-DPB10201 DPA10401-DPB10202 DPA10401-DPB10301 DPA10401-DPB10402 DPA10401-DPB10501 DPA10401-DPB110501 DPA10401-DPB11301 DPA10401-DPB113301 DPA10401-DPB11401 DPA10401-DPB14901 DQA10102-DQB10501 DQA10102-DQB10503 DQA10102-DQB10601 DQA10102-DQB10602 DQA10102-DQB10609 DQA10102-DQB10611 DQA10103-DQB10501 DQA10103-DQB10503 DQA10103-DQB10601 DQA10103-DQB10602 DQA10103-DQB10603 DQA10103-DQB10604 DQA10103-DQB10608 DQA10103-DQB10609 DQA10501-DQB10501 DQA10505-DQB10402 DQA10505-DQB10501
KRWIILGLNKIVRMYSPVSI

SEQ ID NO: 4287 - protein, 21 aa, Human immunodeficiency virus 1
  source 1..21: note = HLAs: DRB1_0101 DRB1_0102 DRB1_0103 DRB1_0401 DRB1_0402 DRB1_0404 DRB1_0405 DRB1_0407 DRB1_0408 DRB1_0410 DRB1_0701 DRB1_0801 DRB1_0802 DRB1_0803 DRB1_0804 DRB1_0806 DRB1_0809 DRB1_0813 DRB1_0901 DRB1_1001 DRB1_1101 DRB1_1102 DRB1_1103 DRB1_1104 DRB1_1114 DRB1_1201 DRB1_1202 DRB1_1301 DRB1_1302 DRB1_1303 DRB1_1304 DRB1_1305 DRB1_1312 DRB1_1401 DRB1_1402 DRB1_1403 DRB1_1404 DRB1_1405 DRB1_1406 DRB1_1407 DRB1_1418 DRB1_1454 DRB1_1501 DRB1_1502 DRB1_1503 DRB1_1601 DRB1_1602 DPA10103-DPB10101 DPA10103-DPB10201 DPA10103-DPB10202 DPA10103-DPB10301 DPA10103-DPB10501 DPA10103-DPB10601 DPA10103-DPB10901 DPA10103-DPB11001 DPA10103-DPB11101 DPA10103-DPB112401 DPA10103-DPB11301 DPA10103-DPB113101 DPA10103-DPB113301 DPA10103-DPB11401 DPA10103-DPB11501 DPA10103-DPB11601 DPA10103-DPB11701 DPA10103-DPB11801 DPA10103-DPB11901 DPA10103-DPB12001 DPA10103-DPB12101 DPA10103-DPB12901 DPA10103-DPB13001 DPA10103-DPB13101 DPA10103-DPB13401 DPA10103-DPB14001 DPA10103-DPB14101 DPA10103-DPB14801; note = HLAs: DPA10103-DPB15001 DPA10103-DPB15501 DPA10104-DPB10101 DPA10104-DPB10301 DPA10104-DPB11001 DPA10104-DPB11301 DPA10104-DPB11501 DPA10105-DPB10101 DPA10105-DPB10301 DPA10105-DPB11801 DPA10105-DPB15001 DPA10106-DPB10101 DPA10201-DPB10101 DPA10201-DPB10501 DPA10201-DPB110601 DPA10201-DPB11501 DPA10201-DPB11601 DPA10201-DPB11901 DPA10201-DPB15501 DPA10202-DPB10101 DPA10202-DPB10201 DPA10202-DPB10202 DPA10202-DPB10501 DPA10202-DPB10901 DPA10202-DPB110601 DPA10202-DPB11101 DPA10202-DPB11301 DPA10202-DPB113101 DPA10202-DPB11401 DPA10202-DPB11701 DPA10202-DPB11801 DPA10202-DPB11901 DPA10202-DPB12101 DPA10202-DPB13001 DPA10202-DPB13101 DPA10202-DPB13801 DPA10202-DPB15501 DPA10202-DPB16501 DPA10202-DPB18501 DPA10301-DPB10101 DPA10301-DPB10201 DPA10301-DPB10202 DPA10301-DPB10301 DPA10301-DPB10401 DPA10301-DPB10402 DPA10301-DPB10901 DPA10301-DPB110501 DPA10301-DPB110601 DPA10301-DPB11101 DPA10301-DPB11301 DPA10301-DPB11701 DPA10301-DPB11801 DPA10301-DPB12301 DPA10301-DPB13901; note = HLAs: DPA10301-DPB14001 DPA10301-DPB14901 DPA10301-DPB15501 DPA10301-DPB16501 DPA10301-DPB17501 DPA10301-DPB18001 DPA10401-DPB10101 DPA10401-DPB10201 DPA10401-DPB10202 DPA10401-DPB10301 DPA10401-DPB10402 DPA10401-DPB10501 DPA10401-DPB110501 DPA10401-DPB11301 DPA10401-DPB113301 DPA10401-DPB11401 DPA10401-DPB14901 DQA10102-DQB10501 DQA10102-DQB10503 DQA10102-DQB10601 DQA10102-DQB10609 DQA10103-DQB10501 DQA10103-DQB10503 DQA10103-DQB10601 DQA10103-DQB10602 DQA10103-DQB10608 DQA10103-DQB10609 DQA10501-DQB10501 DQA10505-DQB10402 DQA10505-DQB10501
KRWIILGLNKIVRMYSPVSIL

SEQ ID NO: 4288 - protein, 22 aa, Human immunodeficiency virus 1
  source 1..22: note = HLAs: DRB1_0101 DRB1_0102 DRB1_0103 DRB1_0301 DRB1_0401 DRB1_0402 DRB1_0403 DRB1_0404 DRB1_0405 DRB1_0406 DRB1_0407 DRB1_0408 DRB1_0410 DRB1_0701 DRB1_0801 DRB1_0802 DRB1_0803 DRB1_0804 DRB1_0806 DRB1_0809 DRB1_0813 DRB1_0901 DRB1_1001 DRB1_1101 DRB1_1102 DRB1_1103 DRB1_1104 DRB1_1114 DRB1_1201 DRB1_1202 DRB1_1301 DRB1_1302 DRB1_1303 DRB1_1304 DRB1_1305 DRB1_1312 DRB1_1401 DRB1_1402 DRB1_1403 DRB1_1404 DRB1_1405 DRB1_1406 DRB1_1407 DRB1_1418 DRB1_1454 DRB1_1501 DRB1_1502 DRB1_1503 DRB1_1601 DRB1_1602 DPA10103-DPB10101 DPA10103-DPB10201 DPA10103-DPB10202 DPA10103-DPB10301 DPA10103-DPB10501 DPA10103-DPB10601 DPA10103-DPB10901 DPA10103-DPB11001 DPA10103-DPB11101 DPA10103-DPB112401 DPA10103-DPB11301 DPA10103-DPB113101 DPA10103-DPB113301 DPA10103-DPB11401 DPA10103-DPB11501 DPA10103-DPB11601 DPA10103-DPB11701 DPA10103-DPB11801 DPA10103-DPB11901 DPA10103-DPB12001 DPA10103-DPB12101 DPA10103-DPB12901 DPA10103-DPB13001 DPA10103-DPB13101 DPA10103-DPB13401 DPA10103-DPB14001 DPA10103-DPB14101; note = HLAs: DPA10103-DPB14801 DPA10103-DPB15001 DPA10103-DPB15501 DPA10104-DPB10101 DPA10104-DPB10301 DPA10104-DPB11001 DPA10104-DPB11301 DPA10104-DPB11501 DPA10105-DPB10101 DPA10105-DPB10301 DPA10105-DPB11801 DPA10105-DPB15001 DPA10106-DPB10101 DPA10201-DPB10101 DPA10201-DPB10501 DPA10201-DPB110601 DPA10201-DPB11401 DPA10201-DPB11501 DPA10201-DPB11601 DPA10201-DPB11901 DPA10201-DPB15501 DPA10202-DPB10101 DPA10202-DPB10201 DPA10202-DPB10202 DPA10202-DPB10301 DPA10202-DPB10501 DPA10202-DPB10901 DPA10202-DPB110601 DPA10202-DPB11101 DPA10202-DPB11301 DPA10202-DPB113101 DPA10202-DPB11401 DPA10202-DPB11701 DPA10202-DPB11801 DPA10202-DPB11901 DPA10202-DPB12101 DPA10202-DPB12901 DPA10202-DPB13001 DPA10202-DPB13101 DPA10202-DPB13801 DPA10202-DPB14501 DPA10202-DPB15501 DPA10202-DPB16501 DPA10202-DPB18501 DPA10301-DPB10101 DPA10301-DPB10201 DPA10301-DPB10202 DPA10301-DPB10301 DPA10301-DPB10401 DPA10301-DPB10402 DPA10301-DPB10901 DPA10301-DPB110501 DPA10301-DPB110601 DPA10301-DPB11101; note = HLAs: DPA10301-DPB11301 DPA10301-DPB11701 DPA10301-DPB11801 DPA10301-DPB12301 DPA10301-DPB13901 DPA10301-DPB14001 DPA10301-DPB14901 DPA10301-DPB15501 DPA10301-DPB16501 DPA10301-DPB17501 DPA10301-DPB18001 DPA10401-DPB10101 DPA10401-DPB10201 DPA10401-DPB10202 DPA10401-DPB10301 DPA10401-DPB10402 DPA10401-DPB10501 DPA10401-DPB110501 DPA10401-DPB11301 DPA10401-DPB113301 DPA10401-DPB11401 DPA10401-DPB14901 DQA10102-DQB10501 DQA10102-DQB10503 DQA10102-DQB10601 DQA10102-DQB10609 DQA10103-DQB10501 DQA10103-DQB10503 DQA10103-DQB10601 DQA10103-DQB10602 DQA10103-DQB10604 DQA10103-DQB10608 DQA10103-DQB10609 DQA10501-DQB10501 DQA10505-DQB10402 DQA10505-DQB10501
KRWIILGLNKIVRMYSPVSILD

SEQ ID NO: 4289 - protein, 23 aa, Human immunodeficiency virus 1
  source 1..23: note = HLAs: DRB1_0101 DRB1_0102 DRB1_0103 DRB1_0301 DRB1_0401 DRB1_0402 DRB1_0403 DRB1_0404 DRB1_0405 DRB1_0406 DRB1_0407 DRB1_0408 DRB1_0410 DRB1_0701 DRB1_0801 DRB1_0802 DRB1_0803 DRB1_0804 DRB1_0806 DRB1_0809 DRB1_0813 DRB1_0901 DRB1_1001 DRB1_1101 DRB1_1102 DRB1_1103 DRB1_1104 DRB1_1114 DRB1_1201 DRB1_1202 DRB1_1301 DRB1_1302 DRB1_1303 DRB1_1304 DRB1_1305 DRB1_1312 DRB1_1401 DRB1_1402 DRB1_1403 DRB1_1404 DRB1_1405 DRB1_1406 DRB1_1407 DRB1_1418 DRB1_1454 DRB1_1501 DRB1_1502 DRB1_1503 DRB1_1601 DRB1_1602 DPA10103-DPB10101 DPA10103-DPB10201 DPA10103-DPB10202 DPA10103-DPB10301 DPA10103-DPB10401 DPA10103-DPB10501 DPA10103-DPB10601 DPA10103-DPB10901 DPA10103-DPB11001 DPA10103-DPB11101 DPA10103-DPB112401 DPA10103-DPB112601 DPA10103-DPB11301 DPA10103-DPB113101 DPA10103-DPB113301 DPA10103-DPB11401 DPA10103-DPB11501 DPA10103-DPB11601 DPA10103-DPB11701 DPA10103-DPB11801 DPA10103-DPB11901 DPA10103-DPB12001 DPA10103-DPB12101 DPA10103-DPB12301 DPA10103-DPB12901 DPA10103-DPB13001 DPA10103-DPB13101; note = HLAs: DPA10103-DPB13401 DPA10103-DPB13901 DPA10103-DPB14001 DPA10103-DPB14101 DPA10103-DPB14801 DPA10103-DPB15001 DPA10103-DPB15501 DPA10103-DPB15901 DPA10104-DPB10101 DPA10104-DPB10301 DPA10104-DPB11001 DPA10104-DPB11301 DPA10104-DPB11501 DPA10105-DPB10101 DPA10105-DPB10301 DPA10105-DPB10401 DPA10105-DPB11801 DPA10105-DPB15001 DPA10106-DPB10101 DPA10106-DPB11101 DPA10201-DPB10101 DPA10201-DPB10301 DPA10201-DPB10501 DPA10201-DPB10601 DPA10201-DPB10901 DPA10201-DPB110601 DPA10201-DPB11101 DPA10201-DPB11301 DPA10201-DPB113301 DPA10201-DPB11401 DPA10201-DPB11501 DPA10201-DPB11601 DPA10201-DPB11801 DPA10201-DPB11901 DPA10201-DPB13001 DPA10201-DPB13401 DPA10201-DPB14501 DPA10201-DPB15501 DPA10201-DPB19101 DPA10202-DPB10101 DPA10202-DPB10201 DPA10202-DPB10202 DPA10202-DPB10301 DPA10202-DPB10401 DPA10202-DPB10501 DPA10202-DPB10901 DPA10202-DPB110001 DPA10202-DPB110601 DPA10202-DPB11101 DPA10202-DPB11301 DPA10202-DPB113101 DPA10202-DPB11401 DPA10202-DPB11701 DPA10202-DPB11801; note = HLAs: DPA10202-DPB11901 DPA10202-DPB12101 DPA10202-DPB12901 DPA10202-DPB13001 DPA10202-DPB13101 DPA10202-DPB13801 DPA10202-DPB14501 DPA10202-DPB15501 DPA10202-DPB16501 DPA10202-DPB18501 DPA10301-DPB10101 DPA10301-DPB10201 DPA10301-DPB10202 DPA10301-DPB10301 DPA10301-DPB10401 DPA10301-DPB10402 DPA10301-DPB10901 DPA10301-DPB110501 DPA10301-DPB110601 DPA10301-DPB11101 DPA10301-DPB11301 DPA10301-DPB11701 DPA10301-DPB11801 DPA10301-DPB12301 DPA10301-DPB13901 DPA10301-DPB14001 DPA10301-DPB14901 DPA10301-DPB15501 DPA10301-DPB16501 DPA10301-DPB17501 DPA10301-DPB18001 DPA10401-DPB10101 DPA10401-DPB10201 DPA10401-DPB10202 DPA10401-DPB10301 DPA10401-DPB10402 DPA10401-DPB10501 DPA10401-DPB110501 DPA10401-DPB11301 DPA10401-DPB113301 DPA10401-DPB11401 DPA10401-DPB14901 DQA10102-DQB10501 DQA10102-DQB10503 DQA10102-DQB10601 DQA10102-DQB10604 DQA10102-DQB10609 DQA10103-DQB10501 DQA10103-DQB10503 DQA10103-DQB10601 DQA10103-DQB10602 DQA10103-DQB10604 DQA10103-DQB10608 DQA10103-DQB10609 DQA10501-DQB10501; note = HLAs: DQA10505-DQB10402 DQA10505-DQB10501
KRWIILGLNKIVRMYSPVSILDI

SEQ ID NO: 4290 - protein, 13 aa, Human immunodeficiency virus 1
  source 1..13: note = HLAs: DQA10501-DQB10201 DQA10505-DQB10201 DQA10505-DQB10202
KSVTVLDVGDAYF

SEQ ID NO: 4291 - protein, 14 aa, Human immunodeficiency virus 1
  source 1..14: note = HLAs: DQA10102-DQB10501 DQA10102-DQB10604 DQA10102-DQB10609 DQA10501-DQB10201 DQA10505-DQB10201 DQA10505-DQB10202
KSVTVLDVGDAYFS

SEQ ID NO: 4292 - protein, 15 aa, Human immunodeficiency virus 1
  source 1..15: note = HLAs: DRB1_0101 DRB1_0102 DRB1_0301 DRB1_0404 DRB1_0410 DRB1_1001 DPA10301-DPB10101 DQA10102-DQB10501 DQA10102-DQB10503 DQA10102-DQB10604 DQA10102-DQB10609 DQA10103-DQB10501 DQA10103-DQB10609 DQA10201-DQB10301 DQA10501-DQB10201 DQA10501-DQB10301 DQA10501-DQB10319 DQA10503-DQB10301 DQA10505-DQB10201 DQA10505-DQB10202 DQA10505-DQB10301 DQA10505-DQB10309 DQA10505-DQB10319 DQA10508-DQB10301 DQA10509-DQB10301
KSVTVLDVGDAYFSV

SEQ ID NO: 4293 - protein, 16 aa, Human immunodeficiency virus 1
  source 1..16: note = HLAs: DRB1_1001 DPA10301-DPB10101 DQA10102-DQB10501 DQA10102-DQB10503 DQA10102-DQB10604 DQA10102-DQB10609 DQA10103-DQB10501 DQA10103-DQB10609 DQA10201-DQB10301 DQA10501-DQB10201 DQA10501-DQB10301 DQA10501-DQB10319 DQA10503-DQB10301 DQA10505-DQB10201 DQA10505-DQB10202 DQA10505-DQB10301 DQA10505-DQB10309 DQA10505-DQB10319 DQA10508-DQB10301 DQA10509-DQB10301
KSVTVLDVGDAYFSVP

SEQ ID NO: 4294 - protein, 17 aa, Human immunodeficiency virus 1
  source 1..17: note = HLAs: DRB1_0301 DRB1_1001 DPA10301-DPB10101 DQA10102-DQB10501 DQA10102-DQB10503 DQA10102-DQB10604 DQA10102-DQB10609 DQA10103-DQB10501 DQA10103-DQB10609 DQA10201-DQB10301 DQA10501-DQB10201 DQA10505-DQB10201 DQA10505-DQB10202
KSVTVLDVGDAYFSVPL

SEQ ID NO: 4295 - protein, 18 aa, Human immunodeficiency virus 1
  source 1..18: note = HLAs: DQA10102-DQB10501 DQA10102-DQB10609 DQA10501-DQB10201 DQA10505-DQB10201 DQA10505-DQB10202
KSVTVLDVGDAYFSVPLD

SEQ ID NO: 4296 - protein, 13 aa, Human immunodeficiency virus 1
  source 1..13: note = HLAs: DPA10103-DPB10101 DPA10103-DPB10201 DPA10103-DPB10202 DPA10103-DPB11501 DPA10103-DPB14801 DPA10104-DPB10101 DPA10104-DPB11501 DPA10105-DPB10101 DPA10201-DPB11501 DPA10202-DPB10101 DPA10301-DPB10101 DPA10301-DPB10201 DPA10301-DPB10202 DPA10301-DPB10401 DPA10301-DPB110601 DPA10301-DPB11801 DPA10301-DPB12301 DPA10301-DPB13901 DPA10301-DPB14001 DPA10301-DPB16501 DPA10401-DPB10101 DPA10401-DPB10201 DPA10401-DPB10202
KTAVQMAVFIHNF

SEQ ID NO: 4297 - protein, 14 aa, Human immunodeficiency virus 1
  source 1..14: note = HLAs: DRB1_0101 DRB1_1001 DPA10103-DPB10101 DPA10103-DPB10201 DPA10103-DPB10202 DPA10103-DPB10401 DPA10103-DPB10501 DPA10103-DPB112601 DPA10103-DPB11501 DPA10103-DPB11601 DPA10103-DPB11801 DPA10103-DPB11901 DPA10103-DPB12301 DPA10103-DPB13101 DPA10103-DPB13401 DPA10103-DPB13901 DPA10103-DPB14001 DPA10103-DPB14101 DPA10103-DPB14801 DPA10103-DPB15001 DPA10104-DPB10101 DPA10104-DPB11501 DPA10105-DPB10101 DPA10105-DPB10401 DPA10105-DPB11801 DPA10105-DPB15001 DPA10106-DPB10101 DPA10201-DPB10101 DPA10201-DPB10202 DPA10201-DPB110601 DPA10201-DPB11501 DPA10201-DPB11601 DPA10201-DPB11901 DPA10202-DPB10101 DPA10202-DPB10201 DPA10202-DPB10202 DPA10202-DPB110601 DPA10202-DPB11801 DPA10202-DPB11901 DPA10202-DPB13101 DPA10202-DPB15501 DPA10202-DPB16501 DPA10301-DPB10101 DPA10301-DPB10201 DPA10301-DPB10202 DPA10301-DPB10401 DPA10301-DPB10402 DPA10301-DPB110501 DPA10301-DPB110601 DPA10301-DPB11101 DPA10301-DPB11801 DPA10301-DPB12301 DPA10301-DPB13901 DPA10301-DPB14001 DPA10301-DPB14901; note = HLAs: DPA10301-DPB15501 DPA10301-DPB16501 DPA10301-DPB17501 DPA10301-DPB18001 DPA10401-DPB10101 DPA10401-DPB10201 DPA10401-DPB10202 DPA10401-DPB10402 DPA10401-DPB10501 DPA10401-DPB110501 DPA10401-DPB11301 DPA10401-DPB113301 DPA10401-DPB14901 DQA10102-DQB10501 DQA10102-DQB10609
KTAVQMAVFIHNFK

SEQ ID NO: 4298 - protein, 15 aa, Human immunodeficiency virus 1
  source 1..15: note = HLAs: DRB1_0101 DRB1_0102 DRB1_0404 DRB1_0410 DRB1_0701 DRB1_0801 DRB1_0804 DRB1_0806 DRB1_0813 DRB1_0901 DRB1_1001 DRB1_1101 DRB1_1102 DRB1_1103 DRB1_1104 DRB1_1202 DRB1_1301 DRB1_1304 DRB1_1305 DRB1_1406 DRB1_1501 DRB1_1503 DRB1_1601 DRB1_1602 DPA10103-DPB10101 DPA10103-DPB10201 DPA10103-DPB10202 DPA10103-DPB10401 DPA10103-DPB10402 DPA10103-DPB10501 DPA10103-DPB10601 DPA10103-DPB110501 DPA10103-DPB11101 DPA10103-DPB112601 DPA10103-DPB11501 DPA10103-DPB11601 DPA10103-DPB11801 DPA10103-DPB11901 DPA10103-DPB12001 DPA10103-DPB12301 DPA10103-DPB13101 DPA10103-DPB13401 DPA10103-DPB13901 DPA10103-DPB14001 DPA10103-DPB14101 DPA10103-DPB14801 DPA10103-DPB14901 DPA10103-DPB15001 DPA10103-DPB15101 DPA10103-DPB15501 DPA10103-DPB15901 DPA10103-DPB18001 DPA10104-DPB10101 DPA10104-DPB11501 DPA10105-DPB10101 DPA10105-DPB10401 DPA10105-DPB11801 DPA10105-DPB15001 DPA10106-DPB10101 DPA10106-DPB11101 DPA10201-DPB10101 DPA10201-DPB10201 DPA10201-DPB10202 DPA10201-DPB10401 DPA10201-DPB10501; note = HLAs: DPA10201-DPB110601 DPA10201-DPB11101 DPA10201-DPB11301 DPA10201-DPB113301 DPA10201-DPB11501 DPA10201-DPB11601 DPA10201-DPB11801 DPA10201-DPB11901 DPA10201-DPB13401 DPA10201-DPB15501 DPA10202-DPB10101 DPA10202-DPB10201 DPA10202-DPB10202 DPA10202-DPB10401 DPA10202-DPB10402 DPA10202-DPB10501 DPA10202-DPB10901 DPA10202-DPB110001 DPA10202-DPB110501 DPA10202-DPB110601 DPA10202-DPB11101 DPA10202-DPB11301 DPA10202-DPB113101 DPA10202-DPB11701 DPA10202-DPB11801 DPA10202-DPB11901 DPA10202-DPB12101 DPA10202-DPB12901 DPA10202-DPB13001 DPA10202-DPB13101 DPA10202-DPB13801 DPA10202-DPB15501 DPA10202-DPB16501 DPA10202-DPB18501 DPA10301-DPB10101 DPA10301-DPB10201 DPA10301-DPB10202 DPA10301-DPB10401 DPA10301-DPB10402 DPA10301-DPB10901 DPA10301-DPB110501 DPA10301-DPB110601 DPA10301-DPB11101 DPA10301-DPB11301 DPA10301-DPB11701 DPA10301-DPB11801 DPA10301-DPB12301 DPA10301-DPB13901 DPA10301-DPB14001 DPA10301-DPB14901 DPA10301-DPB15501 DPA10301-DPB16501 DPA10301-DPB17501 DPA10301-DPB18001; note = HLAs: DPA10401-DPB10101 DPA10401-DPB10201 DPA10401-DPB10202 DPA10401-DPB10301 DPA10401-DPB10402 DPA10401-DPB10501 DPA10401-DPB110501 DPA10401-DPB11301 DPA10401-DPB113301 DPA10401-DPB11401 DPA10401-DPB14901 DQA10102-DQB10501 DQA10102-DQB10503 DQA10102-DQB10601 DQA10102-DQB10602 DQA10102-DQB10609 DQA10102-DQB10611 DQA10103-DQB10501 DQA10103-DQB10601 DQA10103-DQB10602 DQA10103-DQB10609 DQA10201-DQB10301 DQA10505-DQB10402
KTAVQMAVFIHNFKR

SEQ ID NO: 4299 - protein, 16 aa, Human immunodeficiency virus 1
  source 1..16: note = HLAs: DRB1_0101 DRB1_0410 DRB1_0804 DRB1_0806 DRB1_1001 DRB1_1101 DRB1_1102 DRB1_1103 DRB1_1104 DRB1_1301 DRB1_1304 DRB1_1305 DRB1_1406 DRB1_1501 DRB1_1503 DRB1_1601 DRB1_1602 DPA10103-DPB10101 DPA10103-DPB10201 DPA10103-DPB10202 DPA10103-DPB10401 DPA10103-DPB10402 DPA10103-DPB10501 DPA10103-DPB10601 DPA10103-DPB110501 DPA10103-DPB11101 DPA10103-DPB112601 DPA10103-DPB11501 DPA10103-DPB11601 DPA10103-DPB11801 DPA10103-DPB11901 DPA10103-DPB12001 DPA10103-DPB12301 DPA10103-DPB13101 DPA10103-DPB13401 DPA10103-DPB13901 DPA10103-DPB14001 DPA10103-DPB14101 DPA10103-DPB14801 DPA10103-DPB14901 DPA10103-DPB15001 DPA10103-DPB15101 DPA10103-DPB15501 DPA10103-DPB15901 DPA10103-DPB18001 DPA10104-DPB10101 DPA10104-DPB11501 DPA10105-DPB10101 DPA10105-DPB10401 DPA10105-DPB11801 DPA10105-DPB15001 DPA10106-DPB10101 DPA10106-DPB11101 DPA10201-DPB10101 DPA10201-DPB10201 DPA10201-DPB10202 DPA10201-DPB10501 DPA10201-DPB110601 DPA10201-DPB11101 DPA10201-DPB11301 DPA10201-DPB113301 DPA10201-DPB11501; note = HLAs: DPA10201-DPB11601 DPA10201-DPB11801 DPA10201-DPB11901 DPA10201-DPB13401 DPA10201-DPB15501 DPA10202-DPB10101 DPA10202-DPB10201 DPA10202-DPB10202 DPA10202-DPB10401 DPA10202-DPB10402 DPA10202-DPB10501 DPA10202-DPB10901 DPA10202-DPB110001 DPA10202-DPB110501 DPA10202-DPB110601 DPA10202-DPB11101 DPA10202-DPB11301 DPA10202-DPB113101 DPA10202-DPB11701 DPA10202-DPB11801 DPA10202-DPB11901 DPA10202-DPB12101 DPA10202-DPB12901 DPA10202-DPB13001 DPA10202-DPB13101 DPA10202-DPB13801 DPA10202-DPB15501 DPA10202-DPB16501 DPA10202-DPB18501 DPA10301-DPB10101 DPA10301-DPB10201 DPA10301-DPB10202 DPA10301-DPB10401 DPA10301-DPB10402 DPA10301-DPB10901 DPA10301-DPB110501 DPA10301-DPB110601 DPA10301-DPB11101 DPA10301-DPB11301 DPA10301-DPB11701 DPA10301-DPB11801 DPA10301-DPB12301 DPA10301-DPB13901 DPA10301-DPB14001 DPA10301-DPB14901 DPA10301-DPB15501 DPA10301-DPB16501 DPA10301-DPB17501 DPA10301-DPB18001 DPA10401-DPB10101 DPA10401-DPB10201 DPA10401-DPB10202 DPA10401-DPB10301 DPA10401-DPB10402; note = HLAs: DPA10401-DPB10501 DPA10401-DPB110501 DPA10401-DPB11301 DPA10401-DPB113301 DPA10401-DPB11401 DPA10401-DPB14901 DQA10102-DQB10501 DQA10102-DQB10503 DQA10102-DQB10601 DQA10102-DQB10602 DQA10102-DQB10609 DQA10102-DQB10611 DQA10103-DQB10501 DQA10103-DQB10601 DQA10103-DQB10602 DQA10103-DQB10609 DQA10201-DQB10301
KTAVQMAVFIHNFKRK

SEQ ID NO: 4300 - protein, 17 aa, Human immunodeficiency virus 1
  source 1..17: note = HLAs: DRB1_0101 DRB1_0404 DRB1_0410 DRB1_0801 DRB1_0802 DRB1_0804 DRB1_0806 DRB1_0809 DRB1_0813 DRB1_1001 DRB1_1101 DRB1_1102 DRB1_1103 DRB1_1104 DRB1_1301 DRB1_1304 DRB1_1305 DRB1_1406 DRB1_1501 DRB1_1503 DRB1_1601 DRB1_1602 DPA10103-DPB10101 DPA10103-DPB10201 DPA10103-DPB10202 DPA10103-DPB10401 DPA10103-DPB10402 DPA10103-DPB10501 DPA10103-DPB10601 DPA10103-DPB110501 DPA10103-DPB11101 DPA10103-DPB112601 DPA10103-DPB11501 DPA10103-DPB11601 DPA10103-DPB11801 DPA10103-DPB11901 DPA10103-DPB12001 DPA10103-DPB12301 DPA10103-DPB13101 DPA10103-DPB13401 DPA10103-DPB13901 DPA10103-DPB14001 DPA10103-DPB14101 DPA10103-DPB14801 DPA10103-DPB14901 DPA10103-DPB15001 DPA10103-DPB15101 DPA10103-DPB15501 DPA10103-DPB15901 DPA10103-DPB18001 DPA10104-DPB10101 DPA10104-DPB11501 DPA10105-DPB10101 DPA10105-DPB10401 DPA10105-DPB11801 DPA10105-DPB15001 DPA10106-DPB10101 DPA10106-DPB11101 DPA10201-DPB10101 DPA10201-DPB10201 DPA10201-DPB10202 DPA10201-DPB10501 DPA10201-DPB110601 DPA10201-DPB11101; note = HLAs: DPA10201-DPB11501 DPA10201-DPB11601 DPA10201-DPB11801 DPA10201-DPB11901 DPA10201-DPB13401 DPA10201-DPB15501 DPA10202-DPB10101 DPA10202-DPB10201 DPA10202-DPB10202 DPA10202-DPB10401 DPA10202-DPB10402 DPA10202-DPB10501 DPA10202-DPB10901 DPA10202-DPB110001 DPA10202-DPB110501 DPA10202-DPB110601 DPA10202-DPB11101 DPA10202-DPB11301 DPA10202-DPB113101 DPA10202-DPB11701 DPA10202-DPB11801 DPA10202-DPB11901 DPA10202-DPB12101 DPA10202-DPB12901 DPA10202-DPB13001 DPA10202-DPB13101 DPA10202-DPB13801 DPA10202-DPB15501 DPA10202-DPB16501 DPA10202-DPB18501 DPA10301-DPB10101 DPA10301-DPB10201 DPA10301-DPB10202 DPA10301-DPB10401 DPA10301-DPB10402 DPA10301-DPB10901 DPA10301-DPB110501 DPA10301-DPB110601 DPA10301-DPB11101 DPA10301-DPB11301 DPA10301-DPB11701 DPA10301-DPB11801 DPA10301-DPB12301 DPA10301-DPB13901 DPA10301-DPB14001 DPA10301-DPB14901 DPA10301-DPB15501 DPA10301-DPB16501 DPA10301-DPB17501 DPA10301-DPB18001 DPA10401-DPB10101 DPA10401-DPB10201 DPA10401-DPB10202 DPA10401-DPB10301; note = HLAs: DPA10401-DPB10402 DPA10401-DPB10501 DPA10401-DPB110501 DPA10401-DPB11301 DPA10401-DPB113301 DPA10401-DPB11401 DPA10401-DPB14901 DQA10102-DQB10501 DQA10102-DQB10503 DQA10102-DQB10601 DQA10102-DQB10602 DQA10102-DQB10609 DQA10102-DQB10611 DQA10103-DQB10501 DQA10103-DQB10601 DQA10103-DQB10602 DQA10103-DQB10609
KTAVQMAVFIHNFKRKG

SEQ ID NO: 4301 - protein, 18 aa, Human immunodeficiency virus 1
  source 1..18: note = HLAs: DRB1_0806 DRB1_1001 DRB1_1101 DRB1_1102 DRB1_1103 DRB1_1104 DRB1_1301 DRB1_1304 DRB1_1305 DPA10103-DPB10101 DPA10103-DPB10201 DPA10103-DPB10202 DPA10103-DPB10401 DPA10103-DPB112601 DPA10103-DPB11501 DPA10103-DPB11601 DPA10103-DPB11801 DPA10103-DPB11901 DPA10103-DPB12301 DPA10103-DPB13101 DPA10103-DPB13401 DPA10103-DPB13901 DPA10103-DPB14001 DPA10103-DPB14101 DPA10103-DPB14801 DPA10103-DPB15001 DPA10104-DPB10101 DPA10104-DPB11501 DPA10105-DPB10101 DPA10105-DPB10401 DPA10105-DPB11801 DPA10105-DPB15001 DPA10106-DPB10101 DPA10201-DPB10101 DPA10201-DPB10202 DPA10201-DPB110601 DPA10201-DPB11501 DPA10201-DPB11601 DPA10201-DPB11901 DPA10202-DPB10101 DPA10202-DPB10201 DPA10202-DPB10202 DPA10202-DPB10501 DPA10202-DPB110601 DPA10202-DPB11801 DPA10202-DPB11901 DPA10202-DPB13101 DPA10202-DPB13801 DPA10202-DPB16501 DPA10301-DPB10101 DPA10301-DPB10201 DPA10301-DPB10202 DPA10301-DPB10401 DPA10301-DPB10402 DPA10301-DPB110501 DPA10301-DPB110601 DPA10301-DPB11801 DPA10301-DPB12301; note = HLAs: DPA10301-DPB13901 DPA10301-DPB14001 DPA10301-DPB14901 DPA10301-DPB15501 DPA10301-DPB16501 DPA10301-DPB17501 DPA10301-DPB18001 DPA10401-DPB10101 DPA10401-DPB10201 DPA10401-DPB10202 DPA10401-DPB10501 DQA10102-DQB10501
KTAVQMAVFIHNFKRKGG

SEQ ID NO: 4302 - protein, 19 aa, Human immunodeficiency virus 1
  source 1..19: note = HLAs: DRB1_0101 DRB1_0801 DRB1_0802 DRB1_0804 DRB1_0806 DRB1_0809 DRB1_1001 DRB1_1101 DRB1_1102 DRB1_1103 DRB1_1104 DRB1_1301 DRB1_1304 DRB1_1305 DRB1_1406 DRB1_1501 DRB1_1601 DRB1_1602 DPA10103-DPB10101 DPA10103-DPB10201 DPA10103-DPB10202 DPA10103-DPB10401 DPA10103-DPB10501 DPA10103-DPB11101 DPA10103-DPB112601 DPA10103-DPB11501 DPA10103-DPB11601 DPA10103-DPB11801 DPA10103-DPB11901 DPA10103-DPB12301 DPA10103-DPB13101 DPA10103-DPB13401 DPA10103-DPB13901 DPA10103-DPB14001 DPA10103-DPB14101 DPA10103-DPB14801 DPA10103-DPB15001 DPA10103-DPB15501 DPA10103-DPB15901 DPA10104-DPB10101 DPA10104-DPB11501 DPA10105-DPB10101 DPA10105-DPB10401 DPA10105-DPB11801 DPA10105-DPB15001 DPA10106-DPB10101 DPA10201-DPB10101 DPA10201-DPB10201 DPA10201-DPB10202 DPA10201-DPB10501 DPA10201-DPB110601 DPA10201-DPB11501 DPA10201-DPB11601 DPA10201-DPB11801 DPA10201-DPB11901 DPA10201-DPB13401 DPA10202-DPB10101 DPA10202-DPB10201 DPA10202-DPB10202 DPA10202-DPB10401 DPA10202-DPB10501 DPA10202-DPB110601 DPA10202-DPB11101; note = HLAs: DPA10202-DPB11301 DPA10202-DPB11801 DPA10202-DPB11901 DPA10202-DPB13101 DPA10202-DPB13801 DPA10202-DPB15501 DPA10202-DPB16501 DPA10301-DPB10101 DPA10301-DPB10201 DPA10301-DPB10202 DPA10301-DPB10401 DPA10301-DPB10402 DPA10301-DPB110501 DPA10301-DPB110601 DPA10301-DPB11101 DPA10301-DPB11301 DPA10301-DPB11801 DPA10301-DPB12301 DPA10301-DPB13901 DPA10301-DPB14001 DPA10301-DPB14901 DPA10301-DPB15501 DPA10301-DPB16501 DPA10301-DPB17501 DPA10301-DPB18001 DPA10401-DPB10101 DPA10401-DPB10201 DPA10401-DPB10202 DPA10401-DPB10301 DPA10401-DPB10402 DPA10401-DPB10501 DPA10401-DPB110501 DPA10401-DPB11301 DPA10401-DPB113301 DPA10401-DPB11401 DPA10401-DPB14901 DQA10102-DQB10501 DQA10102-DQB10503 DQA10102-DQB10609 DQA10103-DQB10501 DQA10103-DQB10609
KTAVQMAVFIHNFKRKGGI

SEQ ID NO: 4303 - protein, 20 aa, Human immunodeficiency virus 1
  source 1..20: note = HLAs: DRB1_0101 DRB1_0410 DRB1_0801 DRB1_0802 DRB1_0804 DRB1_0806 DRB1_0809 DRB1_0813 DRB1_1001 DRB1_1101 DRB1_1102 DRB1_1103 DRB1_1104 DRB1_1114 DRB1_1301 DRB1_1302 DRB1_1303 DRB1_1304 DRB1_1305 DRB1_1402 DRB1_1403 DRB1_1406 DRB1_1501 DRB1_1503 DRB1_1601 DRB1_1602 DPA10103-DPB10101 DPA10103-DPB10201 DPA10103-DPB10202 DPA10103-DPB10401 DPA10103-DPB10402 DPA10103-DPB10501 DPA10103-DPB10601 DPA10103-DPB110501 DPA10103-DPB11101 DPA10103-DPB112601 DPA10103-DPB11501 DPA10103-DPB11601 DPA10103-DPB11801 DPA10103-DPB11901 DPA10103-DPB12001 DPA10103-DPB12301 DPA10103-DPB13101 DPA10103-DPB13401 DPA10103-DPB13901 DPA10103-DPB14001 DPA10103-DPB14101 DPA10103-DPB14801 DPA10103-DPB14901 DPA10103-DPB15001 DPA10103-DPB15101 DPA10103-DPB15501 DPA10103-DPB15901 DPA10103-DPB18001 DPA10104-DPB10101 DPA10104-DPB11501 DPA10105-DPB10101 DPA10105-DPB10401 DPA10105-DPB11801 DPA10105-DPB15001 DPA10106-DPB10101 DPA10201-DPB10101 DPA10201-DPB10201 DPA10201-DPB10202 DPA10201-DPB10501 DPA10201-DPB110601; note = HLAs: DPA10201-DPB11501 DPA10201-DPB11601 DPA10201-DPB11801 DPA10201-DPB11901 DPA10201-DPB13401 DPA10201-DPB15501 DPA10202-DPB10101 DPA10202-DPB10201 DPA10202-DPB10202 DPA10202-DPB10401 DPA10202-DPB10402 DPA10202-DPB10501 DPA10202-DPB10901 DPA10202-DPB110001 DPA10202-DPB110501 DPA10202-DPB110601 DPA10202-DPB11101 DPA10202-DPB11301 DPA10202-DPB113101 DPA10202-DPB11701 DPA10202-DPB11801 DPA10202-DPB11901 DPA10202-DPB12101 DPA10202-DPB13001 DPA10202-DPB13101 DPA10202-DPB13801 DPA10202-DPB15501 DPA10202-DPB16501 DPA10301-DPB10101 DPA10301-DPB10201 DPA10301-DPB10202 DPA10301-DPB10401 DPA10301-DPB10402 DPA10301-DPB110501 DPA10301-DPB110601 DPA10301-DPB11101 DPA10301-DPB11301 DPA10301-DPB11701 DPA10301-DPB11801 DPA10301-DPB12301 DPA10301-DPB13901 DPA10301-DPB14001 DPA10301-DPB14901 DPA10301-DPB15501 DPA10301-DPB16501 DPA10301-DPB17501 DPA10301-DPB18001 DPA10401-DPB10101 DPA10401-DPB10201 DPA10401-DPB10202 DPA10401-DPB10301 DPA10401-DPB10402 DPA10401-DPB10501 DPA10401-DPB110501; note = HLAs: DPA10401-DPB11301 DPA10401-DPB113301 DPA10401-DPB11401 DPA10401-DPB14901 DQA10102-DQB10501 DQA10102-DQB10503 DQA10102-DQB10601 DQA10102-DQB10609 DQA10103-DQB10501 DQA10103-DQB10601 DQA10103-DQB10602 DQA10103-DQB10609
KTAVQMAVFIHNFKRKGGIG

SEQ ID NO: 4304 - protein, 21 aa, Human immunodeficiency virus 1
  source 1..21: note = HLAs: DRB1_0101 DRB1_0801 DRB1_0802 DRB1_0804 DRB1_0806 DRB1_0809 DRB1_1001 DRB1_1101 DRB1_1102 DRB1_1103 DRB1_1104 DRB1_1301 DRB1_1304 DRB1_1305 DRB1_1406 DRB1_1501 DRB1_1601 DRB1_1602 DPA10103-DPB10101 DPA10103-DPB10201 DPA10103-DPB10202 DPA10103-DPB10501 DPA10103-DPB11501 DPA10103-DPB11601 DPA10103-DPB11801 DPA10103-DPB11901 DPA10103-DPB13101 DPA10103-DPB13401 DPA10103-DPB14001 DPA10103-DPB14101 DPA10103-DPB14801 DPA10103-DPB15001 DPA10104-DPB10101 DPA10104-DPB11501 DPA10105-DPB10101 DPA10105-DPB11801 DPA10105-DPB15001 DPA10106-DPB10101 DPA10201-DPB10101 DPA10201-DPB110601 DPA10201-DPB11501 DPA10201-DPB11601 DPA10201-DPB11901 DPA10202-DPB10101 DPA10202-DPB10201 DPA10202-DPB10202 DPA10202-DPB10501 DPA10202-DPB110601 DPA10202-DPB11801 DPA10202-DPB11901 DPA10202-DPB13101 DPA10202-DPB13801 DPA10202-DPB16501 DPA10301-DPB10101 DPA10301-DPB10201 DPA10301-DPB10202 DPA10301-DPB10401 DPA10301-DPB10402 DPA10301-DPB110501 DPA10301-DPB110601 DPA10301-DPB11801 DPA10301-DPB12301 DPA10301-DPB13901; note = HLAs: DPA10301-DPB14001 DPA10301-DPB14901 DPA10301-DPB15501 DPA10301-DPB16501 DPA10301-DPB17501 DPA10301-DPB18001 DPA10401-DPB10101 DPA10401-DPB10201 DPA10401-DPB10202 DPA10401-DPB10402 DPA10401-DPB10501 DPA10401-DPB110501 DPA10401-DPB14901 DQA10102-DQB10501 DQA10103-DQB10501
KTAVQMAVFIHNFKRKGGIGG

SEQ ID NO: 4305 - protein, 22 aa, Human immunodeficiency virus 1
  source 1..22: note = HLAs: DRB1_0101 DRB1_0801 DRB1_0802 DRB1_0804 DRB1_0806 DRB1_0809 DRB1_1001 DRB1_1101 DRB1_1102 DRB1_1103 DRB1_1104 DRB1_1301 DRB1_1304 DRB1_1305 DRB1_1406 DRB1_1501 DRB1_1601 DRB1_1602 DPA10103-DPB10101 DPA10103-DPB10201 DPA10103-DPB10202 DPA10103-DPB10501 DPA10103-DPB11501 DPA10103-DPB11601 DPA10103-DPB11801 DPA10103-DPB11901 DPA10103-DPB13101 DPA10103-DPB13401 DPA10103-DPB14001 DPA10103-DPB14101 DPA10103-DPB14801 DPA10103-DPB15001 DPA10104-DPB10101 DPA10104-DPB11501 DPA10105-DPB10101 DPA10105-DPB11801 DPA10105-DPB15001 DPA10106-DPB10101 DPA10201-DPB10101 DPA10201-DPB110601 DPA10201-DPB11501 DPA10201-DPB11601 DPA10201-DPB11901 DPA10202-DPB10101 DPA10202-DPB10201 DPA10202-DPB10202 DPA10202-DPB10501 DPA10202-DPB110601 DPA10202-DPB11801 DPA10202-DPB11901 DPA10202-DPB13101 DPA10202-DPB13801 DPA10202-DPB16501 DPA10301-DPB10101 DPA10301-DPB10201 DPA10301-DPB10202 DPA10301-DPB10401 DPA10301-DPB10402 DPA10301-DPB110501 DPA10301-DPB110601 DPA10301-DPB11801 DPA10301-DPB12301 DPA10301-DPB13901; note = HLAs: DPA10301-DPB14001 DPA10301-DPB14901 DPA10301-DPB15501 DPA10301-DPB16501 DPA10301-DPB17501 DPA10301-DPB18001 DPA10401-DPB10101 DPA10401-DPB10201 DPA10401-DPB10202 DPA10401-DPB10402 DPA10401-DPB10501 DPA10401-DPB110501 DPA10401-DPB14901 DQA10102-DQB10501 DQA10103-DQB10501
KTAVQMAVFIHNFKRKGGIGGY

SEQ ID NO: 4306 - protein, 23 aa, Human immunodeficiency virus 1
  source 1..23: note = HLAs: DRB1_0101 DRB1_0801 DRB1_0802 DRB1_0804 DRB1_0806 DRB1_0809 DRB1_1001 DRB1_1101 DRB1_1102 DRB1_1103 DRB1_1104 DRB1_1301 DRB1_1304 DRB1_1305 DRB1_1406 DRB1_1501 DRB1_1601 DRB1_1602 DPA10103-DPB10101 DPA10103-DPB10201 DPA10103-DPB10202 DPA10103-DPB10501 DPA10103-DPB11501 DPA10103-DPB11601 DPA10103-DPB11801 DPA10103-DPB11901 DPA10103-DPB13101 DPA10103-DPB13401 DPA10103-DPB14001 DPA10103-DPB14101 DPA10103-DPB14801 DPA10103-DPB15001 DPA10104-DPB10101 DPA10104-DPB11501 DPA10105-DPB10101 DPA10105-DPB11801 DPA10105-DPB15001 DPA10106-DPB10101 DPA10201-DPB10101 DPA10201-DPB110601 DPA10201-DPB11501 DPA10201-DPB11601 DPA10201-DPB11901 DPA10202-DPB10101 DPA10202-DPB10201 DPA10202-DPB10202 DPA10202-DPB10501 DPA10202-DPB110601 DPA10202-DPB11801 DPA10202-DPB11901 DPA10202-DPB13101 DPA10202-DPB13801 DPA10202-DPB16501 DPA10301-DPB10101 DPA10301-DPB10201 DPA10301-DPB10202 DPA10301-DPB10401 DPA10301-DPB10402 DPA10301-DPB110501 DPA10301-DPB110601 DPA10301-DPB11801 DPA10301-DPB12301 DPA10301-DPB13901; note = HLAs: DPA10301-DPB14001 DPA10301-DPB14901 DPA10301-DPB15501 DPA10301-DPB16501 DPA10301-DPB17501 DPA10301-DPB18001 DPA10401-DPB10101 DPA10401-DPB10201 DPA10401-DPB10202 DPA10401-DPB10402 DPA10401-DPB10501 DPA10401-DPB110501 DPA10401-DPB14901 DQA10102-DQB10501 DQA10103-DQB10501
KTAVQMAVFIHNFKRKGGIGGYS

SEQ ID NO: 4307 - protein, 24 aa, Human immunodeficiency virus 1
  source 1..24: note = HLAs: DRB1_0101 DRB1_0801 DRB1_0802 DRB1_0804 DRB1_0806 DRB1_0809 DRB1_1001 DRB1_1101 DRB1_1102 DRB1_1103 DRB1_1104 DRB1_1301 DRB1_1304 DRB1_1305 DRB1_1406 DRB1_1501 DRB1_1601 DRB1_1602 DPA10103-DPB10101 DPA10103-DPB10201 DPA10103-DPB10202 DPA10103-DPB10501 DPA10103-DPB11501 DPA10103-DPB11601 DPA10103-DPB11801 DPA10103-DPB11901 DPA10103-DPB13101 DPA10103-DPB13401 DPA10103-DPB14001 DPA10103-DPB14101 DPA10103-DPB14801 DPA10103-DPB15001 DPA10104-DPB10101 DPA10104-DPB11501 DPA10105-DPB10101 DPA10105-DPB11801 DPA10105-DPB15001 DPA10106-DPB10101 DPA10201-DPB10101 DPA10201-DPB110601 DPA10201-DPB11501 DPA10201-DPB11601 DPA10201-DPB11901 DPA10202-DPB10101 DPA10202-DPB10201 DPA10202-DPB10202 DPA10202-DPB10501 DPA10202-DPB110601 DPA10202-DPB11801 DPA10202-DPB11901 DPA10202-DPB13101 DPA10202-DPB13801 DPA10202-DPB16501 DPA10301-DPB10101 DPA10301-DPB10201 DPA10301-DPB10202 DPA10301-DPB10401 DPA10301-DPB10402 DPA10301-DPB110501 DPA10301-DPB110601 DPA10301-DPB11801 DPA10301-DPB12301 DPA10301-DPB13901; note = HLAs: DPA10301-DPB14001 DPA10301-DPB14901 DPA10301-DPB15501 DPA10301-DPB16501 DPA10301-DPB17501 DPA10301-DPB18001 DPA10401-DPB10101 DPA10401-DPB10201 DPA10401-DPB10202 DPA10401-DPB10402 DPA10401-DPB10501 DPA10401-DPB110501 DPA10401-DPB14901 DQA10102-DQB10501 DQA10103-DQB10501
KTAVQMAVFIHNFKRKGGIGGYSA

SEQ ID NO: 4308 - protein, 25 aa, Human immunodeficiency virus 1
  source 1..25: note = HLAs: DRB1_0101 DRB1_0801 DRB1_0802 DRB1_0804 DRB1_0806 DRB1_0809 DRB1_1001 DRB1_1101 DRB1_1102 DRB1_1103 DRB1_1104 DRB1_1301 DRB1_1304 DRB1_1305 DRB1_1406 DRB1_1501 DRB1_1601 DRB1_1602 DPA10103-DPB10101 DPA10103-DPB10201 DPA10103-DPB10202 DPA10103-DPB10501 DPA10103-DPB11501 DPA10103-DPB11601 DPA10103-DPB11801 DPA10103-DPB11901 DPA10103-DPB13101 DPA10103-DPB13401 DPA10103-DPB14001 DPA10103-DPB14101 DPA10103-DPB14801 DPA10103-DPB15001 DPA10104-DPB10101 DPA10104-DPB11501 DPA10105-DPB10101 DPA10105-DPB11801 DPA10105-DPB15001 DPA10106-DPB10101 DPA10201-DPB10101 DPA10201-DPB110601 DPA10201-DPB11501 DPA10201-DPB11601 DPA10201-DPB11901 DPA10202-DPB10101 DPA10202-DPB10201 DPA10202-DPB10202 DPA10202-DPB10501 DPA10202-DPB110601 DPA10202-DPB11801 DPA10202-DPB11901 DPA10202-DPB13101 DPA10202-DPB13801 DPA10202-DPB16501 DPA10301-DPB10101 DPA10301-DPB10201 DPA10301-DPB10202 DPA10301-DPB10401 DPA10301-DPB10402 DPA10301-DPB110501 DPA10301-DPB110601 DPA10301-DPB11801 DPA10301-DPB12301 DPA10301-DPB13901; note = HLAs: DPA10301-DPB14001 DPA10301-DPB14901 DPA10301-DPB15501 DPA10301-DPB16501 DPA10301-DPB17501 DPA10301-DPB18001 DPA10401-DPB10101 DPA10401-DPB10201 DPA10401-DPB10202 DPA10401-DPB10402 DPA10401-DPB10501 DPA10401-DPB110501 DPA10401-DPB14901 DQA10102-DQB10501 DQA10103-DQB10501
KTAVQMAVFIHNFKRKGGIGGYSAG

SEQ ID NO: 4309 - protein, 15 aa, Human immunodeficiency virus 1
  source 1..15: note = HLAs: DPA10301-DPB10101 DPA10301-DPB14001
KVKQWPLTEEKIKAL

SEQ ID NO: 4310 - protein, 13 aa, Human immunodeficiency virus 1
  source 1..13: note = HLAs: DRB1_0301 DRB1_0401
KVLFLDGIDKAQE

SEQ ID NO: 4311 - protein, 14 aa, Human immunodeficiency virus 1
  source 1..14: note = HLAs: DRB1_0301 DRB1_0401 DRB1_0404 DRB1_0408 DPA10301-DPB10101 DQA10102-DQB10501
KVLFLDGIDKAQEE

SEQ ID NO: 4312 - protein, 15 aa, Human immunodeficiency virus 1
  source 1..15: note = HLAs: DRB1_0101 DRB1_0102 DRB1_0301 DRB1_0401 DRB1_0404 DRB1_0405 DRB1_0408 DRB1_0410 DRB1_1001 DRB1_1102 DRB1_1104 DRB1_1114 DRB1_1301 DRB1_1302 DRB1_1304 DRB1_1406 DPA10301-DPB10101 DPA10301-DPB11801 DPA10401-DPB10101 DQA10102-DQB10501 DQA10102-DQB10503
KVLFLDGIDKAQEEH

SEQ ID NO: 4313 - protein, 16 aa, Human immunodeficiency virus 1
  source 1..16: note = HLAs: DRB1_0301 DRB1_0401 DRB1_0404 DRB1_0408 DPA10301-DPB10101 DPA10301-DPB11801 DPA10401-DPB10101 DQA10102-DQB10501 DQA10102-DQB10503
KVLFLDGIDKAQEEHE

SEQ ID NO: 4314 - protein, 15 aa, Human immunodeficiency virus 1
  source 1..15: note = HLAs: DPA10301-DPB10101 DQA10102-DQB10501 DQA10505-DQB10402
KVVEEKAFSPEVIPM

SEQ ID NO: 4315 - protein, 16 aa, Human immunodeficiency virus 1
  source 1..16: note = HLAs: DPA10103-DPB10101 DPA10103-DPB11501 DPA10104-DPB10101 DPA10104-DPB11501 DPA10105-DPB10101 DPA10202-DPB10101 DPA10301-DPB10101 DPA10301-DPB10201 DPA10301-DPB10202 DPA10301-DPB10401 DPA10301-DPB110601 DPA10301-DPB12301 DPA10301-DPB13901 DPA10301-DPB14001 DPA10301-DPB16501 DPA10401-DPB10101 DQA10102-DQB10501 DQA10102-DQB10503 DQA10102-DQB10609 DQA10501-DQB10201 DQA10505-DQB10201 DQA10505-DQB10202
KVVEEKAFSPEVIPMF

SEQ ID NO: 4316 - protein, 13 aa, Human immunodeficiency virus 1
  source 1..13: note = HLAs: DRB1_1103
KVVPRRKAKIIRD

SEQ ID NO: 4317 - protein, 14 aa, Human immunodeficiency virus 1
  source 1..14: note = HLAs: DRB1_1102 DRB1_1103 DRB1_1301 DRB1_1304
KVVPRRKAKIIRDY

SEQ ID NO: 4318 - protein, 15 aa, Human immunodeficiency virus 1
  source 1..15: note = HLAs: DRB1_0806 DRB1_1102 DRB1_1103 DRB1_1104 DRB1_1301 DRB1_1304 DRB1_1406
KVVPRRKAKIIRDYG

SEQ ID NO: 4319 - protein, 16 aa, Human immunodeficiency virus 1
  source 1..16: note = HLAs: DRB1_1102 DRB1_1103 DRB1_1104 DRB1_1301 DRB1_1304 DPA10401-DPB10301
KVVPRRKAKIIRDYGK

SEQ ID NO: 4320 - protein, 17 aa, Human immunodeficiency virus 1
  source 1..17: note = HLAs: DRB1_1102 DRB1_1103 DRB1_1104 DRB1_1301 DRB1_1304 DPA10103-DPB15001 DPA10105-DPB15001
KVVPRRKAKIIRDYGKQ

SEQ ID NO: 4321 - protein, 18 aa, Human immunodeficiency virus 1
  source 1..18: note = HLAs: DRB1_1103
KVVPRRKAKIIRDYGKQM

SEQ ID NO: 4322 - protein, 19 aa, Human immunodeficiency virus 1
  source 1..19: note = HLAs: DRB1_0301 DRB1_0806 DRB1_1102 DRB1_1103 DRB1_1104 DRB1_1114 DRB1_1301 DRB1_1302 DRB1_1304 DRB1_1406 DPA10103-DPB15001 DPA10105-DPB15001
KVVPRRKAKIIRDYGKQMA

SEQ ID NO: 4323 - protein, 20 aa, Human immunodeficiency virus 1
  source 1..20: note = HLAs: DRB1_0301 DRB1_0801 DRB1_0804 DRB1_0806 DRB1_1101 DRB1_1102 DRB1_1103 DRB1_1104 DRB1_1114 DRB1_1301 DRB1_1302 DRB1_1304 DRB1_1305 DRB1_1406 DRB1_1501 DRB1_1503 DPA10103-DPB10301 DPA10103-DPB10601 DPA10103-DPB112401 DPA10103-DPB12001 DPA10103-DPB15001 DPA10104-DPB10301 DPA10105-DPB10301 DPA10105-DPB15001 DPA10202-DPB10501 DPA10202-DPB110601 DPA10202-DPB11901 DPA10202-DPB13801 DPA10301-DPB110601 DPA10401-DPB10101 DPA10401-DPB10301 DPA10401-DPB10501 DPA10401-DPB11401 DQA10102-DQB10501
KVVPRRKAKIIRDYGKQMAG

SEQ ID NO: 4324 - protein, 21 aa, Human immunodeficiency virus 1
  source 1..21: note = HLAs: DRB1_0301 DRB1_0804 DRB1_0806 DRB1_1102 DRB1_1103 DRB1_1104 DRB1_1114 DRB1_1301 DRB1_1302 DRB1_1304 DRB1_1406 DRB1_1501 DPA10103-DPB15001 DPA10105-DPB15001
KVVPRRKAKIIRDYGKQMAGD

SEQ ID NO: 4325 - protein, 22 aa, Human immunodeficiency virus 1
  source 1..22: note = HLAs: DRB1_0301 DRB1_0804 DRB1_0806 DRB1_1102 DRB1_1103 DRB1_1104 DRB1_1114 DRB1_1301 DRB1_1302 DRB1_1304 DRB1_1406 DPA10103-DPB15001 DPA10105-DPB15001
KVVPRRKAKIIRDYGKQMAGDD

SEQ ID NO: 4326 - protein, 23 aa, Human immunodeficiency virus 1
  source 1..23: note = HLAs: DRB1_0301 DRB1_0804 DRB1_0806 DRB1_1102 DRB1_1103 DRB1_1104 DRB1_1114 DRB1_1301 DRB1_1302 DRB1_1304 DRB1_1406 DRB1_1501 DPA10103-DPB15001 DPA10105-DPB15001
KVVPRRKAKIIRDYGKQMAGDDC

SEQ ID NO: 4327 - protein, 24 aa, Human immunodeficiency virus 1
  source 1..24: note = HLAs: DRB1_0301 DRB1_0804 DRB1_0806 DRB1_1102 DRB1_1103 DRB1_1104 DRB1_1114 DRB1_1301 DRB1_1302 DRB1_1304 DRB1_1406 DRB1_1501 DPA10103-DPB15001 DPA10105-DPB15001 DQA10102-DQB10501
KVVPRRKAKIIRDYGKQMAGDDCV

SEQ ID NO: 4328 - protein, 25 aa, Human immunodeficiency virus 1
  source 1..25: note = HLAs: DRB1_0301 DRB1_0804 DRB1_0806 DRB1_1102 DRB1_1103 DRB1_1104 DRB1_1114 DRB1_1301 DRB1_1302 DRB1_1304 DRB1_1406 DRB1_1501 DPA10103-DPB15001 DPA10105-DPB15001 DQA10102-DQB10501
KVVPRRKAKIIRDYGKQMAGDDCVA

SEQ ID NO: 4329 - protein, 14 aa, Human immunodeficiency virus 1
  source 1..14: note = HLAs: DRB1_0901 DQA10201-DQB10301 DQA10501-DQB10301 DQA10501-DQB10319 DQA10503-DQB10301 DQA10505-DQB10301 DQA10505-DQB10309 DQA10505-DQB10319 DQA10508-DQB10301 DQA10509-DQB10301
KWKPKMIGGIGGFI

SEQ ID NO: 4330 - protein, 15 aa, Human immunodeficiency virus 1
  source 1..15: note = HLAs: DRB1_0101 DRB1_0102 DRB1_0701 DRB1_0901 DRB1_1001 DQA10102-DQB10601 DQA10103-DQB10601 DQA10201-DQB10301 DQA10501-DQB10301 DQA10501-DQB10319 DQA10503-DQB10301 DQA10505-DQB10301 DQA10505-DQB10309 DQA10505-DQB10319 DQA10508-DQB10301 DQA10509-DQB10301
KWKPKMIGGIGGFIK

SEQ ID NO: 4331 - protein, 16 aa, Human immunodeficiency virus 1
  source 1..16: note = HLAs: DRB1_0101 DRB1_0901 DRB1_1001 DQA10102-DQB10501 DQA10102-DQB10601 DQA10103-DQB10601 DQA10201-DQB10301 DQA10501-DQB10301 DQA10501-DQB10319 DQA10503-DQB10301 DQA10505-DQB10301 DQA10505-DQB10309 DQA10505-DQB10319 DQA10508-DQB10301 DQA10509-DQB10301 DQA10601-DQB10301
KWKPKMIGGIGGFIKV

SEQ ID NO: 4332 - protein, 17 aa, Human immunodeficiency virus 1
  source 1..17: note = HLAs: DRB1_0101 DRB1_0102 DRB1_0701 DRB1_0901 DRB1_1001 DRB1_1102 DRB1_1301 DRB1_1406 DRB1_1501 DQA10102-DQB10501 DQA10102-DQB10601 DQA10103-DQB10601 DQA10201-DQB10301 DQA10501-DQB10301 DQA10501-DQB10319 DQA10503-DQB10301 DQA10505-DQB10301 DQA10505-DQB10309 DQA10505-DQB10319 DQA10508-DQB10301 DQA10509-DQB10301
KWKPKMIGGIGGFIKVR

SEQ ID NO: 4333 - protein, 18 aa, Human immunodeficiency virus 1
  source 1..18: note = HLAs: DRB1_0901 DQA10201-DQB10301 DQA10501-DQB10301 DQA10501-DQB10319 DQA10503-DQB10301 DQA10505-DQB10301 DQA10505-DQB10309 DQA10505-DQB10319 DQA10508-DQB10301 DQA10509-DQB10301
KWKPKMIGGIGGFIKVRQ

SEQ ID NO: 4334 - protein, 19 aa, Human immunodeficiency virus 1
  source 1..19: note = HLAs: DRB1_0101 DRB1_0806 DRB1_0901 DRB1_1001 DRB1_1102 DRB1_1103 DRB1_1104 DRB1_1301 DRB1_1304 DRB1_1501 DQA10102-DQB10501 DQA10102-DQB10601 DQA10103-DQB10601 DQA10201-DQB10301 DQA10501-DQB10301 DQA10501-DQB10319 DQA10503-DQB10301 DQA10505-DQB10301 DQA10505-DQB10309 DQA10505-DQB10319 DQA10508-DQB10301 DQA10509-DQB10301
KWKPKMIGGIGGFIKVRQY

SEQ ID NO: 4335 - protein, 13 aa, Human immunodeficiency virus 1
  source 1..13: note = HLAs: DPA10103-DPB11501 DPA10104-DPB11501 DPA10301-DPB10101 DPA10301-DPB10201 DPA10301-DPB110601
KWRKLVDFRELNK

SEQ ID NO: 4336 - protein, 14 aa, Human immunodeficiency virus 1
  source 1..14: note = HLAs: DPA10103-DPB10101 DPA10103-DPB10201 DPA10103-DPB10202 DPA10103-DPB11501 DPA10103-DPB11601 DPA10103-DPB11901 DPA10103-DPB13101 DPA10103-DPB13401 DPA10103-DPB14101 DPA10103-DPB14801 DPA10103-DPB15001 DPA10104-DPB10101 DPA10104-DPB11501 DPA10105-DPB10101 DPA10105-DPB15001 DPA10106-DPB10101 DPA10201-DPB10101 DPA10201-DPB110601 DPA10201-DPB11501 DPA10201-DPB11601 DPA10201-DPB11901 DPA10202-DPB10101 DPA10202-DPB10501 DPA10202-DPB110601 DPA10202-DPB11901 DPA10202-DPB13101 DPA10202-DPB13801 DPA10202-DPB16501 DPA10301-DPB10101 DPA10301-DPB10201 DPA10301-DPB10202 DPA10301-DPB10401 DPA10301-DPB110601 DPA10301-DPB11801 DPA10301-DPB12301 DPA10301-DPB13901 DPA10301-DPB14001 DPA10301-DPB16501 DPA10401-DPB10101 DPA10401-DPB10201 DPA10401-DPB10202 DPA10401-DPB10501
KWRKLVDFRELNKR

SEQ ID NO: 4337 - protein, 15 aa, Human immunodeficiency virus 1
  source 1..15: note = HLAs: DRB1_0405 DRB1_0410 DRB1_0806 DRB1_1001 DRB1_1102 DRB1_1103 DRB1_1104 DRB1_1301 DRB1_1304 DPA10103-DPB10101 DPA10103-DPB10201 DPA10103-DPB10202 DPA10103-DPB10501 DPA10103-DPB11501 DPA10103-DPB11601 DPA10103-DPB11801 DPA10103-DPB11901 DPA10103-DPB13101 DPA10103-DPB13401 DPA10103-DPB14001 DPA10103-DPB14101 DPA10103-DPB14801 DPA10103-DPB15001 DPA10104-DPB10101 DPA10104-DPB11501 DPA10105-DPB10101 DPA10105-DPB11801 DPA10105-DPB15001 DPA10106-DPB10101 DPA10201-DPB10101 DPA10201-DPB10501 DPA10201-DPB110601 DPA10201-DPB11501 DPA10201-DPB11601 DPA10201-DPB11901 DPA10201-DPB13401 DPA10202-DPB10101 DPA10202-DPB10201 DPA10202-DPB10202 DPA10202-DPB10501 DPA10202-DPB110601 DPA10202-DPB11801 DPA10202-DPB11901 DPA10202-DPB13101 DPA10202-DPB13801 DPA10202-DPB16501 DPA10301-DPB10101 DPA10301-DPB10201 DPA10301-DPB10202 DPA10301-DPB10401 DPA10301-DPB110601 DPA10301-DPB11801 DPA10301-DPB12301 DPA10301-DPB13901 DPA10301-DPB14001 DPA10301-DPB15501 DPA10301-DPB16501 DPA10401-DPB10101 DPA10401-DPB10201; note = HLAs: DPA10401-DPB10202 DPA10401-DPB10501
KWRKLVDFRELNKRT

SEQ ID NO: 4338 - protein, 16 aa, Human immunodeficiency virus 1
  source 1..16: note = HLAs: DRB1_0801 DRB1_0806 DRB1_1001 DRB1_1101 DRB1_1103 DRB1_1104 DRB1_1304 DRB1_1305 DPA10103-DPB10101 DPA10103-DPB10201 DPA10103-DPB10202 DPA10103-DPB10501 DPA10103-DPB11501 DPA10103-DPB11601 DPA10103-DPB11901 DPA10103-DPB13101 DPA10103-DPB13401 DPA10103-DPB14101 DPA10103-DPB14801 DPA10103-DPB15001 DPA10104-DPB10101 DPA10104-DPB11501 DPA10105-DPB10101 DPA10105-DPB15001 DPA10106-DPB10101 DPA10201-DPB10101 DPA10201-DPB110601 DPA10201-DPB11501 DPA10201-DPB11601 DPA10201-DPB11901 DPA10202-DPB10101 DPA10202-DPB10501 DPA10202-DPB110601 DPA10202-DPB11901 DPA10202-DPB13101 DPA10202-DPB13801 DPA10202-DPB16501 DPA10301-DPB10101 DPA10301-DPB10201 DPA10301-DPB10202 DPA10301-DPB10401 DPA10301-DPB110601 DPA10301-DPB11801 DPA10301-DPB12301 DPA10301-DPB13901 DPA10301-DPB14001 DPA10301-DPB16501 DPA10401-DPB10101 DPA10401-DPB10201 DPA10401-DPB10202 DPA10401-DPB10501
KWRKLVDFRELNKRTQ

SEQ ID NO: 4339 - protein, 17 aa, Human immunodeficiency virus 1
  source 1..17: note = HLAs: DRB1_0806 DRB1_1001 DRB1_1101 DRB1_1103 DRB1_1104 DRB1_1304 DRB1_1305 DPA10103-DPB10101 DPA10103-DPB10201 DPA10103-DPB10202 DPA10103-DPB10501 DPA10103-DPB11501 DPA10103-DPB11601 DPA10103-DPB11901 DPA10103-DPB13101 DPA10103-DPB13401 DPA10103-DPB14001 DPA10103-DPB14101 DPA10103-DPB14801 DPA10103-DPB15001 DPA10104-DPB10101 DPA10104-DPB11501 DPA10105-DPB10101 DPA10105-DPB15001 DPA10201-DPB110601 DPA10201-DPB11501 DPA10201-DPB11601 DPA10201-DPB11901 DPA10202-DPB10101 DPA10202-DPB10501 DPA10202-DPB110601 DPA10202-DPB11901 DPA10202-DPB13101 DPA10202-DPB13801 DPA10202-DPB16501 DPA10301-DPB10101 DPA10301-DPB10201 DPA10301-DPB10202 DPA10301-DPB10401 DPA10301-DPB110601 DPA10301-DPB11801 DPA10301-DPB12301 DPA10301-DPB13901 DPA10301-DPB14001 DPA10301-DPB16501 DPA10401-DPB10101 DPA10401-DPB10201 DPA10401-DPB10202 DPA10401-DPB10501
KWRKLVDFRELNKRTQD

SEQ ID NO: 4340 - protein, 18 aa, Human immunodeficiency virus 1
  source 1..18: note = HLAs: DRB1_1101 DRB1_1305 DPA10103-DPB11501 DPA10103-DPB11601 DPA10103-DPB13101 DPA10104-DPB11501 DPA10202-DPB10101 DPA10202-DPB110601 DPA10202-DPB11901 DPA10202-DPB13101 DPA10301-DPB10101 DPA10301-DPB10201 DPA10301-DPB10202 DPA10301-DPB110601 DPA10301-DPB11801 DPA10301-DPB14001 DPA10301-DPB16501 DPA10401-DPB10101
KWRKLVDFRELNKRTQDF

SEQ ID NO: 4341 - protein, 19 aa, Human immunodeficiency virus 1
  source 1..19: note = HLAs: DRB1_0801 DRB1_0806 DRB1_1101 DRB1_1103 DRB1_1104 DRB1_1304 DRB1_1305 DPA10103-DPB10101 DPA10103-DPB10501 DPA10103-DPB11501 DPA10103-DPB11601 DPA10103-DPB11901 DPA10103-DPB13101 DPA10103-DPB13401 DPA10103-DPB15001 DPA10104-DPB10101 DPA10104-DPB11501 DPA10105-DPB10101 DPA10105-DPB15001 DPA10201-DPB110601 DPA10201-DPB11501 DPA10201-DPB11601 DPA10201-DPB11901 DPA10202-DPB10101 DPA10202-DPB10501 DPA10202-DPB110601 DPA10202-DPB11901 DPA10202-DPB13101 DPA10202-DPB13801 DPA10202-DPB16501 DPA10301-DPB10101 DPA10301-DPB10201 DPA10301-DPB10202 DPA10301-DPB10401 DPA10301-DPB110601 DPA10301-DPB11801 DPA10301-DPB12301 DPA10301-DPB13901 DPA10301-DPB14001 DPA10301-DPB16501 DPA10401-DPB10101 DPA10401-DPB10201 DPA10401-DPB10202 DPA10401-DPB10501
KWRKLVDFRELNKRTQDFW

SEQ ID NO: 4342 - protein, 20 aa, Human immunodeficiency virus 1
  source 1..20: note = HLAs: DRB1_0801 DRB1_0802 DRB1_0804 DRB1_0806 DRB1_0809 DRB1_1001 DRB1_1101 DRB1_1103 DRB1_1104 DRB1_1304 DRB1_1305 DPA10103-DPB10101 DPA10103-DPB10201 DPA10103-DPB10202 DPA10103-DPB10501 DPA10103-DPB11501 DPA10103-DPB11601 DPA10103-DPB11901 DPA10103-DPB13101 DPA10103-DPB13401 DPA10103-DPB14001 DPA10103-DPB14101 DPA10103-DPB14801 DPA10103-DPB15001 DPA10104-DPB10101 DPA10104-DPB11501 DPA10105-DPB10101 DPA10105-DPB15001 DPA10201-DPB10501 DPA10201-DPB110601 DPA10201-DPB11501 DPA10201-DPB11601 DPA10201-DPB11901 DPA10202-DPB10101 DPA10202-DPB10501 DPA10202-DPB110601 DPA10202-DPB11901 DPA10202-DPB13101 DPA10202-DPB13801 DPA10202-DPB16501 DPA10301-DPB10101 DPA10301-DPB10201 DPA10301-DPB10202 DPA10301-DPB10401 DPA10301-DPB110601 DPA10301-DPB11801 DPA10301-DPB12301 DPA10301-DPB13901 DPA10301-DPB14001 DPA10301-DPB15501 DPA10301-DPB16501 DPA10401-DPB10101 DPA10401-DPB10201 DPA10401-DPB10202 DPA10401-DPB10501 DQA10102-DQB10501
KWRKLVDFRELNKRTQDFWE

SEQ ID NO: 4343 - protein, 21 aa, Human immunodeficiency virus 1
  source 1..21: note = HLAs: DRB1_0801 DRB1_0806 DRB1_1001 DRB1_1101 DRB1_1103 DRB1_1104 DRB1_1304 DRB1_1305 DPA10103-DPB10101 DPA10103-DPB10201 DPA10103-DPB10202 DPA10103-DPB10501 DPA10103-DPB11501 DPA10103-DPB11601 DPA10103-DPB11901 DPA10103-DPB13101 DPA10103-DPB13401 DPA10103-DPB14101 DPA10103-DPB14801 DPA10103-DPB15001 DPA10104-DPB10101 DPA10104-DPB11501 DPA10105-DPB10101 DPA10105-DPB15001 DPA10201-DPB110601 DPA10201-DPB11501 DPA10201-DPB11601 DPA10201-DPB11901 DPA10202-DPB10101 DPA10202-DPB10501 DPA10202-DPB110601 DPA10202-DPB11901 DPA10202-DPB13101 DPA10202-DPB13801 DPA10202-DPB16501 DPA10301-DPB10101 DPA10301-DPB10201 DPA10301-DPB10202 DPA10301-DPB10401 DPA10301-DPB110601 DPA10301-DPB11801 DPA10301-DPB12301 DPA10301-DPB13901 DPA10301-DPB14001 DPA10301-DPB16501 DPA10401-DPB10101 DPA10401-DPB10201 DPA10401-DPB10202 DPA10401-DPB10501
KWRKLVDFRELNKRTQDFWEV

SEQ ID NO: 4344 - protein, 22 aa, Human immunodeficiency virus 1
  source 1..22: note = HLAs: DRB1_0801 DRB1_0806 DRB1_1001 DRB1_1101 DRB1_1103 DRB1_1104 DRB1_1304 DRB1_1305 DPA10103-DPB10101 DPA10103-DPB10201 DPA10103-DPB10202 DPA10103-DPB10501 DPA10103-DPB11501 DPA10103-DPB11601 DPA10103-DPB11901 DPA10103-DPB13101 DPA10103-DPB13401 DPA10103-DPB14001 DPA10103-DPB14101 DPA10103-DPB14801 DPA10103-DPB15001 DPA10104-DPB10101 DPA10104-DPB11501 DPA10105-DPB10101 DPA10105-DPB15001 DPA10201-DPB110601 DPA10201-DPB11501 DPA10201-DPB11601 DPA10201-DPB11901 DPA10202-DPB10101 DPA10202-DPB10501 DPA10202-DPB110601 DPA10202-DPB11901 DPA10202-DPB13101 DPA10202-DPB13801 DPA10202-DPB16501 DPA10301-DPB10101 DPA10301-DPB10201 DPA10301-DPB10202 DPA10301-DPB10401 DPA10301-DPB110601 DPA10301-DPB11801 DPA10301-DPB12301 DPA10301-DPB13901 DPA10301-DPB14001 DPA10301-DPB16501 DPA10401-DPB10101 DPA10401-DPB10201 DPA10401-DPB10202 DPA10401-DPB10501
KWRKLVDFRELNKRTQDFWEVQ

SEQ ID NO: 4345 - protein, 23 aa, Human immunodeficiency virus 1
  source 1..23: note = HLAs: DRB1_0801 DRB1_0806 DRB1_1001 DRB1_1101 DRB1_1103 DRB1_1104 DRB1_1304 DRB1_1305 DPA10103-DPB10101 DPA10103-DPB10201 DPA10103-DPB10202 DPA10103-DPB10501 DPA10103-DPB11501 DPA10103-DPB11601 DPA10103-DPB11901 DPA10103-DPB13101 DPA10103-DPB13401 DPA10103-DPB14001 DPA10103-DPB14101 DPA10103-DPB14801 DPA10103-DPB15001 DPA10104-DPB10101 DPA10104-DPB11501 DPA10105-DPB10101 DPA10105-DPB15001 DPA10201-DPB110601 DPA10201-DPB11501 DPA10201-DPB11601 DPA10201-DPB11901 DPA10202-DPB10101 DPA10202-DPB10501 DPA10202-DPB110601 DPA10202-DPB11901 DPA10202-DPB13101 DPA10202-DPB13801 DPA10202-DPB16501 DPA10301-DPB10101 DPA10301-DPB10201 DPA10301-DPB10202 DPA10301-DPB10401 DPA10301-DPB110601 DPA10301-DPB11801 DPA10301-DPB12301 DPA10301-DPB13901 DPA10301-DPB14001 DPA10301-DPB16501 DPA10401-DPB10101 DPA10401-DPB10201 DPA10401-DPB10202 DPA10401-DPB10501 DQA10102-DQB10501
KWRKLVDFRELNKRTQDFWEVQL

SEQ ID NO: 4346 - protein, 24 aa, Human immunodeficiency virus 1
  source 1..24: note = HLAs: DRB1_0801 DRB1_0806 DRB1_1001 DRB1_1101 DRB1_1103 DRB1_1104 DRB1_1304 DRB1_1305 DPA10103-DPB10101 DPA10103-DPB10201 DPA10103-DPB10202 DPA10103-DPB10501 DPA10103-DPB11501 DPA10103-DPB11601 DPA10103-DPB11901 DPA10103-DPB13101 DPA10103-DPB13401 DPA10103-DPB14001 DPA10103-DPB14101 DPA10103-DPB14801 DPA10103-DPB15001 DPA10104-DPB10101 DPA10104-DPB11501 DPA10105-DPB10101 DPA10105-DPB15001 DPA10201-DPB110601 DPA10201-DPB11501 DPA10201-DPB11601 DPA10201-DPB11901 DPA10202-DPB10101 DPA10202-DPB10501 DPA10202-DPB110601 DPA10202-DPB11901 DPA10202-DPB13101 DPA10202-DPB13801 DPA10202-DPB16501 DPA10301-DPB10101 DPA10301-DPB10201 DPA10301-DPB10202 DPA10301-DPB10401 DPA10301-DPB110601 DPA10301-DPB11801 DPA10301-DPB12301 DPA10301-DPB13901 DPA10301-DPB14001 DPA10301-DPB16501 DPA10401-DPB10101 DPA10401-DPB10201 DPA10401-DPB10202 DPA10401-DPB10501 DQA10102-DQB10501
KWRKLVDFRELNKRTQDFWEVQLG

SEQ ID NO: 4347 - protein, 25 aa, Human immunodeficiency virus 1
  source 1..25: note = HLAs: DRB1_0801 DRB1_0806 DRB1_1001 DRB1_1101 DRB1_1103 DRB1_1104 DRB1_1304 DRB1_1305 DPA10103-DPB10101 DPA10103-DPB10201 DPA10103-DPB10202 DPA10103-DPB10501 DPA10103-DPB11501 DPA10103-DPB11601 DPA10103-DPB11901 DPA10103-DPB13101 DPA10103-DPB13401 DPA10103-DPB14001 DPA10103-DPB14101 DPA10103-DPB14801 DPA10103-DPB15001 DPA10104-DPB10101 DPA10104-DPB11501 DPA10105-DPB10101 DPA10105-DPB15001 DPA10106-DPB10101 DPA10201-DPB10101 DPA10201-DPB110601 DPA10201-DPB11501 DPA10201-DPB11601 DPA10201-DPB11901 DPA10202-DPB10101 DPA10202-DPB10501 DPA10202-DPB110601 DPA10202-DPB11901 DPA10202-DPB13101 DPA10202-DPB13801 DPA10202-DPB16501 DPA10301-DPB10101 DPA10301-DPB10201 DPA10301-DPB10202 DPA10301-DPB10401 DPA10301-DPB110601 DPA10301-DPB11801 DPA10301-DPB12301 DPA10301-DPB13901 DPA10301-DPB14001 DPA10301-DPB16501 DPA10401-DPB10101 DPA10401-DPB10201 DPA10401-DPB10202 DPA10401-DPB10501 DQA10102-DQB10501
KWRKLVDFRELNKRTQDFWEVQLGI

SEQ ID NO: 4348 - protein, 13 aa, Human immunodeficiency virus 1
  source 1..13: note = HLAs: DRB1_1001 DQA10102-DQB10501
KYTAFTIPSINNE

SEQ ID NO: 4349 - protein, 14 aa, Human immunodeficiency virus 1
  source 1..14: note = HLAs: DRB1_1001 DPA10301-DPB10101 DPA10301-DPB10201 DPA10301-DPB10202 DPA10401-DPB10101 DQA10102-DQB10501 DQA10103-DQB10501 DQA10201-DQB10301 DQA10201-DQB10303 DQA10505-DQB10402
KYTAFTIPSINNET

SEQ ID NO: 4350 - protein, 15 aa, Human immunodeficiency virus 1
  source 1..15: note = HLAs: DRB1_0101 DRB1_0405 DRB1_0408 DRB1_0410 DRB1_0701 DRB1_0901 DRB1_1001 DRB1_1602 DPA10103-DPB11501 DPA10104-DPB11501 DPA10301-DPB10101 DPA10301-DPB10201 DPA10301-DPB10202 DPA10301-DPB10401 DPA10301-DPB12301 DPA10301-DPB13901 DPA10301-DPB14001 DPA10401-DPB10101 DQA10102-DQB10501 DQA10102-DQB10503 DQA10102-DQB10601 DQA10102-DQB10609 DQA10103-DQB10501 DQA10103-DQB10601 DQA10103-DQB10609 DQA10201-DQB10301 DQA10201-DQB10303 DQA10505-DQB10402 DQA10506-DQB10303
KYTAFTIPSINNETP

SEQ ID NO: 4351 - protein, 16 aa, Human immunodeficiency virus 1
  source 1..16: note = HLAs: DRB1_1001 DPA10103-DPB11501 DPA10104-DPB11501 DPA10301-DPB10101 DPA10301-DPB10201 DPA10301-DPB10202 DPA10401-DPB10101 DQA10102-DQB10501 DQA10102-DQB10503 DQA10102-DQB10601 DQA10102-DQB10609 DQA10103-DQB10501 DQA10103-DQB10601 DQA10103-DQB10609 DQA10201-DQB10301 DQA10201-DQB10303 DQA10505-DQB10402 DQA10506-DQB10303
KYTAFTIPSINNETPG

SEQ ID NO: 4352 - protein, 17 aa, Human immunodeficiency virus 1
  source 1..17: note = HLAs: DRB1_1001 DPA10103-DPB11501 DPA10104-DPB11501 DPA10301-DPB10101 DPA10301-DPB10201 DPA10301-DPB10202 DPA10401-DPB10101 DQA10102-DQB10501 DQA10103-DQB10501 DQA10103-DQB10601 DQA10103-DQB10609 DQA10201-DQB10301 DQA10201-DQB10303 DQA10505-DQB10402
KYTAFTIPSINNETPGI

SEQ ID NO: 4353 - protein, 18 aa, Human immunodeficiency virus 1
  source 1..18: note = HLAs: DQA10102-DQB10501
KYTAFTIPSINNETPGIR

SEQ ID NO: 4354 - protein, 19 aa, Human immunodeficiency virus 1
  source 1..19: note = HLAs: DRB1_1001 DPA10301-DPB10101 DPA10301-DPB10201 DPA10301-DPB10202 DPA10401-DPB10101 DQA10102-DQB10501 DQA10103-DQB10501 DQA10103-DQB10609 DQA10505-DQB10402
KYTAFTIPSINNETPGIRY

SEQ ID NO: 4355 - protein, 20 aa, Human immunodeficiency virus 1
  source 1..20: note = HLAs: DRB1_0101 DRB1_1001 DRB1_1602 DPA10103-DPB11501 DPA10103-DPB15001 DPA10104-DPB11501 DPA10105-DPB15001 DPA10301-DPB10101 DPA10301-DPB10201 DPA10301-DPB10202 DPA10301-DPB10401 DPA10301-DPB12301 DPA10301-DPB13901 DPA10301-DPB16501 DPA10401-DPB10101 DQA10102-DQB10501 DQA10102-DQB10503 DQA10102-DQB10601 DQA10103-DQB10501 DQA10103-DQB10601 DQA10103-DQB10609 DQA10201-DQB10301 DQA10201-DQB10303 DQA10505-DQB10402
KYTAFTIPSINNETPGIRYQ

SEQ ID NO: 4356 - protein, 21 aa, Human immunodeficiency virus 1
  source 1..21: note = HLAs: DRB1_1001 DPA10301-DPB10101 DPA10301-DPB10201 DPA10401-DPB10101 DQA10102-DQB10501 DQA10103-DQB10501
KYTAFTIPSINNETPGIRYQY

SEQ ID NO: 4357 - protein, 22 aa, Human immunodeficiency virus 1
  source 1..22: note = HLAs: DRB1_1001 DPA10301-DPB10101 DPA10301-DPB10201 DPA10401-DPB10101 DQA10102-DQB10501 DQA10103-DQB10501
KYTAFTIPSINNETPGIRYQYN

SEQ ID NO: 4358 - protein, 23 aa, Human immunodeficiency virus 1
  source 1..23: note = HLAs: DRB1_1001 DPA10301-DPB10101 DPA10301-DPB10201 DPA10401-DPB10101 DQA10102-DQB10501 DQA10103-DQB10501
KYTAFTIPSINNETPGIRYQYNV

SEQ ID NO: 4359 - protein, 24 aa, Human immunodeficiency virus 1
  source 1..24: note = HLAs: DRB1_1001 DPA10301-DPB10101 DPA10301-DPB10201 DPA10301-DPB10202 DPA10401-DPB10101 DQA10102-DQB10501 DQA10103-DQB10501
KYTAFTIPSINNETPGIRYQYNVL

SEQ ID NO: 4360 - protein, 25 aa, Human immunodeficiency virus 1
  source 1..25: note = HLAs: DRB1_0405 DRB1_0410 DRB1_1001 DRB1_1602 DPA10301-DPB10101 DPA10301-DPB10201 DPA10301-DPB10202 DPA10401-DPB10101 DQA10102-DQB10501 DQA10103-DQB10501
KYTAFTIPSINNETPGIRYQYNVLP

SEQ ID NO: 4361 - protein, 15 aa, Human immunodeficiency virus 1
  source 1..15: note = HLAs: DRB1_1304
LAENREILKEPVHGV

SEQ ID NO: 4362 - protein, 14 aa, Human immunodeficiency virus 1
  source 1..14: note = HLAs: DRB1_0101 DPA10301-DPB10201 DPA10301-DPB10202
LDCTHLEGKIILVA

SEQ ID NO: 4363 - protein, 15 aa, Human immunodeficiency virus 1
  source 1..15: note = HLAs: DRB1_0101 DRB1_0102 DRB1_0701 DRB1_0901 DRB1_1001 DRB1_1304 DRB1_1602 DPA10103-DPB10202 DPA10103-DPB11501 DPA10104-DPB11501 DPA10301-DPB10101 DPA10301-DPB10201 DPA10301-DPB10202 DPA10301-DPB10401 DPA10301-DPB110601 DPA10301-DPB11801 DPA10301-DPB12301 DPA10301-DPB13901 DPA10301-DPB14001 DPA10301-DPB16501 DPA10401-DPB10101 DPA10401-DPB10201 DPA10401-DPB10202 DQA10102-DQB10501 DQA10102-DQB10601 DQA10103-DQB10601 DQA10201-DQB10301
LDCTHLEGKIILVAV

SEQ ID NO: 4364 - protein, 16 aa, Human immunodeficiency virus 1
  source 1..16: note = HLAs: DRB1_0101 DRB1_1001 DPA10103-DPB10202 DPA10103-DPB11501 DPA10104-DPB11501 DPA10301-DPB10101 DPA10301-DPB10201 DPA10301-DPB10202 DPA10301-DPB10401 DPA10301-DPB110601 DPA10301-DPB11801 DPA10301-DPB12301 DPA10301-DPB13901 DPA10301-DPB14001 DPA10301-DPB16501 DPA10401-DPB10101 DPA10401-DPB10201 DPA10401-DPB10202 DQA10102-DQB10501 DQA10102-DQB10601 DQA10103-DQB10601 DQA10201-DQB10301
LDCTHLEGKIILVAVH

SEQ ID NO: 4365 - protein, 17 aa, Human immunodeficiency virus 1
  source 1..17: note = HLAs: DRB1_0101 DRB1_1001 DPA10103-DPB10202 DPA10103-DPB11501 DPA10103-DPB15001 DPA10104-DPB11501 DPA10105-DPB15001 DPA10202-DPB10101 DPA10202-DPB110601 DPA10202-DPB11901 DPA10301-DPB10101 DPA10301-DPB10201 DPA10301-DPB10202 DPA10301-DPB10401 DPA10301-DPB110601 DPA10301-DPB11801 DPA10301-DPB12301 DPA10301-DPB13901 DPA10301-DPB14001 DPA10301-DPB16501 DPA10301-DPB17501 DPA10401-DPB10101 DPA10401-DPB10201 DPA10401-DPB10202 DQA10102-DQB10501 DQA10102-DQB10601 DQA10103-DQB10601
LDCTHLEGKIILVAVHV

SEQ ID NO: 4366 - protein, 18 aa, Human immunodeficiency virus 1
  source 1..18: note = HLAs: DPA10103-DPB11501 DPA10104-DPB11501 DPA10301-DPB10101 DPA10301-DPB10201 DPA10301-DPB10202 DPA10301-DPB110601 DPA10301-DPB11801 DPA10401-DPB10101 DPA10401-DPB10202 DQA10102-DQB10501
LDCTHLEGKIILVAVHVA

SEQ ID NO: 4367 - protein, 19 aa, Human immunodeficiency virus 1
  source 1..19: note = HLAs: DRB1_0101 DRB1_0404 DRB1_1001 DPA10103-DPB11501 DPA10104-DPB11501 DPA10301-DPB10101 DPA10301-DPB10201 DPA10301-DPB10202 DPA10301-DPB10401 DPA10301-DPB110601 DPA10301-DPB11801 DPA10301-DPB12301 DPA10301-DPB13901 DPA10301-DPB14001 DPA10301-DPB16501 DPA10401-DPB10101 DPA10401-DPB10201 DPA10401-DPB10202 DQA10102-DQB10501 DQA10102-DQB10601 DQA10102-DQB10609 DQA10103-DQB10501 DQA10103-DQB10601 DQA10103-DQB10609
LDCTHLEGKIILVAVHVAS

SEQ ID NO: 4368 - protein, 20 aa, Human immunodeficiency virus 1
  source 1..20: note = HLAs: DRB1_0101 DRB1_0404 DRB1_0408 DRB1_0410 DRB1_0802 DRB1_0804 DRB1_0809 DRB1_0813 DRB1_1001 DRB1_1406 DRB1_1501 DPA10103-DPB10101 DPA10103-DPB11501 DPA10103-DPB11901 DPA10103-DPB15001 DPA10104-DPB10101 DPA10104-DPB11501 DPA10105-DPB10101 DPA10105-DPB15001 DPA10202-DPB10101 DPA10202-DPB110601 DPA10202-DPB11901 DPA10301-DPB10101 DPA10301-DPB10201 DPA10301-DPB10202 DPA10301-DPB10401 DPA10301-DPB110601 DPA10301-DPB11801 DPA10301-DPB12301 DPA10301-DPB13901 DPA10301-DPB14001 DPA10301-DPB15501 DPA10301-DPB16501 DPA10301-DPB17501 DPA10401-DPB10101 DPA10401-DPB10201 DPA10401-DPB10202 DPA10401-DPB10301 DPA10401-DPB10501 DPA10401-DPB11401 DQA10102-DQB10501 DQA10102-DQB10503 DQA10102-DQB10601 DQA10102-DQB10602 DQA10102-DQB10609 DQA10102-DQB10611 DQA10103-DQB10501 DQA10103-DQB10601 DQA10103-DQB10602 DQA10103-DQB10609
LDCTHLEGKIILVAVHVASG

SEQ ID NO: 4369 - protein, 21 aa, Human immunodeficiency virus 1
  source 1..21: note = HLAs: DRB1_0101 DRB1_0404 DRB1_0408 DRB1_0410 DRB1_0813 DRB1_1001 DRB1_1406 DPA10103-DPB11501 DPA10104-DPB11501 DPA10301-DPB10101 DPA10301-DPB10201 DPA10301-DPB10202 DPA10301-DPB110601 DPA10301-DPB11801 DPA10301-DPB14001 DPA10301-DPB16501 DPA10401-DPB10101 DQA10102-DQB10501 DQA10103-DQB10501 DQA10103-DQB10601 DQA10103-DQB10609
LDCTHLEGKIILVAVHVASGY

SEQ ID NO: 4370 - protein, 14 aa, Human immunodeficiency virus 1
  source 1..14: note = HLAs: DQA10102-DQB10501
LDVGDAYFSVPLDK

SEQ ID NO: 4371 - protein, 15 aa, Human immunodeficiency virus 1
  source 1..15: note = HLAs: DQA10201-DQB10301
LEEMMTACQGVGGPG

SEQ ID NO: 4372 - protein, 16 aa, Human immunodeficiency virus 1
  source 1..16: note = HLAs: DQA10201-DQB10301
LEEMMTACQGVGGPGH

SEQ ID NO: 4373 - protein, 13 aa, Human immunodeficiency virus 1
  source 1..13: note = HLAs: DRB1_1001 DQA10102-DQB10501
LEGKIILVAVHVA

SEQ ID NO: 4374 - protein, 14 aa, Human immunodeficiency virus 1
  source 1..14: note = HLAs: DRB1_0101 DRB1_0404 DRB1_0408 DRB1_0813 DRB1_1001 DRB1_1406 DPA10103-DPB11501 DPA10104-DPB11501 DPA10301-DPB10101 DPA10301-DPB10201 DPA10301-DPB10202 DPA10301-DPB11801 DPA10401-DPB10101 DQA10102-DQB10501 DQA10103-DQB10501
LEGKIILVAVHVAS

SEQ ID NO: 4375 - protein, 15 aa, Human immunodeficiency virus 1
  source 1..15: note = HLAs: DRB1_0101 DRB1_0102 DRB1_0401 DRB1_0404 DRB1_0405 DRB1_0408 DRB1_0410 DRB1_0701 DRB1_0801 DRB1_0802 DRB1_0804 DRB1_0806 DRB1_0809 DRB1_0813 DRB1_0901 DRB1_1001 DRB1_1101 DRB1_1102 DRB1_1103 DRB1_1104 DRB1_1114 DRB1_1301 DRB1_1302 DRB1_1304 DRB1_1305 DRB1_1401 DRB1_1402 DRB1_1403 DRB1_1404 DRB1_1406 DRB1_1454 DRB1_1501 DRB1_1502 DRB1_1601 DRB1_1602 DPA10103-DPB11501 DPA10104-DPB11501 DPA10301-DPB10101 DPA10301-DPB10201 DPA10301-DPB10202 DPA10301-DPB110601 DPA10301-DPB11801 DPA10301-DPB14001 DPA10401-DPB10101 DPA10401-DPB10301 DPA10401-DPB11401 DQA10102-DQB10501 DQA10102-DQB10503 DQA10102-DQB10601 DQA10102-DQB10602 DQA10102-DQB10609 DQA10102-DQB10611 DQA10103-DQB10501 DQA10103-DQB10601 DQA10103-DQB10602 DQA10103-DQB10609 DQA10201-DQB10301 DQA10201-DQB10303 DQA10506-DQB10303
LEGKIILVAVHVASG

SEQ ID NO: 4376 - protein, 16 aa, Human immunodeficiency virus 1
  source 1..16: note = HLAs: DRB1_0101 DRB1_0102 DRB1_0401 DRB1_0404 DRB1_0405 DRB1_0408 DRB1_0410 DRB1_0802 DRB1_0804 DRB1_0806 DRB1_0809 DRB1_0813 DRB1_0901 DRB1_1001 DRB1_1104 DRB1_1406 DRB1_1501 DPA10103-DPB11501 DPA10104-DPB11501 DPA10301-DPB10101 DPA10301-DPB10201 DPA10301-DPB10202 DPA10301-DPB110601 DPA10301-DPB11801 DPA10301-DPB14001 DPA10301-DPB16501 DPA10401-DPB10101 DPA10401-DPB10301 DPA10401-DPB11401 DQA10102-DQB10501 DQA10102-DQB10503 DQA10102-DQB10601 DQA10102-DQB10602 DQA10102-DQB10609 DQA10102-DQB10611 DQA10103-DQB10501 DQA10103-DQB10503 DQA10103-DQB10601 DQA10103-DQB10602 DQA10103-DQB10609 DQA10201-DQB10301 DQA10201-DQB10303 DQA10505-DQB10402 DQA10506-DQB10303
LEGKIILVAVHVASGY

SEQ ID NO: 4377 - protein, 16 aa, Human immunodeficiency virus 1
  source 1..16: note = HLAs: DQA10102-DQB10501
LELAENREILKEPVHG

SEQ ID NO: 4378 - protein, 15 aa, Human immunodeficiency virus 1
  source 1..15: note = HLAs: DRB1_0101 DRB1_1001
LGIIQAQPDKSESEL

SEQ ID NO: 4379 - protein, 20 aa, Human immunodeficiency virus 1
  source 1..20: note = HLAs: DRB1_0101 DRB1_0701 DRB1_0801 DRB1_0804 DRB1_0806 DRB1_1102 DRB1_1103 DRB1_1104 DRB1_1114 DRB1_1301 DRB1_1302 DRB1_1304 DRB1_1501 DPA10103-DPB10101 DPA10103-DPB15001 DPA10104-DPB10101 DPA10105-DPB10101 DPA10105-DPB15001 DPA10202-DPB10101 DPA10202-DPB110601 DPA10202-DPB11901 DPA10301-DPB10101 DPA10301-DPB10201 DPA10301-DPB10202 DPA10301-DPB10401 DPA10301-DPB110601 DPA10301-DPB11801 DPA10301-DPB12301 DPA10301-DPB13901 DPA10301-DPB16501 DPA10401-DPB10101 DPA10401-DPB10501
LGIPHPAGLKKKKSVTVLDV

SEQ ID NO: 4380 - protein, 21 aa, Human immunodeficiency virus 1
  source 1..21: note = HLAs: DRB1_0101 DRB1_1102 DRB1_1103 DRB1_1104 DRB1_1301 DRB1_1304 DPA10301-DPB10101 DPA10301-DPB10201 DPA10301-DPB10202 DPA10301-DPB110601 DPA10301-DPB11801 DPA10301-DPB16501 DPA10401-DPB10101
LGIPHPAGLKKKKSVTVLDVG

SEQ ID NO: 4381 - protein, 22 aa, Human immunodeficiency virus 1
  source 1..22: note = HLAs: DRB1_0101 DRB1_0806 DRB1_1102 DRB1_1103 DRB1_1104 DRB1_1301 DRB1_1304 DPA10103-DPB15001 DPA10105-DPB15001 DPA10301-DPB10101 DPA10301-DPB10201 DPA10301-DPB10202 DPA10301-DPB110601 DPA10301-DPB11801 DPA10301-DPB16501 DPA10401-DPB10101
LGIPHPAGLKKKKSVTVLDVGD

SEQ ID NO: 4382 - protein, 23 aa, Human immunodeficiency virus 1
  source 1..23: note = HLAs: DRB1_0101 DRB1_0806 DRB1_1001 DRB1_1102 DRB1_1103 DRB1_1104 DRB1_1301 DRB1_1304 DPA10103-DPB10101 DPA10103-DPB11501 DPA10103-DPB15001 DPA10104-DPB10101 DPA10104-DPB11501 DPA10105-DPB10101 DPA10105-DPB15001 DPA10202-DPB10101 DPA10301-DPB10101 DPA10301-DPB10201 DPA10301-DPB10202 DPA10301-DPB110601 DPA10301-DPB11801 DPA10301-DPB16501 DPA10401-DPB10101 DPA10401-DPB10501
LGIPHPAGLKKKKSVTVLDVGDA

SEQ ID NO: 4383 - protein, 24 aa, Human immunodeficiency virus 1
  source 1..24: note = HLAs: DRB1_0101 DRB1_0806 DRB1_1001 DRB1_1102 DRB1_1103 DRB1_1104 DRB1_1301 DRB1_1304 DPA10103-DPB10101 DPA10103-DPB11501 DPA10103-DPB15001 DPA10104-DPB10101 DPA10104-DPB11501 DPA10105-DPB10101 DPA10105-DPB15001 DPA10202-DPB10101 DPA10202-DPB110601 DPA10202-DPB11901 DPA10301-DPB10101 DPA10301-DPB10201 DPA10301-DPB10202 DPA10301-DPB110601 DPA10301-DPB11801 DPA10301-DPB14001 DPA10301-DPB16501 DPA10401-DPB10101 DPA10401-DPB10501 DQA10102-DQB10501
LGIPHPAGLKKKKSVTVLDVGDAY

SEQ ID NO: 4384 - protein, 25 aa, Human immunodeficiency virus 1
  source 1..25: note = HLAs: DRB1_0101 DRB1_0404 DRB1_0410 DRB1_0701 DRB1_0806 DRB1_1001 DRB1_1102 DRB1_1103 DRB1_1104 DRB1_1114 DRB1_1301 DRB1_1302 DRB1_1304 DRB1_1406 DPA10103-DPB10101 DPA10103-DPB11501 DPA10103-DPB15001 DPA10104-DPB10101 DPA10104-DPB11501 DPA10105-DPB10101 DPA10105-DPB15001 DPA10202-DPB10101 DPA10202-DPB110601 DPA10202-DPB11901 DPA10301-DPB10101 DPA10301-DPB10201 DPA10301-DPB10202 DPA10301-DPB10401 DPA10301-DPB110601 DPA10301-DPB11801 DPA10301-DPB12301 DPA10301-DPB13901 DPA10301-DPB14001 DPA10301-DPB16501 DPA10401-DPB10101 DPA10401-DPB10202 DPA10401-DPB10501 DQA10102-DQB10501 DQA10102-DQB10604 DQA10102-DQB10609
LGIPHPAGLKKKKSVTVLDVGDAYF

SEQ ID NO: 4385 - protein, 13 aa, Human immunodeficiency virus 1
  source 1..13: note = HLAs: DRB1_1101 DRB1_1104 DRB1_1305 DRB1_1406
LGLNKIVRMYSPV

SEQ ID NO: 4386 - protein, 14 aa, Human immunodeficiency virus 1
  source 1..14: note = HLAs: DRB1_0101 DRB1_0102 DRB1_0401 DRB1_0404 DRB1_0405 DRB1_0408 DRB1_0410 DRB1_0801 DRB1_0802 DRB1_0804 DRB1_0806 DRB1_0809 DRB1_0813 DRB1_1001 DRB1_1101 DRB1_1102 DRB1_1103 DRB1_1104 DRB1_1114 DRB1_1301 DRB1_1302 DRB1_1304 DRB1_1305 DRB1_1402 DRB1_1406 DRB1_1501 DRB1_1502 DRB1_1601 DRB1_1602 DQA10102-DQB10501 DQA10103-DQB10501 DQA10103-DQB10609
LGLNKIVRMYSPVS

SEQ ID NO: 4387 - protein, 15 aa, Human immunodeficiency virus 1
  source 1..15: note = HLAs: DRB1_0101 DRB1_0102 DRB1_0103 DRB1_0401 DRB1_0402 DRB1_0403 DRB1_0404 DRB1_0405 DRB1_0406 DRB1_0407 DRB1_0408 DRB1_0410 DRB1_0411 DRB1_0701 DRB1_0801 DRB1_0802 DRB1_0803 DRB1_0804 DRB1_0806 DRB1_0809 DRB1_0813 DRB1_0901 DRB1_1001 DRB1_1101 DRB1_1102 DRB1_1103 DRB1_1104 DRB1_1114 DRB1_1201 DRB1_1202 DRB1_1301 DRB1_1302 DRB1_1303 DRB1_1304 DRB1_1305 DRB1_1312 DRB1_1401 DRB1_1402 DRB1_1403 DRB1_1404 DRB1_1405 DRB1_1406 DRB1_1418 DRB1_1454 DRB1_1501 DRB1_1502 DRB1_1503 DRB1_1601 DRB1_1602 DPA10103-DPB11501 DPA10104-DPB11501 DPA10202-DPB10101 DPA10202-DPB110601 DPA10202-DPB11801 DPA10202-DPB11901 DPA10301-DPB10101 DPA10301-DPB10201 DPA10301-DPB10202 DPA10301-DPB110601 DPA10301-DPB11801 DPA10301-DPB14001 DPA10401-DPB10101 DPA10401-DPB10201 DPA10401-DPB10202 DQA10102-DQB10501 DQA10102-DQB10503 DQA10102-DQB10601 DQA10102-DQB10602 DQA10102-DQB10609 DQA10103-DQB10501 DQA10103-DQB10503 DQA10103-DQB10601 DQA10103-DQB10602 DQA10103-DQB10604 DQA10103-DQB10608 DQA10103-DQB10609; note = HLAs: DQA10501-DQB10501 DQA10505-DQB10402 DQA10505-DQB10501
LGLNKIVRMYSPVSI

SEQ ID NO: 4388 - protein, 16 aa, Human immunodeficiency virus 1
  source 1..16: note = HLAs: DRB1_0101 DRB1_0102 DRB1_0401 DRB1_0402 DRB1_0403 DRB1_0404 DRB1_0405 DRB1_0406 DRB1_0407 DRB1_0408 DRB1_0410 DRB1_0701 DRB1_0801 DRB1_0802 DRB1_0803 DRB1_0804 DRB1_0806 DRB1_0809 DRB1_0813 DRB1_0901 DRB1_1001 DRB1_1101 DRB1_1102 DRB1_1103 DRB1_1104 DRB1_1114 DRB1_1201 DRB1_1202 DRB1_1301 DRB1_1302 DRB1_1304 DRB1_1305 DRB1_1312 DRB1_1401 DRB1_1402 DRB1_1403 DRB1_1404 DRB1_1405 DRB1_1406 DRB1_1454 DRB1_1501 DRB1_1502 DRB1_1503 DRB1_1601 DRB1_1602 DPA10103-DPB10101 DPA10103-DPB10201 DPA10103-DPB10301 DPA10103-DPB10501 DPA10103-DPB10601 DPA10103-DPB10901 DPA10103-DPB11001 DPA10103-DPB11101 DPA10103-DPB112401 DPA10103-DPB11301 DPA10103-DPB113101 DPA10103-DPB113301 DPA10103-DPB11401 DPA10103-DPB11501 DPA10103-DPB11601 DPA10103-DPB11701 DPA10103-DPB11801 DPA10103-DPB11901 DPA10103-DPB12001 DPA10103-DPB12101 DPA10103-DPB12901 DPA10103-DPB13001 DPA10103-DPB13101 DPA10103-DPB13401 DPA10103-DPB14801 DPA10103-DPB15001 DPA10103-DPB15501 DPA10104-DPB10101 DPA10104-DPB10301 DPA10104-DPB11001; note = HLAs: DPA10104-DPB11301 DPA10104-DPB11501 DPA10105-DPB10101 DPA10105-DPB10301 DPA10105-DPB11801 DPA10105-DPB15001 DPA10201-DPB10601 DPA10201-DPB10901 DPA10201-DPB11301 DPA10201-DPB113301 DPA10201-DPB11401 DPA10201-DPB11501 DPA10201-DPB15501 DPA10202-DPB10101 DPA10202-DPB10201 DPA10202-DPB10202 DPA10202-DPB10301 DPA10202-DPB10501 DPA10202-DPB10901 DPA10202-DPB110601 DPA10202-DPB11101 DPA10202-DPB11301 DPA10202-DPB113101 DPA10202-DPB11401 DPA10202-DPB11701 DPA10202-DPB11801 DPA10202-DPB11901 DPA10202-DPB12101 DPA10202-DPB12901 DPA10202-DPB13001 DPA10202-DPB13101 DPA10202-DPB13801 DPA10202-DPB14501 DPA10202-DPB15501 DPA10202-DPB16501 DPA10202-DPB18501 DPA10301-DPB10101 DPA10301-DPB10201 DPA10301-DPB10202 DPA10301-DPB10301 DPA10301-DPB10401 DPA10301-DPB10402 DPA10301-DPB10901 DPA10301-DPB110501 DPA10301-DPB110601 DPA10301-DPB11101 DPA10301-DPB11301 DPA10301-DPB11701 DPA10301-DPB11801 DPA10301-DPB12301 DPA10301-DPB13901 DPA10301-DPB14001 DPA10301-DPB14901 DPA10301-DPB15501; note = HLAs: DPA10301-DPB16501 DPA10301-DPB17501 DPA10301-DPB18001 DPA10401-DPB10101 DPA10401-DPB10201 DPA10401-DPB10202 DPA10401-DPB10301 DPA10401-DPB10402 DPA10401-DPB10501 DPA10401-DPB110501 DPA10401-DPB11301 DPA10401-DPB113301 DPA10401-DPB11401 DPA10401-DPB14901 DQA10102-DQB10501 DQA10102-DQB10503 DQA10102-DQB10601 DQA10102-DQB10602 DQA10102-DQB10609 DQA10102-DQB10611 DQA10103-DQB10501 DQA10103-DQB10503 DQA10103-DQB10601 DQA10103-DQB10602 DQA10103-DQB10604 DQA10103-DQB10608 DQA10103-DQB10609 DQA10201-DQB10301 DQA10201-DQB10303 DQA10501-DQB10501 DQA10505-DQB10402 DQA10505-DQB10501 DQA10506-DQB10303
LGLNKIVRMYSPVSIL

SEQ ID NO: 4389 - protein, 17 aa, Human immunodeficiency virus 1
  source 1..17: note = HLAs: DRB1_0101 DRB1_0102 DRB1_0401 DRB1_0402 DRB1_0403 DRB1_0404 DRB1_0405 DRB1_0406 DRB1_0407 DRB1_0408 DRB1_0410 DRB1_0701 DRB1_0801 DRB1_0802 DRB1_0803 DRB1_0804 DRB1_0806 DRB1_0809 DRB1_0813 DRB1_0901 DRB1_1001 DRB1_1101 DRB1_1102 DRB1_1103 DRB1_1104 DRB1_1114 DRB1_1201 DRB1_1202 DRB1_1301 DRB1_1302 DRB1_1303 DRB1_1304 DRB1_1305 DRB1_1312 DRB1_1401 DRB1_1402 DRB1_1403 DRB1_1404 DRB1_1405 DRB1_1406 DRB1_1454 DRB1_1501 DRB1_1502 DRB1_1503 DRB1_1601 DRB1_1602 DPA10103-DPB10101 DPA10103-DPB10202 DPA10103-DPB10301 DPA10103-DPB10501 DPA10103-DPB10601 DPA10103-DPB10901 DPA10103-DPB11001 DPA10103-DPB11101 DPA10103-DPB112401 DPA10103-DPB11301 DPA10103-DPB113101 DPA10103-DPB113301 DPA10103-DPB11401 DPA10103-DPB11501 DPA10103-DPB11601 DPA10103-DPB11701 DPA10103-DPB11801 DPA10103-DPB11901 DPA10103-DPB12001 DPA10103-DPB12101 DPA10103-DPB12901 DPA10103-DPB13001 DPA10103-DPB13101 DPA10103-DPB13401 DPA10103-DPB15001 DPA10103-DPB15501 DPA10104-DPB10101 DPA10104-DPB10301 DPA10104-DPB11001; note = HLAs: DPA10104-DPB11301 DPA10104-DPB11501 DPA10105-DPB10101 DPA10105-DPB10301 DPA10105-DPB11801 DPA10105-DPB15001 DPA10106-DPB10101 DPA10201-DPB10101 DPA10201-DPB10301 DPA10201-DPB10601 DPA10201-DPB10901 DPA10201-DPB110601 DPA10201-DPB11401 DPA10201-DPB11501 DPA10201-DPB11901 DPA10201-DPB14501 DPA10201-DPB15501 DPA10202-DPB10101 DPA10202-DPB10201 DPA10202-DPB10202 DPA10202-DPB10301 DPA10202-DPB10501 DPA10202-DPB10901 DPA10202-DPB110601 DPA10202-DPB11101 DPA10202-DPB11301 DPA10202-DPB113101 DPA10202-DPB11401 DPA10202-DPB11701 DPA10202-DPB11801 DPA10202-DPB11901 DPA10202-DPB12101 DPA10202-DPB12901 DPA10202-DPB13001 DPA10202-DPB13101 DPA10202-DPB13801 DPA10202-DPB14501 DPA10202-DPB15501 DPA10202-DPB16501 DPA10202-DPB18501 DPA10301-DPB10101 DPA10301-DPB10201 DPA10301-DPB10202 DPA10301-DPB10301 DPA10301-DPB10401 DPA10301-DPB10402 DPA10301-DPB10901 DPA10301-DPB110501 DPA10301-DPB110601 DPA10301-DPB11101 DPA10301-DPB11301 DPA10301-DPB11701 DPA10301-DPB11801 DPA10301-DPB12301; note = HLAs: DPA10301-DPB13901 DPA10301-DPB14001 DPA10301-DPB14901 DPA10301-DPB15501 DPA10301-DPB16501 DPA10301-DPB17501 DPA10301-DPB18001 DPA10401-DPB10101 DPA10401-DPB10201 DPA10401-DPB10202 DPA10401-DPB10301 DPA10401-DPB10501 DPA10401-DPB11301 DPA10401-DPB113301 DPA10401-DPB11401 DQA10102-DQB10501 DQA10102-DQB10503 DQA10102-DQB10601 DQA10102-DQB10602 DQA10102-DQB10609 DQA10103-DQB10501 DQA10103-DQB10503 DQA10103-DQB10601 DQA10103-DQB10602 DQA10103-DQB10604 DQA10103-DQB10608 DQA10103-DQB10609 DQA10201-DQB10301 DQA10501-DQB10501 DQA10505-DQB10402 DQA10505-DQB10501
LGLNKIVRMYSPVSILD

SEQ ID NO: 4390 - protein, 18 aa, Human immunodeficiency virus 1
  source 1..18: note = HLAs: DRB1_0101 DRB1_0102 DRB1_0401 DRB1_0404 DRB1_0405 DRB1_0408 DRB1_0410 DRB1_0701 DRB1_0802 DRB1_0803 DRB1_0804 DRB1_0806 DRB1_0809 DRB1_0813 DRB1_0901 DRB1_1001 DRB1_1101 DRB1_1102 DRB1_1103 DRB1_1104 DRB1_1114 DRB1_1301 DRB1_1302 DRB1_1304 DRB1_1305 DRB1_1404 DRB1_1406 DRB1_1501 DRB1_1502 DRB1_1503 DRB1_1601 DRB1_1602 DPA10103-DPB10101 DPA10103-DPB10301 DPA10103-DPB10501 DPA10103-DPB10601 DPA10103-DPB10901 DPA10103-DPB11001 DPA10103-DPB11101 DPA10103-DPB112401 DPA10103-DPB11301 DPA10103-DPB113101 DPA10103-DPB113301 DPA10103-DPB11401 DPA10103-DPB11501 DPA10103-DPB11601 DPA10103-DPB11701 DPA10103-DPB11901 DPA10103-DPB12001 DPA10103-DPB12101 DPA10103-DPB12901 DPA10103-DPB13001 DPA10103-DPB13101 DPA10103-DPB13401 DPA10103-DPB15001 DPA10103-DPB15501 DPA10104-DPB10101 DPA10104-DPB10301 DPA10104-DPB11001 DPA10104-DPB11301 DPA10104-DPB11501 DPA10105-DPB10101 DPA10105-DPB10301 DPA10105-DPB15001 DPA10106-DPB10101 DPA10201-DPB10101 DPA10201-DPB11401 DPA10201-DPB11501 DPA10202-DPB10101; note = HLAs: DPA10202-DPB10202 DPA10202-DPB10901 DPA10202-DPB110601 DPA10202-DPB11101 DPA10202-DPB11301 DPA10202-DPB113101 DPA10202-DPB11401 DPA10202-DPB11701 DPA10202-DPB11901 DPA10202-DPB12101 DPA10202-DPB12901 DPA10202-DPB13001 DPA10202-DPB13101 DPA10202-DPB15501 DPA10202-DPB16501 DPA10301-DPB10101 DPA10301-DPB10201 DPA10301-DPB10202 DPA10301-DPB10301 DPA10301-DPB10401 DPA10301-DPB10402 DPA10301-DPB10901 DPA10301-DPB110501 DPA10301-DPB110601 DPA10301-DPB11101 DPA10301-DPB11301 DPA10301-DPB11701 DPA10301-DPB11801 DPA10301-DPB12301 DPA10301-DPB13901 DPA10301-DPB14001 DPA10301-DPB14901 DPA10301-DPB15501 DPA10301-DPB16501 DPA10301-DPB17501 DPA10301-DPB18001 DPA10401-DPB10101 DPA10401-DPB10201 DPA10401-DPB10202 DPA10401-DPB10301 DPA10401-DPB10501 DPA10401-DPB11301 DPA10401-DPB113301 DPA10401-DPB11401 DQA10102-DQB10501 DQA10102-DQB10503 DQA10102-DQB10601 DQA10102-DQB10609 DQA10103-DQB10501 DQA10103-DQB10503 DQA10103-DQB10601 DQA10103-DQB10609 DQA10505-DQB10402
LGLNKIVRMYSPVSILDI

SEQ ID NO: 4391 - protein, 14 aa, Human immunodeficiency virus 1
  source 1..14: note = HLAs: DPA10301-DPB10101
LHPDKWTVQPIQLP

SEQ ID NO: 4392 - protein, 14 aa, Human immunodeficiency virus 1
  source 1..14: note = HLAs: DRB1_0804 DRB1_0806 DRB1_1102 DRB1_1103 DRB1_1104 DRB1_1301 DRB1_1304 DRB1_1406 DQA10102-DQB10501 DQA10102-DQB10609
LKKIIGQVRDQAEH

SEQ ID NO: 4393 - protein, 15 aa, Human immunodeficiency virus 1
  source 1..15: note = HLAs: DRB1_0101 DRB1_0404 DRB1_0410 DRB1_0801 DRB1_0802 DRB1_0804 DRB1_0806 DRB1_0809 DRB1_1101 DRB1_1102 DRB1_1103 DRB1_1104 DRB1_1301 DRB1_1304 DRB1_1305 DRB1_1402 DRB1_1406 DQA10102-DQB10501 DQA10102-DQB10604 DQA10102-DQB10609
LKKIIGQVRDQAEHL

SEQ ID NO: 4394 - protein, 16 aa, Human immunodeficiency virus 1
  source 1..16: note = HLAs: DRB1_0410 DRB1_0804 DRB1_0806 DRB1_1101 DRB1_1102 DRB1_1103 DRB1_1104 DRB1_1301 DRB1_1304 DRB1_1305 DRB1_1406 DQA10102-DQB10501 DQA10102-DQB10503 DQA10102-DQB10604 DQA10102-DQB10609
LKKIIGQVRDQAEHLK

SEQ ID NO: 4395 - protein, 17 aa, Human immunodeficiency virus 1
  source 1..17: note = HLAs: DRB1_0410 DRB1_0804 DRB1_0806 DRB1_1101 DRB1_1102 DRB1_1103 DRB1_1104 DRB1_1301 DRB1_1304 DRB1_1305 DRB1_1406 DQA10102-DQB10501 DQA10102-DQB10604 DQA10102-DQB10609
LKKIIGQVRDQAEHLKT

SEQ ID NO: 4396 - protein, 18 aa, Human immunodeficiency virus 1
  source 1..18: note = HLAs: DQA10102-DQB10609
LKKIIGQVRDQAEHLKTA

SEQ ID NO: 4397 - protein, 19 aa, Human immunodeficiency virus 1
  source 1..19: note = HLAs: DRB1_0804 DRB1_0806 DRB1_1102 DRB1_1103 DRB1_1104 DRB1_1301 DRB1_1304 DRB1_1406 DQA10102-DQB10501 DQA10102-DQB10604 DQA10102-DQB10609
LKKIIGQVRDQAEHLKTAV

SEQ ID NO: 4398 - protein, 20 aa, Human immunodeficiency virus 1
  source 1..20: note = HLAs: DRB1_0410 DRB1_0804 DRB1_0806 DRB1_1101 DRB1_1102 DRB1_1103 DRB1_1104 DRB1_1301 DRB1_1304 DRB1_1305 DRB1_1406 DQA10102-DQB10501 DQA10102-DQB10503 DQA10102-DQB10604 DQA10102-DQB10609
LKKIIGQVRDQAEHLKTAVQ

SEQ ID NO: 4399 - protein, 21 aa, Human immunodeficiency virus 1
  source 1..21: note = HLAs: DRB1_0410 DRB1_0804 DRB1_0806 DRB1_1102 DRB1_1103 DRB1_1104 DRB1_1301 DRB1_1304 DRB1_1406 DQA10102-DQB10501 DQA10102-DQB10604 DQA10102-DQB10609
LKKIIGQVRDQAEHLKTAVQM

SEQ ID NO: 4400 - protein, 22 aa, Human immunodeficiency virus 1
  source 1..22: note = HLAs: DRB1_0410 DRB1_0804 DRB1_0806 DRB1_1102 DRB1_1103 DRB1_1104 DRB1_1301 DRB1_1304 DRB1_1406 DQA10102-DQB10501 DQA10102-DQB10604 DQA10102-DQB10609
LKKIIGQVRDQAEHLKTAVQMA

SEQ ID NO: 4401 - protein, 23 aa, Human immunodeficiency virus 1
  source 1..23: note = HLAs: DRB1_0410 DRB1_0804 DRB1_0806 DRB1_1001 DRB1_1102 DRB1_1103 DRB1_1104 DRB1_1301 DRB1_1304 DRB1_1406 DPA10301-DPB10101 DPA10301-DPB11801 DPA10401-DPB10101 DQA10102-DQB10501 DQA10102-DQB10604 DQA10102-DQB10609 DQA10103-DQB10501 DQA10103-DQB10609
LKKIIGQVRDQAEHLKTAVQMAV

SEQ ID NO: 4402 - protein, 24 aa, Human immunodeficiency virus 1
  source 1..24: note = HLAs: DRB1_0101 DRB1_0410 DRB1_0804 DRB1_0806 DRB1_1001 DRB1_1101 DRB1_1102 DRB1_1103 DRB1_1104 DRB1_1301 DRB1_1304 DRB1_1305 DRB1_1406 DPA10103-DPB11501 DPA10104-DPB11501 DPA10301-DPB10101 DPA10301-DPB10201 DPA10301-DPB10202 DPA10301-DPB110601 DPA10301-DPB11801 DPA10301-DPB14001 DPA10301-DPB16501 DPA10401-DPB10101 DQA10102-DQB10501 DQA10102-DQB10503 DQA10102-DQB10604 DQA10102-DQB10609 DQA10103-DQB10501 DQA10103-DQB10601 DQA10103-DQB10609
LKKIIGQVRDQAEHLKTAVQMAVF

SEQ ID NO: 4403 - protein, 25 aa, Human immunodeficiency virus 1
  source 1..25: note = HLAs: DRB1_0101 DRB1_0404 DRB1_0410 DRB1_0804 DRB1_0806 DRB1_1001 DRB1_1101 DRB1_1102 DRB1_1103 DRB1_1104 DRB1_1301 DRB1_1304 DRB1_1305 DRB1_1406 DPA10103-DPB11501 DPA10103-DPB15001 DPA10104-DPB11501 DPA10105-DPB15001 DPA10202-DPB10101 DPA10301-DPB10101 DPA10301-DPB10201 DPA10301-DPB10202 DPA10301-DPB110601 DPA10301-DPB11801 DPA10301-DPB14001 DPA10301-DPB16501 DPA10401-DPB10101 DPA10401-DPB10501 DQA10102-DQB10501 DQA10102-DQB10503 DQA10102-DQB10601 DQA10102-DQB10604 DQA10102-DQB10609 DQA10103-DQB10501 DQA10103-DQB10601 DQA10103-DQB10609
LKKIIGQVRDQAEHLKTAVQMAVFI

SEQ ID NO: 4404 - protein, 14 aa, Human immunodeficiency virus 1
  source 1..14: note = HLAs: DPA10301-DPB10101 DPA10401-DPB10101
LKKKKSVTVLDVGD

SEQ ID NO: 4405 - protein, 15 aa, Human immunodeficiency virus 1
  source 1..15: note = HLAs: DRB1_0101 DRB1_1001 DRB1_1102 DRB1_1301 DRB1_1304 DPA10103-DPB10101 DPA10103-DPB11501 DPA10103-DPB15001 DPA10104-DPB10101 DPA10104-DPB11501 DPA10105-DPB10101 DPA10105-DPB15001 DPA10202-DPB10101 DPA10301-DPB10101 DPA10301-DPB10201 DPA10301-DPB10202 DPA10301-DPB110601 DPA10301-DPB11801 DPA10301-DPB14001 DPA10301-DPB16501 DPA10401-DPB10101 DPA10401-DPB10301 DPA10401-DPB11401
LKKKKSVTVLDVGDA

SEQ ID NO: 4406 - protein, 16 aa, Human immunodeficiency virus 1
  source 1..16: note = HLAs: DRB1_1001 DPA10103-DPB10101 DPA10103-DPB11501 DPA10103-DPB15001 DPA10104-DPB10101 DPA10104-DPB11501 DPA10105-DPB10101 DPA10105-DPB15001 DPA10202-DPB10101 DPA10301-DPB10101 DPA10301-DPB10201 DPA10301-DPB10202 DPA10301-DPB110601 DPA10301-DPB11801 DPA10301-DPB14001 DPA10301-DPB16501 DPA10401-DPB10101 DPA10401-DPB10301 DPA10401-DPB11401 DQA10102-DQB10501 DQA10102-DQB10609
LKKKKSVTVLDVGDAY

SEQ ID NO: 4407 - protein, 17 aa, Human immunodeficiency virus 1
  source 1..17: note = HLAs: DRB1_0101 DRB1_0404 DRB1_1001 DPA10103-DPB10101 DPA10103-DPB11501 DPA10103-DPB15001 DPA10104-DPB10101 DPA10104-DPB11501 DPA10105-DPB10101 DPA10105-DPB15001 DPA10202-DPB10101 DPA10202-DPB110601 DPA10202-DPB11901 DPA10301-DPB10101 DPA10301-DPB10201 DPA10301-DPB10202 DPA10301-DPB110601 DPA10301-DPB11801 DPA10301-DPB14001 DPA10301-DPB16501 DPA10401-DPB10101 DPA10401-DPB10501 DPA10401-DPB11401 DQA10102-DQB10501 DQA10102-DQB10503 DQA10102-DQB10604 DQA10102-DQB10609 DQA10103-DQB10609 DQA10501-DQB10201 DQA10505-DQB10201 DQA10505-DQB10202
LKKKKSVTVLDVGDAYF

SEQ ID NO: 4408 - protein, 18 aa, Human immunodeficiency virus 1
  source 1..18: note = HLAs: DPA10301-DPB10101 DPA10401-DPB10101 DQA10102-DQB10501 DQA10102-DQB10604 DQA10102-DQB10609
LKKKKSVTVLDVGDAYFS

SEQ ID NO: 4409 - protein, 19 aa, Human immunodeficiency virus 1
  source 1..19: note = HLAs: DRB1_0404 DRB1_1001 DPA10103-DPB10101 DPA10103-DPB11501 DPA10103-DPB15001 DPA10104-DPB10101 DPA10104-DPB11501 DPA10105-DPB10101 DPA10105-DPB15001 DPA10202-DPB10101 DPA10301-DPB10101 DPA10301-DPB10201 DPA10301-DPB10202 DPA10301-DPB10401 DPA10301-DPB110601 DPA10301-DPB11801 DPA10301-DPB12301 DPA10301-DPB13901 DPA10301-DPB14001 DPA10301-DPB16501 DPA10401-DPB10101 DPA10401-DPB10202 DPA10401-DPB10501 DQA10102-DQB10501 DQA10102-DQB10503 DQA10102-DQB10604 DQA10102-DQB10609 DQA10103-DQB10501 DQA10103-DQB10609 DQA10501-DQB10201 DQA10505-DQB10201 DQA10505-DQB10202
LKKKKSVTVLDVGDAYFSV

SEQ ID NO: 4410 - protein, 20 aa, Human immunodeficiency virus 1
  source 1..20: note = HLAs: DRB1_0101 DRB1_0301 DRB1_0404 DRB1_0410 DRB1_1001 DPA10103-DPB10101 DPA10103-DPB11501 DPA10103-DPB11901 DPA10103-DPB13101 DPA10103-DPB15001 DPA10104-DPB10101 DPA10104-DPB11501 DPA10105-DPB10101 DPA10105-DPB15001 DPA10106-DPB10101 DPA10201-DPB10101 DPA10202-DPB10101 DPA10202-DPB10501 DPA10202-DPB110601 DPA10202-DPB11101 DPA10202-DPB11901 DPA10202-DPB13101 DPA10202-DPB13801 DPA10202-DPB15501 DPA10301-DPB10101 DPA10301-DPB10201 DPA10301-DPB10202 DPA10301-DPB10401 DPA10301-DPB10402 DPA10301-DPB110501 DPA10301-DPB110601 DPA10301-DPB11101 DPA10301-DPB11801 DPA10301-DPB12301 DPA10301-DPB13901 DPA10301-DPB14001 DPA10301-DPB14901 DPA10301-DPB15501 DPA10301-DPB16501 DPA10301-DPB18001 DPA10401-DPB10101 DPA10401-DPB10201 DPA10401-DPB10202 DPA10401-DPB10301 DPA10401-DPB10501 DPA10401-DPB11401 DQA10102-DQB10501 DQA10102-DQB10503 DQA10102-DQB10601 DQA10102-DQB10604 DQA10102-DQB10609 DQA10103-DQB10501 DQA10103-DQB10609 DQA10201-DQB10301 DQA10501-DQB10201 DQA10505-DQB10201 DQA10505-DQB10202
LKKKKSVTVLDVGDAYFSVP

SEQ ID NO: 4411 - protein, 21 aa, Human immunodeficiency virus 1
  source 1..21: note = HLAs: DRB1_0101 DRB1_0404 DRB1_0410 DRB1_1001 DPA10103-DPB10101 DPA10103-DPB11501 DPA10103-DPB15001 DPA10104-DPB10101 DPA10104-DPB11501 DPA10105-DPB10101 DPA10105-DPB15001 DPA10202-DPB10101 DPA10301-DPB10101 DPA10301-DPB10201 DPA10301-DPB10202 DPA10301-DPB10401 DPA10301-DPB110601 DPA10301-DPB11801 DPA10301-DPB12301 DPA10301-DPB13901 DPA10301-DPB14001 DPA10301-DPB16501 DPA10401-DPB10101 DPA10401-DPB10201 DPA10401-DPB10202 DPA10401-DPB10501 DQA10102-DQB10501 DQA10102-DQB10503 DQA10102-DQB10604 DQA10102-DQB10609 DQA10103-DQB10501 DQA10103-DQB10609
LKKKKSVTVLDVGDAYFSVPL

SEQ ID NO: 4412 - protein, 22 aa, Human immunodeficiency virus 1
  source 1..22: note = HLAs: DRB1_0101 DRB1_0404 DRB1_0410 DRB1_1001 DPA10103-DPB10101 DPA10103-DPB11501 DPA10103-DPB15001 DPA10104-DPB10101 DPA10104-DPB11501 DPA10105-DPB10101 DPA10105-DPB15001 DPA10202-DPB10101 DPA10301-DPB10101 DPA10301-DPB10201 DPA10301-DPB10202 DPA10301-DPB10401 DPA10301-DPB110601 DPA10301-DPB11801 DPA10301-DPB12301 DPA10301-DPB13901 DPA10301-DPB14001 DPA10301-DPB16501 DPA10401-DPB10101 DPA10401-DPB10201 DPA10401-DPB10202 DPA10401-DPB10501 DQA10102-DQB10501 DQA10102-DQB10503 DQA10102-DQB10604 DQA10102-DQB10609 DQA10103-DQB10501 DQA10103-DQB10609
LKKKKSVTVLDVGDAYFSVPLD

SEQ ID NO: 4413 - protein, 23 aa, Human immunodeficiency virus 1
  source 1..23: note = HLAs: DPA10301-DPB10101
LKPGMDGPKVKQWPLTEEKIKAL

SEQ ID NO: 4414 - protein, 13 aa, Human immunodeficiency virus 1
  source 1..13: note = HLAs: DPA10103-DPB10101 DPA10103-DPB10202 DPA10103-DPB11501 DPA10104-DPB10101 DPA10104-DPB11501 DPA10105-DPB10101 DPA10301-DPB10101 DPA10301-DPB10201 DPA10301-DPB10202 DPA10301-DPB10401 DPA10301-DPB110601 DPA10301-DPB11801 DPA10301-DPB12301 DPA10301-DPB13901 DPA10301-DPB14001 DPA10401-DPB10101 DPA10401-DPB10201 DPA10401-DPB10202 DQA10102-DQB10501
LKTAVQMAVFIHN

SEQ ID NO: 4415 - protein, 14 aa, Human immunodeficiency virus 1
  source 1..14: note = HLAs: DRB1_1001 DPA10103-DPB10101 DPA10103-DPB10201 DPA10103-DPB10202 DPA10103-DPB10401 DPA10103-DPB112601 DPA10103-DPB11501 DPA10103-DPB11601 DPA10103-DPB11801 DPA10103-DPB11901 DPA10103-DPB12301 DPA10103-DPB13101 DPA10103-DPB13401 DPA10103-DPB13901 DPA10103-DPB14001 DPA10103-DPB14801 DPA10103-DPB15001 DPA10104-DPB10101 DPA10104-DPB11501 DPA10105-DPB10101 DPA10105-DPB10401 DPA10105-DPB11801 DPA10105-DPB15001 DPA10106-DPB10101 DPA10201-DPB10101 DPA10201-DPB110601 DPA10201-DPB11501 DPA10201-DPB11901 DPA10202-DPB10101 DPA10202-DPB10202 DPA10202-DPB110601 DPA10202-DPB11901 DPA10301-DPB10101 DPA10301-DPB10201 DPA10301-DPB10202 DPA10301-DPB10401 DPA10301-DPB10402 DPA10301-DPB110501 DPA10301-DPB110601 DPA10301-DPB11801 DPA10301-DPB12301 DPA10301-DPB13901 DPA10301-DPB14001 DPA10301-DPB14901 DPA10301-DPB15501 DPA10301-DPB16501 DPA10301-DPB17501 DPA10301-DPB18001 DPA10401-DPB10101 DPA10401-DPB10201 DPA10401-DPB10202 DPA10401-DPB10501 DPA10401-DPB11301 DPA10401-DPB113301 DQA10102-DQB10501; note = HLAs: DQA10102-DQB10609
LKTAVQMAVFIHNF

SEQ ID NO: 4416 - protein, 15 aa, Human immunodeficiency virus 1
  source 1..15: note = HLAs: DRB1_0101 DRB1_0102 DRB1_0404 DRB1_0410 DRB1_0701 DRB1_0804 DRB1_0806 DRB1_0901 DRB1_1001 DRB1_1102 DRB1_1103 DRB1_1104 DRB1_1301 DRB1_1304 DRB1_1406 DRB1_1501 DRB1_1602 DPA10103-DPB10101 DPA10103-DPB10201 DPA10103-DPB10202 DPA10103-DPB10401 DPA10103-DPB10402 DPA10103-DPB10501 DPA10103-DPB10601 DPA10103-DPB110501 DPA10103-DPB11101 DPA10103-DPB112601 DPA10103-DPB11501 DPA10103-DPB11601 DPA10103-DPB11801 DPA10103-DPB11901 DPA10103-DPB12301 DPA10103-DPB13101 DPA10103-DPB13401 DPA10103-DPB13901 DPA10103-DPB14001 DPA10103-DPB14101 DPA10103-DPB14801 DPA10103-DPB14901 DPA10103-DPB15001 DPA10103-DPB15101 DPA10103-DPB15501 DPA10103-DPB15901 DPA10103-DPB18001 DPA10104-DPB10101 DPA10104-DPB11501 DPA10105-DPB10101 DPA10105-DPB10401 DPA10105-DPB11801 DPA10105-DPB15001 DPA10106-DPB10101 DPA10201-DPB10101 DPA10201-DPB10201 DPA10201-DPB10202 DPA10201-DPB110601 DPA10201-DPB11501 DPA10201-DPB11601 DPA10201-DPB11801 DPA10201-DPB11901 DPA10201-DPB13401 DPA10201-DPB15501 DPA10202-DPB10101; note = HLAs: DPA10202-DPB10201 DPA10202-DPB10202 DPA10202-DPB10401 DPA10202-DPB10501 DPA10202-DPB10901 DPA10202-DPB110601 DPA10202-DPB11101 DPA10202-DPB11301 DPA10202-DPB11801 DPA10202-DPB11901 DPA10202-DPB12101 DPA10202-DPB13001 DPA10202-DPB13101 DPA10202-DPB13801 DPA10202-DPB15501 DPA10202-DPB16501 DPA10301-DPB10101 DPA10301-DPB10201 DPA10301-DPB10202 DPA10301-DPB10401 DPA10301-DPB10402 DPA10301-DPB10901 DPA10301-DPB110501 DPA10301-DPB110601 DPA10301-DPB11101 DPA10301-DPB11301 DPA10301-DPB11701 DPA10301-DPB11801 DPA10301-DPB12301 DPA10301-DPB13901 DPA10301-DPB14001 DPA10301-DPB14901 DPA10301-DPB15501 DPA10301-DPB16501 DPA10301-DPB17501 DPA10301-DPB18001 DPA10401-DPB10101 DPA10401-DPB10201 DPA10401-DPB10202 DPA10401-DPB10301 DPA10401-DPB10402 DPA10401-DPB10501 DPA10401-DPB110501 DPA10401-DPB11301 DPA10401-DPB113301 DPA10401-DPB11401 DPA10401-DPB14901 DQA10102-DQB10501 DQA10102-DQB10601 DQA10102-DQB10602 DQA10102-DQB10609 DQA10102-DQB10611 DQA10103-DQB10501 DQA10103-DQB10601; note = HLAs: DQA10103-DQB10602 DQA10103-DQB10609 DQA10201-DQB10301 DQA10201-DQB10303
LKTAVQMAVFIHNFK

SEQ ID NO: 4417 - protein, 16 aa, Human immunodeficiency virus 1
  source 1..16: note = HLAs: DRB1_0101 DRB1_0806 DRB1_1001 DRB1_1102 DRB1_1103 DRB1_1104 DRB1_1301 DRB1_1304 DRB1_1406 DRB1_1501 DRB1_1601 DPA10103-DPB10101 DPA10103-DPB10201 DPA10103-DPB10202 DPA10103-DPB10401 DPA10103-DPB10402 DPA10103-DPB10501 DPA10103-DPB10601 DPA10103-DPB110501 DPA10103-DPB11101 DPA10103-DPB112601 DPA10103-DPB11501 DPA10103-DPB11601 DPA10103-DPB11801 DPA10103-DPB11901 DPA10103-DPB12001 DPA10103-DPB12301 DPA10103-DPB13101 DPA10103-DPB13401 DPA10103-DPB13901 DPA10103-DPB14001 DPA10103-DPB14101 DPA10103-DPB14801 DPA10103-DPB14901 DPA10103-DPB15001 DPA10103-DPB15101 DPA10103-DPB15501 DPA10103-DPB15901 DPA10103-DPB18001 DPA10104-DPB10101 DPA10104-DPB11501 DPA10105-DPB10101 DPA10105-DPB10401 DPA10105-DPB11801 DPA10105-DPB15001 DPA10106-DPB10101 DPA10106-DPB11101 DPA10201-DPB10101 DPA10201-DPB10201 DPA10201-DPB10202 DPA10201-DPB10501 DPA10201-DPB110601 DPA10201-DPB11101 DPA10201-DPB11301 DPA10201-DPB113301 DPA10201-DPB11501 DPA10201-DPB11601 DPA10201-DPB11801 DPA10201-DPB11901; note = HLAs: DPA10201-DPB13401 DPA10201-DPB15501 DPA10202-DPB10101 DPA10202-DPB10201 DPA10202-DPB10202 DPA10202-DPB10401 DPA10202-DPB10501 DPA10202-DPB10901 DPA10202-DPB110001 DPA10202-DPB110601 DPA10202-DPB11101 DPA10202-DPB11301 DPA10202-DPB113101 DPA10202-DPB11701 DPA10202-DPB11801 DPA10202-DPB11901 DPA10202-DPB12101 DPA10202-DPB12901 DPA10202-DPB13001 DPA10202-DPB13101 DPA10202-DPB13801 DPA10202-DPB15501 DPA10202-DPB16501 DPA10301-DPB10101 DPA10301-DPB10201 DPA10301-DPB10202 DPA10301-DPB10401 DPA10301-DPB10402 DPA10301-DPB10901 DPA10301-DPB110501 DPA10301-DPB110601 DPA10301-DPB11101 DPA10301-DPB11301 DPA10301-DPB11701 DPA10301-DPB11801 DPA10301-DPB12301 DPA10301-DPB13901 DPA10301-DPB14001 DPA10301-DPB14901 DPA10301-DPB15501 DPA10301-DPB16501 DPA10301-DPB17501 DPA10301-DPB18001 DPA10401-DPB10101 DPA10401-DPB10201 DPA10401-DPB10202 DPA10401-DPB10301 DPA10401-DPB10402 DPA10401-DPB10501 DPA10401-DPB110501 DPA10401-DPB11301 DPA10401-DPB113301 DPA10401-DPB11401 DPA10401-DPB14901; note = HLAs: DQA10102-DQB10501 DQA10102-DQB10503 DQA10102-DQB10601 DQA10102-DQB10602 DQA10102-DQB10609 DQA10102-DQB10611 DQA10103-DQB10501 DQA10103-DQB10601 DQA10103-DQB10602 DQA10103-DQB10609 DQA10201-DQB10301 DQA10201-DQB10303
LKTAVQMAVFIHNFKR

SEQ ID NO: 4418 - protein, 17 aa, Human immunodeficiency virus 1
  source 1..17: note = HLAs: DRB1_0101 DRB1_0404 DRB1_0410 DRB1_0701 DRB1_0801 DRB1_0804 DRB1_0806 DRB1_0813 DRB1_0901 DRB1_1001 DRB1_1101 DRB1_1102 DRB1_1103 DRB1_1104 DRB1_1301 DRB1_1304 DRB1_1305 DRB1_1406 DRB1_1501 DRB1_1503 DRB1_1601 DRB1_1602 DPA10103-DPB10101 DPA10103-DPB10201 DPA10103-DPB10202 DPA10103-DPB10401 DPA10103-DPB10402 DPA10103-DPB10501 DPA10103-DPB10601 DPA10103-DPB110501 DPA10103-DPB11101 DPA10103-DPB112601 DPA10103-DPB11501 DPA10103-DPB11601 DPA10103-DPB11801 DPA10103-DPB11901 DPA10103-DPB12001 DPA10103-DPB12301 DPA10103-DPB13101 DPA10103-DPB13401 DPA10103-DPB13901 DPA10103-DPB14001 DPA10103-DPB14101 DPA10103-DPB14801 DPA10103-DPB14901 DPA10103-DPB15001 DPA10103-DPB15101 DPA10103-DPB15501 DPA10103-DPB15901 DPA10103-DPB18001 DPA10104-DPB10101 DPA10104-DPB11501 DPA10105-DPB10101 DPA10105-DPB10401 DPA10105-DPB11801 DPA10105-DPB15001 DPA10106-DPB10101 DPA10106-DPB11101 DPA10201-DPB10101 DPA10201-DPB10201 DPA10201-DPB10202 DPA10201-DPB10401 DPA10201-DPB10501 DPA10201-DPB110601; note = HLAs: DPA10201-DPB11101 DPA10201-DPB11301 DPA10201-DPB113301 DPA10201-DPB11501 DPA10201-DPB11601 DPA10201-DPB11801 DPA10201-DPB11901 DPA10201-DPB13401 DPA10201-DPB15501 DPA10202-DPB10101 DPA10202-DPB10201 DPA10202-DPB10202 DPA10202-DPB10401 DPA10202-DPB10402 DPA10202-DPB10501 DPA10202-DPB10901 DPA10202-DPB110001 DPA10202-DPB110501 DPA10202-DPB110601 DPA10202-DPB11101 DPA10202-DPB11301 DPA10202-DPB113101 DPA10202-DPB11401 DPA10202-DPB11701 DPA10202-DPB11801 DPA10202-DPB11901 DPA10202-DPB12101 DPA10202-DPB12901 DPA10202-DPB13001 DPA10202-DPB13101 DPA10202-DPB13801 DPA10202-DPB15501 DPA10202-DPB16501 DPA10202-DPB18501 DPA10301-DPB10101 DPA10301-DPB10201 DPA10301-DPB10202 DPA10301-DPB10401 DPA10301-DPB10402 DPA10301-DPB10901 DPA10301-DPB110501 DPA10301-DPB110601 DPA10301-DPB11101 DPA10301-DPB11301 DPA10301-DPB11701 DPA10301-DPB11801 DPA10301-DPB12301 DPA10301-DPB13901 DPA10301-DPB14001 DPA10301-DPB14901 DPA10301-DPB15501 DPA10301-DPB16501 DPA10301-DPB17501 DPA10301-DPB18001; note = HLAs: DPA10401-DPB10101 DPA10401-DPB10201 DPA10401-DPB10202 DPA10401-DPB10301 DPA10401-DPB10402 DPA10401-DPB10501 DPA10401-DPB110501 DPA10401-DPB11301 DPA10401-DPB113301 DPA10401-DPB11401 DPA10401-DPB14901 DQA10102-DQB10501 DQA10102-DQB10503 DQA10102-DQB10601 DQA10102-DQB10602 DQA10102-DQB10609 DQA10102-DQB10611 DQA10103-DQB10501 DQA10103-DQB10601 DQA10103-DQB10602 DQA10103-DQB10609 DQA10201-DQB10301
LKTAVQMAVFIHNFKRK

SEQ ID NO: 4419 - protein, 18 aa, Human immunodeficiency virus 1
  source 1..18: note = HLAs: DRB1_1001 DRB1_1101 DRB1_1102 DRB1_1103 DRB1_1104 DRB1_1301 DRB1_1305 DPA10103-DPB10101 DPA10103-DPB10201 DPA10103-DPB10202 DPA10103-DPB10401 DPA10103-DPB10501 DPA10103-DPB112601 DPA10103-DPB11501 DPA10103-DPB11601 DPA10103-DPB11801 DPA10103-DPB11901 DPA10103-DPB12301 DPA10103-DPB13101 DPA10103-DPB13401 DPA10103-DPB13901 DPA10103-DPB14001 DPA10103-DPB14101 DPA10103-DPB14801 DPA10103-DPB15001 DPA10104-DPB10101 DPA10104-DPB11501 DPA10105-DPB10101 DPA10105-DPB10401 DPA10105-DPB11801 DPA10105-DPB15001 DPA10106-DPB10101 DPA10201-DPB10101 DPA10201-DPB10202 DPA10201-DPB110601 DPA10201-DPB11501 DPA10201-DPB11601 DPA10201-DPB11901 DPA10202-DPB10101 DPA10202-DPB10201 DPA10202-DPB10202 DPA10202-DPB10501 DPA10202-DPB110601 DPA10202-DPB11801 DPA10202-DPB11901 DPA10202-DPB13101 DPA10202-DPB13801 DPA10202-DPB16501 DPA10301-DPB10101 DPA10301-DPB10201 DPA10301-DPB10202 DPA10301-DPB10401 DPA10301-DPB10402 DPA10301-DPB110501 DPA10301-DPB110601 DPA10301-DPB11801 DPA10301-DPB12301 DPA10301-DPB13901; note = HLAs: DPA10301-DPB14001 DPA10301-DPB14901 DPA10301-DPB15501 DPA10301-DPB16501 DPA10301-DPB17501 DPA10301-DPB18001 DPA10401-DPB10101 DPA10401-DPB10201 DPA10401-DPB10202 DPA10401-DPB10402 DPA10401-DPB10501 DPA10401-DPB110501 DPA10401-DPB14901 DQA10102-DQB10501 DQA10103-DQB10501
LKTAVQMAVFIHNFKRKG

SEQ ID NO: 4420 - protein, 19 aa, Human immunodeficiency virus 1
  source 1..19: note = HLAs: DRB1_0101 DRB1_0801 DRB1_0804 DRB1_0806 DRB1_1001 DRB1_1101 DRB1_1102 DRB1_1103 DRB1_1104 DRB1_1301 DRB1_1304 DRB1_1305 DRB1_1406 DRB1_1501 DRB1_1601 DRB1_1602 DPA10103-DPB10101 DPA10103-DPB10201 DPA10103-DPB10202 DPA10103-DPB10401 DPA10103-DPB10501 DPA10103-DPB11101 DPA10103-DPB112601 DPA10103-DPB11501 DPA10103-DPB11601 DPA10103-DPB11801 DPA10103-DPB11901 DPA10103-DPB12301 DPA10103-DPB13101 DPA10103-DPB13401 DPA10103-DPB13901 DPA10103-DPB14001 DPA10103-DPB14101 DPA10103-DPB14801 DPA10103-DPB15001 DPA10103-DPB15501 DPA10103-DPB15901 DPA10104-DPB10101 DPA10104-DPB11501 DPA10105-DPB10101 DPA10105-DPB10401 DPA10105-DPB11801 DPA10105-DPB15001 DPA10106-DPB10101 DPA10201-DPB10101 DPA10201-DPB10201 DPA10201-DPB10202 DPA10201-DPB10501 DPA10201-DPB110601 DPA10201-DPB11501 DPA10201-DPB11601 DPA10201-DPB11801 DPA10201-DPB11901 DPA10201-DPB13401 DPA10201-DPB15501 DPA10202-DPB10101 DPA10202-DPB10201 DPA10202-DPB10202 DPA10202-DPB10401 DPA10202-DPB10501 DPA10202-DPB110601 DPA10202-DPB11101; note = HLAs: DPA10202-DPB11301 DPA10202-DPB11801 DPA10202-DPB11901 DPA10202-DPB13101 DPA10202-DPB13801 DPA10202-DPB15501 DPA10202-DPB16501 DPA10301-DPB10101 DPA10301-DPB10201 DPA10301-DPB10202 DPA10301-DPB10401 DPA10301-DPB10402 DPA10301-DPB110501 DPA10301-DPB110601 DPA10301-DPB11101 DPA10301-DPB11301 DPA10301-DPB11701 DPA10301-DPB11801 DPA10301-DPB12301 DPA10301-DPB13901 DPA10301-DPB14001 DPA10301-DPB14901 DPA10301-DPB15501 DPA10301-DPB16501 DPA10301-DPB17501 DPA10301-DPB18001 DPA10401-DPB10101 DPA10401-DPB10201 DPA10401-DPB10202 DPA10401-DPB10301 DPA10401-DPB10402 DPA10401-DPB10501 DPA10401-DPB110501 DPA10401-DPB11301 DPA10401-DPB113301 DPA10401-DPB11401 DPA10401-DPB14901 DQA10102-DQB10501 DQA10102-DQB10503 DQA10102-DQB10602 DQA10102-DQB10609 DQA10103-DQB10501 DQA10103-DQB10609
LKTAVQMAVFIHNFKRKGG

SEQ ID NO: 4421 - protein, 20 aa, Human immunodeficiency virus 1
  source 1..20: note = HLAs: DRB1_0101 DRB1_0404 DRB1_0410 DRB1_0801 DRB1_0802 DRB1_0804 DRB1_0806 DRB1_0809 DRB1_0813 DRB1_1001 DRB1_1101 DRB1_1102 DRB1_1103 DRB1_1104 DRB1_1114 DRB1_1301 DRB1_1302 DRB1_1303 DRB1_1304 DRB1_1305 DRB1_1312 DRB1_1402 DRB1_1403 DRB1_1406 DRB1_1501 DRB1_1503 DRB1_1601 DRB1_1602 DPA10103-DPB10101 DPA10103-DPB10201 DPA10103-DPB10202 DPA10103-DPB10401 DPA10103-DPB10402 DPA10103-DPB10501 DPA10103-DPB10601 DPA10103-DPB110501 DPA10103-DPB11101 DPA10103-DPB112601 DPA10103-DPB11501 DPA10103-DPB11601 DPA10103-DPB11801 DPA10103-DPB11901 DPA10103-DPB12001 DPA10103-DPB12301 DPA10103-DPB13101 DPA10103-DPB13401 DPA10103-DPB13901 DPA10103-DPB14001 DPA10103-DPB14101 DPA10103-DPB14801 DPA10103-DPB14901 DPA10103-DPB15001 DPA10103-DPB15101 DPA10103-DPB15501 DPA10103-DPB15901 DPA10103-DPB18001 DPA10104-DPB10101 DPA10104-DPB11501 DPA10105-DPB10101 DPA10105-DPB10401 DPA10105-DPB11801 DPA10105-DPB15001 DPA10106-DPB10101 DPA10106-DPB11101 DPA10201-DPB10101 DPA10201-DPB10201 DPA10201-DPB10202; note = HLAs: DPA10201-DPB10501 DPA10201-DPB110601 DPA10201-DPB11101 DPA10201-DPB11501 DPA10201-DPB11601 DPA10201-DPB11801 DPA10201-DPB11901 DPA10201-DPB13401 DPA10201-DPB15501 DPA10202-DPB10101 DPA10202-DPB10201 DPA10202-DPB10202 DPA10202-DPB10401 DPA10202-DPB10402 DPA10202-DPB10501 DPA10202-DPB10901 DPA10202-DPB110001 DPA10202-DPB110501 DPA10202-DPB110601 DPA10202-DPB11101 DPA10202-DPB11301 DPA10202-DPB113101 DPA10202-DPB11701 DPA10202-DPB11801 DPA10202-DPB11901 DPA10202-DPB12101 DPA10202-DPB12901 DPA10202-DPB13001 DPA10202-DPB13101 DPA10202-DPB13801 DPA10202-DPB15501 DPA10202-DPB16501 DPA10202-DPB18501 DPA10301-DPB10101 DPA10301-DPB10201 DPA10301-DPB10202 DPA10301-DPB10401 DPA10301-DPB10402 DPA10301-DPB10901 DPA10301-DPB110501 DPA10301-DPB110601 DPA10301-DPB11101 DPA10301-DPB11301 DPA10301-DPB11701 DPA10301-DPB11801 DPA10301-DPB12301 DPA10301-DPB13901 DPA10301-DPB14001 DPA10301-DPB14901 DPA10301-DPB15501 DPA10301-DPB16501 DPA10301-DPB17501 DPA10301-DPB18001 DPA10401-DPB10101; note = HLAs: DPA10401-DPB10201 DPA10401-DPB10202 DPA10401-DPB10301 DPA10401-DPB10402 DPA10401-DPB10501 DPA10401-DPB110501 DPA10401-DPB11301 DPA10401-DPB113301 DPA10401-DPB11401 DPA10401-DPB14901 DQA10102-DQB10501 DQA10102-DQB10503 DQA10102-DQB10601 DQA10102-DQB10602 DQA10102-DQB10609 DQA10102-DQB10611 DQA10103-DQB10501 DQA10103-DQB10601 DQA10103-DQB10602 DQA10103-DQB10609
LKTAVQMAVFIHNFKRKGGI

SEQ ID NO: 4422 - protein, 21 aa, Human immunodeficiency virus 1
  source 1..21: note = HLAs: DRB1_0101 DRB1_0801 DRB1_0802 DRB1_0804 DRB1_0806 DRB1_0809 DRB1_1001 DRB1_1101 DRB1_1102 DRB1_1103 DRB1_1104 DRB1_1301 DRB1_1304 DRB1_1305 DRB1_1406 DRB1_1501 DRB1_1601 DRB1_1602 DPA10103-DPB10101 DPA10103-DPB10201 DPA10103-DPB10202 DPA10103-DPB10401 DPA10103-DPB10501 DPA10103-DPB112601 DPA10103-DPB11501 DPA10103-DPB11601 DPA10103-DPB11801 DPA10103-DPB11901 DPA10103-DPB12301 DPA10103-DPB13101 DPA10103-DPB13401 DPA10103-DPB13901 DPA10103-DPB14001 DPA10103-DPB14101 DPA10103-DPB14801 DPA10103-DPB15001 DPA10104-DPB10101 DPA10104-DPB11501 DPA10105-DPB10101 DPA10105-DPB10401 DPA10105-DPB11801 DPA10105-DPB15001 DPA10106-DPB10101 DPA10201-DPB10101 DPA10201-DPB110601 DPA10201-DPB11501 DPA10201-DPB11601 DPA10201-DPB11901 DPA10202-DPB10101 DPA10202-DPB10201 DPA10202-DPB10202 DPA10202-DPB10501 DPA10202-DPB110601 DPA10202-DPB11801 DPA10202-DPB11901 DPA10202-DPB13101 DPA10202-DPB13801 DPA10202-DPB16501 DPA10301-DPB10101 DPA10301-DPB10201 DPA10301-DPB10202 DPA10301-DPB10401 DPA10301-DPB10402; note = HLAs: DPA10301-DPB110501 DPA10301-DPB110601 DPA10301-DPB11101 DPA10301-DPB11801 DPA10301-DPB12301 DPA10301-DPB13901 DPA10301-DPB14001 DPA10301-DPB14901 DPA10301-DPB15501 DPA10301-DPB16501 DPA10301-DPB17501 DPA10301-DPB18001 DPA10401-DPB10101 DPA10401-DPB10201 DPA10401-DPB10202 DPA10401-DPB10402 DPA10401-DPB10501 DPA10401-DPB110501 DPA10401-DPB14901 DQA10102-DQB10501 DQA10103-DQB10501
LKTAVQMAVFIHNFKRKGGIG

SEQ ID NO: 4423 - protein, 22 aa, Human immunodeficiency virus 1
  source 1..22: note = HLAs: DRB1_0101 DRB1_0801 DRB1_0802 DRB1_0804 DRB1_0806 DRB1_0809 DRB1_1001 DRB1_1101 DRB1_1102 DRB1_1103 DRB1_1104 DRB1_1301 DRB1_1304 DRB1_1305 DRB1_1406 DRB1_1501 DRB1_1601 DRB1_1602 DPA10103-DPB10101 DPA10103-DPB10201 DPA10103-DPB10202 DPA10103-DPB10401 DPA10103-DPB10501 DPA10103-DPB112601 DPA10103-DPB11501 DPA10103-DPB11601 DPA10103-DPB11801 DPA10103-DPB11901 DPA10103-DPB12301 DPA10103-DPB13101 DPA10103-DPB13401 DPA10103-DPB13901 DPA10103-DPB14001 DPA10103-DPB14101 DPA10103-DPB14801 DPA10103-DPB15001 DPA10104-DPB10101 DPA10104-DPB11501 DPA10105-DPB10101 DPA10105-DPB10401 DPA10105-DPB11801 DPA10105-DPB15001 DPA10106-DPB10101 DPA10201-DPB10101 DPA10201-DPB110601 DPA10201-DPB11501 DPA10201-DPB11601 DPA10201-DPB11901 DPA10202-DPB10101 DPA10202-DPB10201 DPA10202-DPB10202 DPA10202-DPB10501 DPA10202-DPB110601 DPA10202-DPB11801 DPA10202-DPB11901 DPA10202-DPB13101 DPA10202-DPB13801 DPA10202-DPB16501 DPA10301-DPB10101 DPA10301-DPB10201 DPA10301-DPB10202 DPA10301-DPB10401 DPA10301-DPB10402; note = HLAs: DPA10301-DPB110501 DPA10301-DPB110601 DPA10301-DPB11101 DPA10301-DPB11801 DPA10301-DPB12301 DPA10301-DPB13901 DPA10301-DPB14001 DPA10301-DPB14901 DPA10301-DPB15501 DPA10301-DPB16501 DPA10301-DPB17501 DPA10301-DPB18001 DPA10401-DPB10101 DPA10401-DPB10201 DPA10401-DPB10202 DPA10401-DPB10402 DPA10401-DPB10501 DPA10401-DPB110501 DPA10401-DPB14901 DQA10102-DQB10501 DQA10103-DQB10501
LKTAVQMAVFIHNFKRKGGIGG

SEQ ID NO: 4424 - protein, 23 aa, Human immunodeficiency virus 1
  source 1..23: note = HLAs: DRB1_0101 DRB1_0801 DRB1_0802 DRB1_0804 DRB1_0806 DRB1_0809 DRB1_1001 DRB1_1101 DRB1_1102 DRB1_1103 DRB1_1104 DRB1_1301 DRB1_1304 DRB1_1305 DRB1_1406 DRB1_1501 DRB1_1601 DRB1_1602 DPA10103-DPB10101 DPA10103-DPB10201 DPA10103-DPB10202 DPA10103-DPB10401 DPA10103-DPB10501 DPA10103-DPB112601 DPA10103-DPB11501 DPA10103-DPB11601 DPA10103-DPB11801 DPA10103-DPB11901 DPA10103-DPB12301 DPA10103-DPB13101 DPA10103-DPB13401 DPA10103-DPB13901 DPA10103-DPB14001 DPA10103-DPB14101 DPA10103-DPB14801 DPA10103-DPB15001 DPA10104-DPB10101 DPA10104-DPB11501 DPA10105-DPB10101 DPA10105-DPB10401 DPA10105-DPB11801 DPA10105-DPB15001 DPA10106-DPB10101 DPA10201-DPB10101 DPA10201-DPB110601 DPA10201-DPB11501 DPA10201-DPB11601 DPA10201-DPB11901 DPA10202-DPB10101 DPA10202-DPB10201 DPA10202-DPB10202 DPA10202-DPB10501 DPA10202-DPB110601 DPA10202-DPB11801 DPA10202-DPB11901 DPA10202-DPB13101 DPA10202-DPB13801 DPA10202-DPB16501 DPA10301-DPB10101 DPA10301-DPB10201 DPA10301-DPB10202 DPA10301-DPB10401 DPA10301-DPB10402; note = HLAs: DPA10301-DPB110501 DPA10301-DPB110601 DPA10301-DPB11101 DPA10301-DPB11801 DPA10301-DPB12301 DPA10301-DPB13901 DPA10301-DPB14001 DPA10301-DPB14901 DPA10301-DPB15501 DPA10301-DPB16501 DPA10301-DPB17501 DPA10301-DPB18001 DPA10401-DPB10101 DPA10401-DPB10201 DPA10401-DPB10202 DPA10401-DPB10402 DPA10401-DPB10501 DPA10401-DPB110501 DPA10401-DPB14901 DQA10102-DQB10501 DQA10103-DQB10501
LKTAVQMAVFIHNFKRKGGIGGY

SEQ ID NO: 4425 - protein, 24 aa, Human immunodeficiency virus 1
  source 1..24: note = HLAs: DRB1_0101 DRB1_0801 DRB1_0802 DRB1_0804 DRB1_0806 DRB1_0809 DRB1_1001 DRB1_1101 DRB1_1102 DRB1_1103 DRB1_1104 DRB1_1301 DRB1_1304 DRB1_1305 DRB1_1406 DRB1_1501 DRB1_1503 DRB1_1601 DRB1_1602 DPA10103-DPB10101 DPA10103-DPB10201 DPA10103-DPB10202 DPA10103-DPB10401 DPA10103-DPB10501 DPA10103-DPB112601 DPA10103-DPB11501 DPA10103-DPB11601 DPA10103-DPB11801 DPA10103-DPB11901 DPA10103-DPB12301 DPA10103-DPB13101 DPA10103-DPB13401 DPA10103-DPB13901 DPA10103-DPB14001 DPA10103-DPB14101 DPA10103-DPB14801 DPA10103-DPB15001 DPA10104-DPB10101 DPA10104-DPB11501 DPA10105-DPB10101 DPA10105-DPB10401 DPA10105-DPB11801 DPA10105-DPB15001 DPA10106-DPB10101 DPA10201-DPB10101 DPA10201-DPB110601 DPA10201-DPB11501 DPA10201-DPB11601 DPA10201-DPB11901 DPA10202-DPB10101 DPA10202-DPB10201 DPA10202-DPB10202 DPA10202-DPB10501 DPA10202-DPB110601 DPA10202-DPB11801 DPA10202-DPB11901 DPA10202-DPB13101 DPA10202-DPB13801 DPA10202-DPB16501 DPA10301-DPB10101 DPA10301-DPB10201 DPA10301-DPB10202 DPA10301-DPB10401; note = HLAs: DPA10301-DPB10402 DPA10301-DPB110501 DPA10301-DPB110601 DPA10301-DPB11101 DPA10301-DPB11801 DPA10301-DPB12301 DPA10301-DPB13901 DPA10301-DPB14001 DPA10301-DPB14901 DPA10301-DPB15501 DPA10301-DPB16501 DPA10301-DPB17501 DPA10301-DPB18001 DPA10401-DPB10101 DPA10401-DPB10201 DPA10401-DPB10202 DPA10401-DPB10402 DPA10401-DPB10501 DPA10401-DPB110501 DPA10401-DPB14901 DQA10102-DQB10501 DQA10103-DQB10501
LKTAVQMAVFIHNFKRKGGIGGYS

SEQ ID NO: 4426 - protein, 25 aa, Human immunodeficiency virus 1
  source 1..25: note = HLAs: DRB1_0101 DRB1_0801 DRB1_0802 DRB1_0804 DRB1_0806 DRB1_0809 DRB1_1001 DRB1_1101 DRB1_1102 DRB1_1103 DRB1_1104 DRB1_1301 DRB1_1303 DRB1_1304 DRB1_1305 DRB1_1406 DRB1_1501 DRB1_1503 DRB1_1601 DRB1_1602 DPA10103-DPB10101 DPA10103-DPB10201 DPA10103-DPB10202 DPA10103-DPB10401 DPA10103-DPB10501 DPA10103-DPB112601 DPA10103-DPB11501 DPA10103-DPB11601 DPA10103-DPB11801 DPA10103-DPB11901 DPA10103-DPB12301 DPA10103-DPB13101 DPA10103-DPB13401 DPA10103-DPB13901 DPA10103-DPB14001 DPA10103-DPB14101 DPA10103-DPB14801 DPA10103-DPB15001 DPA10104-DPB10101 DPA10104-DPB11501 DPA10105-DPB10101 DPA10105-DPB10401 DPA10105-DPB11801 DPA10105-DPB15001 DPA10106-DPB10101 DPA10201-DPB10101 DPA10201-DPB110601 DPA10201-DPB11501 DPA10201-DPB11601 DPA10201-DPB11901 DPA10202-DPB10101 DPA10202-DPB10201 DPA10202-DPB10202 DPA10202-DPB10501 DPA10202-DPB110601 DPA10202-DPB11801 DPA10202-DPB11901 DPA10202-DPB13101 DPA10202-DPB13801 DPA10202-DPB16501 DPA10301-DPB10101 DPA10301-DPB10201 DPA10301-DPB10202; note = HLAs: DPA10301-DPB10401 DPA10301-DPB10402 DPA10301-DPB110501 DPA10301-DPB110601 DPA10301-DPB11101 DPA10301-DPB11801 DPA10301-DPB12301 DPA10301-DPB13901 DPA10301-DPB14001 DPA10301-DPB14901 DPA10301-DPB15501 DPA10301-DPB16501 DPA10301-DPB17501 DPA10301-DPB18001 DPA10401-DPB10101 DPA10401-DPB10201 DPA10401-DPB10202 DPA10401-DPB10402 DPA10401-DPB10501 DPA10401-DPB110501 DPA10401-DPB11401 DPA10401-DPB14901 DQA10102-DQB10501 DQA10103-DQB10501
LKTAVQMAVFIHNFKRKGGIGGYSA

SEQ ID NO: 4427 - protein, 15 aa, Human immunodeficiency virus 1
  source 1..15: note = HLAs: DRB1_1114 DRB1_1302
LLVQNANPDCKTILK

SEQ ID NO: 4428 - protein, 13 aa, Human immunodeficiency virus 1
  source 1..13: note = HLAs: DRB1_0101 DRB1_0901
LLWKGEGAVVIQD

SEQ ID NO: 4429 - protein, 14 aa, Human immunodeficiency virus 1
  source 1..14: note = HLAs: DRB1_0101 DRB1_0701 DRB1_0901 DRB1_1001 DQA10102-DQB10601 DQA10102-DQB10609 DQA10201-DQB10301 DQA10301-DQB10304 DQA10302-DQB10304 DQA10303-DQB10304 DQA10401-DQB10301 DQA10401-DQB10319 DQA10501-DQB10301 DQA10501-DQB10319 DQA10503-DQB10301 DQA10505-DQB10301 DQA10505-DQB10309 DQA10505-DQB10319 DQA10508-DQB10301 DQA10509-DQB10301 DQA10601-DQB10301
LLWKGEGAVVIQDN

SEQ ID NO: 4430 - protein, 15 aa, Human immunodeficiency virus 1
  source 1..15: note = HLAs: DRB1_0101 DRB1_0102 DRB1_0701 DRB1_0901 DRB1_1001 DRB1_1114 DRB1_1302 DQA10102-DQB10501 DQA10102-DQB10601 DQA10102-DQB10602 DQA10102-DQB10609 DQA10102-DQB10611 DQA10103-DQB10601 DQA10201-DQB10301 DQA10201-DQB10303 DQA10301-DQB10301 DQA10301-DQB10304 DQA10302-DQB10301 DQA10302-DQB10304 DQA10303-DQB10301 DQA10303-DQB10304 DQA10401-DQB10301 DQA10401-DQB10319 DQA10501-DQB10301 DQA10501-DQB10319 DQA10503-DQB10301 DQA10505-DQB10301 DQA10505-DQB10309 DQA10505-DQB10319 DQA10506-DQB10303 DQA10508-DQB10301 DQA10509-DQB10301 DQA10601-DQB10301
LLWKGEGAVVIQDNS

SEQ ID NO: 4431 - protein, 14 aa, Human immunodeficiency virus 1
  source 1..14: note = HLAs: DRB1_1001 DQA10102-DQB10609 DQA10102-DQB10610
LNAWVKVVEEKAFS

SEQ ID NO: 4432 - protein, 15 aa, Human immunodeficiency virus 1
  source 1..15: note = HLAs: DRB1_0101 DRB1_1001 DRB1_1304 DPA10301-DPB10101 DPA10301-DPB11801 DPA10401-DPB10101 DQA10102-DQB10602 DQA10102-DQB10609 DQA10102-DQB10610 DQA10102-DQB10611
LNAWVKVVEEKAFSP

SEQ ID NO: 4433 - protein, 16 aa, Human immunodeficiency virus 1
  source 1..16: note = HLAs: DRB1_1001 DPA10301-DPB10101 DPA10401-DPB10101 DQA10102-DQB10501 DQA10102-DQB10602 DQA10102-DQB10609 DQA10102-DQB10610 DQA10102-DQB10611
LNAWVKVVEEKAFSPE

SEQ ID NO: 4434 - protein, 17 aa, Human immunodeficiency virus 1
  source 1..17: note = HLAs: DRB1_1001 DPA10103-DPB11501 DPA10104-DPB11501 DPA10301-DPB10101 DPA10301-DPB11801 DPA10401-DPB10101 DQA10102-DQB10609 DQA10102-DQB10610
LNAWVKVVEEKAFSPEV

SEQ ID NO: 4435 - protein, 18 aa, Human immunodeficiency virus 1
  source 1..18: note = HLAs: DPA10301-DPB10101 DPA10401-DPB10101 DQA10102-DQB10609
LNAWVKVVEEKAFSPEVI

SEQ ID NO: 4436 - protein, 19 aa, Human immunodeficiency virus 1
  source 1..19: note = HLAs: DRB1_1001 DPA10103-DPB11501 DPA10104-DPB11501 DPA10301-DPB10101 DPA10301-DPB10201 DPA10301-DPB10202 DPA10301-DPB110601 DPA10301-DPB11801 DPA10401-DPB10101 DQA10102-DQB10501 DQA10102-DQB10609
LNAWVKVVEEKAFSPEVIP

SEQ ID NO: 4437 - protein, 20 aa, Human immunodeficiency virus 1
  source 1..20: note = HLAs: DRB1_0101 DRB1_1001 DPA10103-DPB10101 DPA10103-DPB11501 DPA10103-DPB13101 DPA10103-DPB15001 DPA10104-DPB10101 DPA10104-DPB11501 DPA10105-DPB10101 DPA10105-DPB15001 DPA10202-DPB10101 DPA10202-DPB110601 DPA10202-DPB11901 DPA10301-DPB10101 DPA10301-DPB10201 DPA10301-DPB10202 DPA10301-DPB110601 DPA10301-DPB11801 DPA10301-DPB14001 DPA10301-DPB16501 DPA10401-DPB10101 DPA10401-DPB10501 DQA10102-DQB10501 DQA10102-DQB10503 DQA10102-DQB10609 DQA10103-DQB10501 DQA10103-DQB10609 DQA10505-DQB10402
LNAWVKVVEEKAFSPEVIPM

SEQ ID NO: 4438 - protein, 21 aa, Human immunodeficiency virus 1
  source 1..21: note = HLAs: DRB1_1001 DPA10103-DPB10101 DPA10103-DPB11501 DPA10104-DPB10101 DPA10104-DPB11501 DPA10105-DPB10101 DPA10202-DPB10101 DPA10301-DPB10101 DPA10301-DPB10201 DPA10301-DPB10202 DPA10301-DPB10401 DPA10301-DPB110601 DPA10301-DPB11801 DPA10301-DPB12301 DPA10301-DPB13901 DPA10301-DPB14001 DPA10301-DPB16501 DPA10401-DPB10101 DQA10102-DQB10501 DQA10102-DQB10609 DQA10103-DQB10501 DQA10103-DQB10609
LNAWVKVVEEKAFSPEVIPMF

SEQ ID NO: 4439 - protein, 14 aa, Human immunodeficiency virus 1
  source 1..14: note = HLAs: DRB1_0101 DRB1_0102 DRB1_0404 DRB1_0408 DRB1_0701 DRB1_0813 DRB1_0901 DRB1_1001 DRB1_1114 DRB1_1302 DPA10202-DPB10101 DPA10301-DPB10101 DPA10401-DPB10101 DQA10102-DQB10501 DQA10102-DQB10609 DQA10103-DQB10601 DQA10103-DQB10609 DQA10201-DQB10301 DQA10506-DQB10303
LNFPISPIETVPVK

SEQ ID NO: 4440 - protein, 15 aa, Human immunodeficiency virus 1
  source 1..15: note = HLAs: DRB1_0101 DRB1_0102 DRB1_0401 DRB1_0404 DRB1_0405 DRB1_0408 DRB1_0410 DRB1_0701 DRB1_0801 DRB1_0802 DRB1_0803 DRB1_0804 DRB1_0806 DRB1_0809 DRB1_0813 DRB1_0901 DRB1_1001 DRB1_1102 DRB1_1103 DRB1_1114 DRB1_1201 DRB1_1301 DRB1_1302 DRB1_1304 DRB1_1401 DRB1_1402 DRB1_1404 DRB1_1405 DRB1_1406 DRB1_1454 DRB1_1501 DRB1_1502 DRB1_1503 DRB1_1601 DRB1_1602 DPA10103-DPB11501 DPA10104-DPB11501 DPA10202-DPB10101 DPA10301-DPB10101 DPA10301-DPB10201 DPA10301-DPB10202 DPA10301-DPB10401 DPA10301-DPB11801 DPA10301-DPB12301 DPA10301-DPB13901 DPA10301-DPB14001 DPA10401-DPB10101 DQA10102-DQB10501 DQA10102-DQB10601 DQA10102-DQB10609 DQA10103-DQB10501 DQA10103-DQB10601 DQA10103-DQB10604 DQA10103-DQB10609 DQA10201-DQB10301 DQA10201-DQB10303 DQA10505-DQB10302 DQA10505-DQB10402 DQA10506-DQB10303
LNFPISPIETVPVKL

SEQ ID NO: 4441 - protein, 16 aa, Human immunodeficiency virus 1
  source 1..16: note = HLAs: DRB1_0101 DRB1_0102 DRB1_0401 DRB1_0404 DRB1_0405 DRB1_0408 DRB1_0410 DRB1_0701 DRB1_0802 DRB1_0804 DRB1_0809 DRB1_0813 DRB1_0901 DRB1_1001 DRB1_1102 DRB1_1114 DRB1_1201 DRB1_1301 DRB1_1302 DRB1_1304 DRB1_1401 DRB1_1402 DRB1_1404 DRB1_1406 DRB1_1454 DRB1_1501 DRB1_1502 DRB1_1602 DPA10103-DPB11501 DPA10104-DPB11501 DPA10202-DPB10101 DPA10301-DPB10101 DPA10301-DPB10201 DPA10301-DPB10202 DPA10301-DPB10401 DPA10301-DPB11801 DPA10301-DPB12301 DPA10301-DPB13901 DPA10301-DPB14001 DPA10301-DPB16501 DPA10401-DPB10101 DQA10102-DQB10501 DQA10102-DQB10503 DQA10102-DQB10601 DQA10102-DQB10609 DQA10103-DQB10501 DQA10103-DQB10601 DQA10103-DQB10604 DQA10103-DQB10609 DQA10201-DQB10301 DQA10201-DQB10303 DQA10505-DQB10302 DQA10505-DQB10402 DQA10506-DQB10303
LNFPISPIETVPVKLK

SEQ ID NO: 4442 - protein, 17 aa, Human immunodeficiency virus 1
  source 1..17: note = HLAs: DRB1_0101 DRB1_0102 DRB1_0401 DRB1_0404 DRB1_0405 DRB1_0408 DRB1_0410 DRB1_0701 DRB1_0802 DRB1_0804 DRB1_0806 DRB1_0809 DRB1_0813 DRB1_0901 DRB1_1001 DRB1_1102 DRB1_1103 DRB1_1114 DRB1_1201 DRB1_1301 DRB1_1302 DRB1_1304 DRB1_1401 DRB1_1402 DRB1_1404 DRB1_1406 DRB1_1454 DRB1_1501 DRB1_1502 DRB1_1503 DRB1_1602 DPA10103-DPB11501 DPA10104-DPB11501 DPA10202-DPB10101 DPA10202-DPB13101 DPA10301-DPB10101 DPA10301-DPB10201 DPA10301-DPB10202 DPA10301-DPB10401 DPA10301-DPB11801 DPA10301-DPB12301 DPA10301-DPB13901 DPA10301-DPB14001 DPA10401-DPB10101 DQA10102-DQB10501 DQA10102-DQB10601 DQA10102-DQB10609 DQA10103-DQB10501 DQA10103-DQB10601 DQA10103-DQB10609 DQA10201-DQB10301 DQA10201-DQB10303 DQA10505-DQB10402 DQA10506-DQB10303
LNFPISPIETVPVKLKP

SEQ ID NO: 4443 - protein, 18 aa, Human immunodeficiency virus 1
  source 1..18: note = HLAs: DRB1_0101 DRB1_0102 DRB1_0404 DRB1_0701 DRB1_0813 DRB1_1001 DRB1_1114 DRB1_1302 DQA10102-DQB10501 DQA10102-DQB10609 DQA10103-DQB10601 DQA10103-DQB10609
LNFPISPIETVPVKLKPG

SEQ ID NO: 4444 - protein, 19 aa, Human immunodeficiency virus 1
  source 1..19: note = HLAs: DRB1_0101 DRB1_0102 DRB1_0401 DRB1_0404 DRB1_0405 DRB1_0408 DRB1_0410 DRB1_0701 DRB1_0802 DRB1_0804 DRB1_0809 DRB1_0813 DRB1_0901 DRB1_1001 DRB1_1102 DRB1_1114 DRB1_1201 DRB1_1301 DRB1_1302 DRB1_1304 DRB1_1401 DRB1_1404 DRB1_1406 DRB1_1454 DRB1_1501 DRB1_1502 DRB1_1602 DPA10103-DPB11501 DPA10104-DPB11501 DPA10202-DPB10101 DPA10301-DPB10101 DPA10301-DPB10201 DPA10301-DPB10202 DPA10301-DPB10401 DPA10301-DPB11801 DPA10301-DPB12301 DPA10301-DPB13901 DPA10301-DPB14001 DPA10401-DPB10101 DQA10102-DQB10501 DQA10102-DQB10601 DQA10102-DQB10609 DQA10103-DQB10501 DQA10103-DQB10601 DQA10103-DQB10609 DQA10201-DQB10301 DQA10201-DQB10303 DQA10505-DQB10402 DQA10506-DQB10303
LNFPISPIETVPVKLKPGM

SEQ ID NO: 4445 - protein, 20 aa, Human immunodeficiency virus 1
  source 1..20: note = HLAs: DRB1_0101 DRB1_0102 DRB1_0401 DRB1_0404 DRB1_0405 DRB1_0408 DRB1_0410 DRB1_0701 DRB1_0801 DRB1_0802 DRB1_0803 DRB1_0804 DRB1_0806 DRB1_0809 DRB1_0813 DRB1_0901 DRB1_1001 DRB1_1102 DRB1_1103 DRB1_1104 DRB1_1114 DRB1_1201 DRB1_1301 DRB1_1302 DRB1_1304 DRB1_1401 DRB1_1402 DRB1_1404 DRB1_1406 DRB1_1454 DRB1_1501 DRB1_1502 DRB1_1503 DRB1_1601 DRB1_1602 DPA10103-DPB10101 DPA10103-DPB11501 DPA10103-DPB15001 DPA10104-DPB10101 DPA10104-DPB11501 DPA10105-DPB10101 DPA10105-DPB15001 DPA10202-DPB10101 DPA10202-DPB10501 DPA10202-DPB110601 DPA10202-DPB11801 DPA10202-DPB11901 DPA10202-DPB13101 DPA10202-DPB13801 DPA10202-DPB16501 DPA10301-DPB10101 DPA10301-DPB10201 DPA10301-DPB10202 DPA10301-DPB10401 DPA10301-DPB10402 DPA10301-DPB110501 DPA10301-DPB110601 DPA10301-DPB11801 DPA10301-DPB12301 DPA10301-DPB13901 DPA10301-DPB14001 DPA10301-DPB14901 DPA10301-DPB16501 DPA10301-DPB18001 DPA10401-DPB10101 DPA10401-DPB10202 DPA10401-DPB10501 DQA10102-DQB10501 DQA10102-DQB10601 DQA10102-DQB10609; note = HLAs: DQA10103-DQB10501 DQA10103-DQB10601 DQA10103-DQB10602 DQA10103-DQB10604 DQA10103-DQB10608 DQA10103-DQB10609 DQA10201-DQB10301 DQA10201-DQB10303 DQA10505-DQB10402 DQA10506-DQB10303
LNFPISPIETVPVKLKPGMD

SEQ ID NO: 4446 - protein, 21 aa, Human immunodeficiency virus 1
  source 1..21: note = HLAs: DRB1_0101 DRB1_0102 DRB1_0401 DRB1_0404 DRB1_0405 DRB1_0408 DRB1_0410 DRB1_0701 DRB1_0802 DRB1_0804 DRB1_0806 DRB1_0809 DRB1_0813 DRB1_0901 DRB1_1001 DRB1_1102 DRB1_1103 DRB1_1114 DRB1_1201 DRB1_1301 DRB1_1302 DRB1_1304 DRB1_1401 DRB1_1402 DRB1_1404 DRB1_1406 DRB1_1454 DRB1_1501 DRB1_1502 DRB1_1602 DPA10202-DPB10101 DPA10301-DPB10101 DPA10301-DPB10201 DPA10301-DPB10202 DPA10301-DPB11801 DPA10401-DPB10101 DQA10102-DQB10501 DQA10102-DQB10609 DQA10103-DQB10501 DQA10103-DQB10601 DQA10103-DQB10609
LNFPISPIETVPVKLKPGMDG

SEQ ID NO: 4447 - protein, 22 aa, Human immunodeficiency virus 1
  source 1..22: note = HLAs: DRB1_0101 DRB1_0102 DRB1_0401 DRB1_0404 DRB1_0405 DRB1_0408 DRB1_0410 DRB1_0701 DRB1_0802 DRB1_0804 DRB1_0806 DRB1_0809 DRB1_0813 DRB1_0901 DRB1_1001 DRB1_1102 DRB1_1103 DRB1_1114 DRB1_1201 DRB1_1301 DRB1_1302 DRB1_1304 DRB1_1401 DRB1_1402 DRB1_1404 DRB1_1406 DRB1_1454 DRB1_1501 DRB1_1502 DRB1_1602 DPA10202-DPB10101 DPA10301-DPB10101 DPA10301-DPB10201 DPA10301-DPB10202 DPA10301-DPB11801 DPA10301-DPB14001 DPA10401-DPB10101 DQA10102-DQB10501 DQA10102-DQB10601 DQA10102-DQB10609 DQA10103-DQB10501 DQA10103-DQB10601 DQA10103-DQB10609
LNFPISPIETVPVKLKPGMDGP

SEQ ID NO: 4448 - protein, 23 aa, Human immunodeficiency virus 1
  source 1..23: note = HLAs: DRB1_0101 DRB1_0102 DRB1_0401 DRB1_0404 DRB1_0405 DRB1_0408 DRB1_0410 DRB1_0701 DRB1_0802 DRB1_0803 DRB1_0804 DRB1_0806 DRB1_0809 DRB1_0813 DRB1_0901 DRB1_1001 DRB1_1102 DRB1_1103 DRB1_1104 DRB1_1114 DRB1_1201 DRB1_1301 DRB1_1302 DRB1_1304 DRB1_1401 DRB1_1402 DRB1_1404 DRB1_1406 DRB1_1454 DRB1_1501 DRB1_1502 DRB1_1602 DPA10202-DPB10101 DPA10301-DPB10101 DPA10301-DPB10201 DPA10301-DPB10202 DPA10301-DPB11801 DPA10301-DPB14001 DPA10401-DPB10101 DQA10102-DQB10501 DQA10102-DQB10601 DQA10102-DQB10609 DQA10103-DQB10501 DQA10103-DQB10601 DQA10103-DQB10609 DQA10505-DQB10402
LNFPISPIETVPVKLKPGMDGPK

SEQ ID NO: 4449 - protein, 24 aa, Human immunodeficiency virus 1
  source 1..24: note = HLAs: DRB1_0101 DRB1_0102 DRB1_0401 DRB1_0404 DRB1_0405 DRB1_0408 DRB1_0410 DRB1_0701 DRB1_0801 DRB1_0802 DRB1_0803 DRB1_0804 DRB1_0806 DRB1_0809 DRB1_0813 DRB1_0901 DRB1_1001 DRB1_1102 DRB1_1103 DRB1_1104 DRB1_1114 DRB1_1201 DRB1_1301 DRB1_1302 DRB1_1304 DRB1_1401 DRB1_1402 DRB1_1404 DRB1_1406 DRB1_1454 DRB1_1501 DRB1_1502 DRB1_1602 DPA10202-DPB10101 DPA10301-DPB10101 DPA10301-DPB10201 DPA10301-DPB10202 DPA10301-DPB11801 DPA10301-DPB14001 DPA10401-DPB10101 DQA10102-DQB10501 DQA10102-DQB10601 DQA10102-DQB10609 DQA10103-DQB10501 DQA10103-DQB10601 DQA10103-DQB10609 DQA10505-DQB10402
LNFPISPIETVPVKLKPGMDGPKV

SEQ ID NO: 4450 - protein, 25 aa, Human immunodeficiency virus 1
  source 1..25: note = HLAs: DRB1_0101 DRB1_0102 DRB1_0401 DRB1_0404 DRB1_0405 DRB1_0408 DRB1_0410 DRB1_0701 DRB1_0801 DRB1_0802 DRB1_0803 DRB1_0804 DRB1_0806 DRB1_0809 DRB1_0813 DRB1_0901 DRB1_1001 DRB1_1102 DRB1_1103 DRB1_1104 DRB1_1114 DRB1_1201 DRB1_1301 DRB1_1302 DRB1_1304 DRB1_1401 DRB1_1402 DRB1_1404 DRB1_1406 DRB1_1454 DRB1_1501 DRB1_1502 DRB1_1602 DPA10202-DPB10101 DPA10301-DPB10101 DPA10301-DPB10201 DPA10301-DPB10202 DPA10301-DPB11801 DPA10301-DPB14001 DPA10401-DPB10101 DQA10102-DQB10501 DQA10102-DQB10601 DQA10102-DQB10609 DQA10103-DQB10501 DQA10103-DQB10601 DQA10103-DQB10609 DQA10505-DQB10402
LNFPISPIETVPVKLKPGMDGPKVK

SEQ ID NO: 4451 - protein, 13 aa, Human immunodeficiency virus 1
  source 1..13: note = HLAs: DRB1_0101 DRB1_0102 DRB1_0401 DRB1_0404 DRB1_0405 DRB1_0408 DRB1_0410 DRB1_0802 DRB1_0804 DRB1_0806 DRB1_0809 DRB1_0813 DRB1_1001 DRB1_1102 DRB1_1104 DRB1_1114 DRB1_1301 DRB1_1302 DRB1_1304 DRB1_1406 DRB1_1501 DRB1_1502 DRB1_1503 DRB1_1601 DRB1_1602 DQA10102-DQB10501 DQA10102-DQB10503 DQA10103-DQB10501
LNKIVRMYSPVSI

SEQ ID NO: 4452 - protein, 14 aa, Human immunodeficiency virus 1
  source 1..14: note = HLAs: DRB1_0101 DRB1_0102 DRB1_0401 DRB1_0402 DRB1_0404 DRB1_0405 DRB1_0407 DRB1_0408 DRB1_0410 DRB1_0701 DRB1_0801 DRB1_0802 DRB1_0803 DRB1_0804 DRB1_0806 DRB1_0809 DRB1_0813 DRB1_0901 DRB1_1001 DRB1_1101 DRB1_1102 DRB1_1103 DRB1_1104 DRB1_1114 DRB1_1201 DRB1_1301 DRB1_1302 DRB1_1304 DRB1_1305 DRB1_1402 DRB1_1403 DRB1_1404 DRB1_1406 DRB1_1501 DRB1_1502 DRB1_1503 DRB1_1601 DRB1_1602 DPA10103-DPB10101 DPA10103-DPB10301 DPA10103-DPB10601 DPA10103-DPB10901 DPA10103-DPB11001 DPA10103-DPB11101 DPA10103-DPB112401 DPA10103-DPB11301 DPA10103-DPB113101 DPA10103-DPB113301 DPA10103-DPB11401 DPA10103-DPB11501 DPA10103-DPB11601 DPA10103-DPB11701 DPA10103-DPB11901 DPA10103-DPB12001 DPA10103-DPB12101 DPA10103-DPB12901 DPA10103-DPB13001 DPA10103-DPB13101 DPA10103-DPB15001 DPA10103-DPB15501 DPA10104-DPB10101 DPA10104-DPB10301 DPA10104-DPB11001 DPA10104-DPB11301 DPA10104-DPB11501 DPA10105-DPB10101 DPA10105-DPB10301 DPA10105-DPB15001 DPA10201-DPB11401 DPA10202-DPB10101 DPA10202-DPB10301; note = HLAs: DPA10202-DPB10901 DPA10202-DPB110601 DPA10202-DPB11101 DPA10202-DPB11301 DPA10202-DPB113101 DPA10202-DPB11401 DPA10202-DPB11701 DPA10202-DPB11901 DPA10202-DPB12101 DPA10202-DPB12901 DPA10202-DPB13001 DPA10202-DPB13101 DPA10202-DPB14501 DPA10202-DPB15501 DPA10301-DPB10101 DPA10301-DPB10201 DPA10301-DPB10202 DPA10301-DPB10301 DPA10301-DPB10401 DPA10301-DPB10901 DPA10301-DPB110601 DPA10301-DPB11101 DPA10301-DPB11301 DPA10301-DPB11701 DPA10301-DPB11801 DPA10301-DPB12301 DPA10301-DPB13901 DPA10301-DPB14001 DPA10301-DPB15501 DPA10301-DPB16501 DPA10401-DPB10101 DPA10401-DPB10201 DPA10401-DPB10202 DPA10401-DPB10301 DPA10401-DPB10501 DPA10401-DPB11301 DPA10401-DPB113301 DPA10401-DPB11401 DQA10102-DQB10501 DQA10102-DQB10503 DQA10102-DQB10609 DQA10103-DQB10501 DQA10103-DQB10503 DQA10103-DQB10609 DQA10505-DQB10402
LNKIVRMYSPVSIL

SEQ ID NO: 4453 - protein, 15 aa, Human immunodeficiency virus 1
  source 1..15: note = HLAs: DRB1_0101 DRB1_0102 DRB1_0103 DRB1_0401 DRB1_0402 DRB1_0403 DRB1_0404 DRB1_0405 DRB1_0406 DRB1_0407 DRB1_0408 DRB1_0410 DRB1_0411 DRB1_0701 DRB1_0801 DRB1_0802 DRB1_0803 DRB1_0804 DRB1_0806 DRB1_0809 DRB1_0813 DRB1_0901 DRB1_1001 DRB1_1101 DRB1_1102 DRB1_1103 DRB1_1104 DRB1_1114 DRB1_1201 DRB1_1202 DRB1_1301 DRB1_1302 DRB1_1303 DRB1_1304 DRB1_1305 DRB1_1312 DRB1_1401 DRB1_1402 DRB1_1403 DRB1_1404 DRB1_1405 DRB1_1406 DRB1_1454 DRB1_1501 DRB1_1502 DRB1_1503 DRB1_1601 DRB1_1602 DPA10103-DPB10101 DPA10103-DPB10201 DPA10103-DPB10202 DPA10103-DPB10301 DPA10103-DPB10501 DPA10103-DPB10601 DPA10103-DPB10901 DPA10103-DPB11001 DPA10103-DPB11101 DPA10103-DPB112401 DPA10103-DPB11301 DPA10103-DPB113101 DPA10103-DPB113301 DPA10103-DPB11401 DPA10103-DPB11501 DPA10103-DPB11601 DPA10103-DPB11701 DPA10103-DPB11801 DPA10103-DPB11901 DPA10103-DPB12001 DPA10103-DPB12101 DPA10103-DPB12901 DPA10103-DPB13001 DPA10103-DPB13101 DPA10103-DPB13401 DPA10103-DPB14801 DPA10103-DPB15001 DPA10103-DPB15501; note = HLAs: DPA10104-DPB10101 DPA10104-DPB10301 DPA10104-DPB11001 DPA10104-DPB11301 DPA10104-DPB11501 DPA10105-DPB10101 DPA10105-DPB10301 DPA10105-DPB11801 DPA10105-DPB15001 DPA10106-DPB10101 DPA10201-DPB10101 DPA10201-DPB10301 DPA10201-DPB10601 DPA10201-DPB10901 DPA10201-DPB110601 DPA10201-DPB11301 DPA10201-DPB113301 DPA10201-DPB11401 DPA10201-DPB11501 DPA10201-DPB11901 DPA10201-DPB14501 DPA10201-DPB15501 DPA10201-DPB19101 DPA10202-DPB10101 DPA10202-DPB10201 DPA10202-DPB10202 DPA10202-DPB10301 DPA10202-DPB10501 DPA10202-DPB10901 DPA10202-DPB110601 DPA10202-DPB11101 DPA10202-DPB11301 DPA10202-DPB113101 DPA10202-DPB11401 DPA10202-DPB11701 DPA10202-DPB11801 DPA10202-DPB11901 DPA10202-DPB12101 DPA10202-DPB12901 DPA10202-DPB13001 DPA10202-DPB13101 DPA10202-DPB13801 DPA10202-DPB14501 DPA10202-DPB15501 DPA10202-DPB16501 DPA10202-DPB18501 DPA10301-DPB10101 DPA10301-DPB10201 DPA10301-DPB10202 DPA10301-DPB10301 DPA10301-DPB10401 DPA10301-DPB10402 DPA10301-DPB10901 DPA10301-DPB110501; note = HLAs: DPA10301-DPB110601 DPA10301-DPB11101 DPA10301-DPB11301 DPA10301-DPB11701 DPA10301-DPB11801 DPA10301-DPB12301 DPA10301-DPB13901 DPA10301-DPB14001 DPA10301-DPB14901 DPA10301-DPB15501 DPA10301-DPB16501 DPA10301-DPB17501 DPA10301-DPB18001 DPA10401-DPB10101 DPA10401-DPB10201 DPA10401-DPB10202 DPA10401-DPB10301 DPA10401-DPB10501 DPA10401-DPB11301 DPA10401-DPB113301 DPA10401-DPB11401 DQA10102-DQB10501 DQA10102-DQB10503 DQA10102-DQB10601 DQA10102-DQB10609 DQA10103-DQB10501 DQA10103-DQB10503 DQA10103-DQB10601 DQA10103-DQB10602 DQA10103-DQB10604 DQA10103-DQB10608 DQA10103-DQB10609 DQA10201-DQB10301 DQA10201-DQB10303 DQA10501-DQB10501 DQA10505-DQB10402 DQA10505-DQB10501 DQA10506-DQB10303
LNKIVRMYSPVSILD

SEQ ID NO: 4454 - protein, 16 aa, Human immunodeficiency virus 1
  source 1..16: note = HLAs: DRB1_0101 DRB1_0102 DRB1_0401 DRB1_0402 DRB1_0403 DRB1_0404 DRB1_0405 DRB1_0406 DRB1_0407 DRB1_0408 DRB1_0410 DRB1_0701 DRB1_0801 DRB1_0802 DRB1_0803 DRB1_0804 DRB1_0806 DRB1_0809 DRB1_0813 DRB1_0901 DRB1_1001 DRB1_1101 DRB1_1102 DRB1_1103 DRB1_1104 DRB1_1114 DRB1_1201 DRB1_1202 DRB1_1301 DRB1_1302 DRB1_1304 DRB1_1305 DRB1_1312 DRB1_1401 DRB1_1402 DRB1_1403 DRB1_1404 DRB1_1406 DRB1_1454 DRB1_1501 DRB1_1502 DRB1_1503 DRB1_1601 DRB1_1602 DPA10103-DPB10101 DPA10103-DPB10201 DPA10103-DPB10202 DPA10103-DPB10301 DPA10103-DPB10401 DPA10103-DPB10501 DPA10103-DPB10601 DPA10103-DPB10901 DPA10103-DPB11001 DPA10103-DPB11101 DPA10103-DPB112401 DPA10103-DPB112601 DPA10103-DPB11301 DPA10103-DPB113101 DPA10103-DPB113301 DPA10103-DPB11401 DPA10103-DPB11501 DPA10103-DPB11601 DPA10103-DPB11701 DPA10103-DPB11801 DPA10103-DPB11901 DPA10103-DPB12001 DPA10103-DPB12101 DPA10103-DPB12301 DPA10103-DPB12901 DPA10103-DPB13001 DPA10103-DPB13101 DPA10103-DPB13401 DPA10103-DPB13901 DPA10103-DPB14001; note = HLAs: DPA10103-DPB14101 DPA10103-DPB14801 DPA10103-DPB15001 DPA10103-DPB15501 DPA10104-DPB10101 DPA10104-DPB10301 DPA10104-DPB11001 DPA10104-DPB11301 DPA10104-DPB11501 DPA10105-DPB10101 DPA10105-DPB10301 DPA10105-DPB10401 DPA10105-DPB11801 DPA10105-DPB15001 DPA10106-DPB10101 DPA10106-DPB11101 DPA10201-DPB10101 DPA10201-DPB10301 DPA10201-DPB10601 DPA10201-DPB10901 DPA10201-DPB11001 DPA10201-DPB110601 DPA10201-DPB11101 DPA10201-DPB11301 DPA10201-DPB113101 DPA10201-DPB113301 DPA10201-DPB11401 DPA10201-DPB11501 DPA10201-DPB11601 DPA10201-DPB11701 DPA10201-DPB11901 DPA10201-DPB12601 DPA10201-DPB13001 DPA10201-DPB14501 DPA10201-DPB15501 DPA10201-DPB19101 DPA10202-DPB10101 DPA10202-DPB10201 DPA10202-DPB10202 DPA10202-DPB10301 DPA10202-DPB10401 DPA10202-DPB10501 DPA10202-DPB10901 DPA10202-DPB110601 DPA10202-DPB11101 DPA10202-DPB11301 DPA10202-DPB113101 DPA10202-DPB11401 DPA10202-DPB11701 DPA10202-DPB11801 DPA10202-DPB11901 DPA10202-DPB12101 DPA10202-DPB12901 DPA10202-DPB13001; note = HLAs: DPA10202-DPB13101 DPA10202-DPB13801 DPA10202-DPB14501 DPA10202-DPB15501 DPA10202-DPB16501 DPA10202-DPB18501 DPA10301-DPB10101 DPA10301-DPB10201 DPA10301-DPB10202 DPA10301-DPB10301 DPA10301-DPB10401 DPA10301-DPB10402 DPA10301-DPB10901 DPA10301-DPB110501 DPA10301-DPB110601 DPA10301-DPB11101 DPA10301-DPB11301 DPA10301-DPB11701 DPA10301-DPB11801 DPA10301-DPB12301 DPA10301-DPB13901 DPA10301-DPB14001 DPA10301-DPB14901 DPA10301-DPB15501 DPA10301-DPB16501 DPA10301-DPB17501 DPA10301-DPB18001 DPA10401-DPB10101 DPA10401-DPB10201 DPA10401-DPB10202 DPA10401-DPB10301 DPA10401-DPB10402 DPA10401-DPB10501 DPA10401-DPB110501 DPA10401-DPB11301 DPA10401-DPB113301 DPA10401-DPB11401 DPA10401-DPB14901 DQA10101-DQB10501 DQA10102-DQB10501 DQA10102-DQB10503 DQA10102-DQB10601 DQA10102-DQB10604 DQA10102-DQB10609 DQA10102-DQB10611 DQA10103-DQB10501 DQA10103-DQB10503 DQA10103-DQB10601 DQA10103-DQB10602 DQA10103-DQB10604 DQA10103-DQB10608 DQA10103-DQB10609 DQA10104-DQB10501 DQA10105-DQB10501 DQA10201-DQB10301; note = HLAs: DQA10201-DQB10303 DQA10501-DQB10501 DQA10505-DQB10302 DQA10505-DQB10402 DQA10505-DQB10501 DQA10506-DQB10303
LNKIVRMYSPVSILDI

SEQ ID NO: 4455 - protein, 14 aa, Human immunodeficiency virus 1
  source 1..14: note = HLAs: DPA10301-DPB10101 DPA10401-DPB10101
LNKRTQDFWEVQLG

SEQ ID NO: 4456 - protein, 15 aa, Human immunodeficiency virus 1
  source 1..15: note = HLAs: DPA10103-DPB10101 DPA10103-DPB11501 DPA10103-DPB13101 DPA10103-DPB15001 DPA10104-DPB10101 DPA10104-DPB11501 DPA10105-DPB10101 DPA10105-DPB15001 DPA10301-DPB10101 DPA10301-DPB10201 DPA10301-DPB10202 DPA10301-DPB10401 DPA10301-DPB110601 DPA10301-DPB11801 DPA10301-DPB12301 DPA10301-DPB13901 DPA10301-DPB14001 DPA10301-DPB16501 DPA10401-DPB10101 DPA10401-DPB10202 DQA10101-DQB10501 DQA10102-DQB10501 DQA10102-DQB10503 DQA10104-DQB10501 DQA10105-DQB10501
LNKRTQDFWEVQLGI

SEQ ID NO: 4457 - protein, 16 aa, Human immunodeficiency virus 1
  source 1..16: note = HLAs: DPA10103-DPB10101 DPA10103-DPB11501 DPA10103-DPB13101 DPA10103-DPB15001 DPA10104-DPB10101 DPA10104-DPB11501 DPA10105-DPB10101 DPA10105-DPB15001 DPA10202-DPB10101 DPA10301-DPB10101 DPA10301-DPB10201 DPA10301-DPB10202 DPA10301-DPB10401 DPA10301-DPB110601 DPA10301-DPB11801 DPA10301-DPB12301 DPA10301-DPB13901 DPA10301-DPB14001 DPA10301-DPB16501 DPA10401-DPB10101 DPA10401-DPB10202 DQA10101-DQB10501 DQA10102-DQB10501 DQA10102-DQB10503 DQA10104-DQB10501 DQA10105-DQB10501
LNKRTQDFWEVQLGIP

SEQ ID NO: 4458 - protein, 17 aa, Human immunodeficiency virus 1
  source 1..17: note = HLAs: DPA10103-DPB10101 DPA10103-DPB11501 DPA10103-DPB13101 DPA10103-DPB15001 DPA10104-DPB10101 DPA10104-DPB11501 DPA10105-DPB10101 DPA10105-DPB15001 DPA10202-DPB10101 DPA10202-DPB13101 DPA10301-DPB10101 DPA10301-DPB10201 DPA10301-DPB10202 DPA10301-DPB10401 DPA10301-DPB110601 DPA10301-DPB11801 DPA10301-DPB12301 DPA10301-DPB13901 DPA10301-DPB14001 DPA10301-DPB16501 DPA10401-DPB10101 DQA10102-DQB10501 DQA10102-DQB10503
LNKRTQDFWEVQLGIPH

SEQ ID NO: 4459 - protein, 18 aa, Human immunodeficiency virus 1
  source 1..18: note = HLAs: DPA10301-DPB10101 DPA10301-DPB16501 DPA10401-DPB10101 DQA10102-DQB10501
LNKRTQDFWEVQLGIPHP

SEQ ID NO: 4460 - protein, 19 aa, Human immunodeficiency virus 1
  source 1..19: note = HLAs: DRB1_0101 DRB1_1001 DPA10103-DPB10101 DPA10103-DPB11501 DPA10103-DPB13101 DPA10103-DPB15001 DPA10104-DPB10101 DPA10104-DPB11501 DPA10105-DPB10101 DPA10105-DPB15001 DPA10106-DPB10101 DPA10201-DPB10101 DPA10202-DPB10101 DPA10301-DPB10101 DPA10301-DPB10201 DPA10301-DPB10202 DPA10301-DPB10401 DPA10301-DPB110601 DPA10301-DPB11801 DPA10301-DPB12301 DPA10301-DPB13901 DPA10301-DPB14001 DPA10301-DPB16501 DPA10401-DPB10101 DPA10401-DPB10201 DPA10401-DPB10202 DQA10102-DQB10501 DQA10102-DQB10503 DQA10102-DQB10601 DQA10103-DQB10501 DQA10103-DQB10601 DQA10201-DQB10301 DQA10201-DQB10303 DQA10301-DQB10301 DQA10302-DQB10301 DQA10303-DQB10301 DQA10501-DQB10301 DQA10501-DQB10319 DQA10503-DQB10301 DQA10505-DQB10301 DQA10505-DQB10309 DQA10505-DQB10319 DQA10506-DQB10303 DQA10508-DQB10301 DQA10509-DQB10301 DQA10601-DQB10301
LNKRTQDFWEVQLGIPHPA

SEQ ID NO: 4461 - protein, 20 aa, Human immunodeficiency virus 1
  source 1..20: note = HLAs: DRB1_0101 DRB1_0901 DRB1_1001 DPA10103-DPB10101 DPA10103-DPB11501 DPA10103-DPB11601 DPA10103-DPB11901 DPA10103-DPB13101 DPA10103-DPB15001 DPA10104-DPB10101 DPA10104-DPB11501 DPA10105-DPB10101 DPA10105-DPB15001 DPA10106-DPB10101 DPA10201-DPB10101 DPA10201-DPB11501 DPA10202-DPB10101 DPA10202-DPB110601 DPA10202-DPB11901 DPA10202-DPB13101 DPA10301-DPB10101 DPA10301-DPB10201 DPA10301-DPB10202 DPA10301-DPB10401 DPA10301-DPB10402 DPA10301-DPB110501 DPA10301-DPB110601 DPA10301-DPB11801 DPA10301-DPB12301 DPA10301-DPB13901 DPA10301-DPB14001 DPA10301-DPB14901 DPA10301-DPB16501 DPA10301-DPB18001 DPA10401-DPB10101 DPA10401-DPB10201 DPA10401-DPB10202 DPA10401-DPB10501 DQA10101-DQB10601 DQA10102-DQB10501 DQA10102-DQB10503 DQA10102-DQB10601 DQA10102-DQB10609 DQA10103-DQB10501 DQA10103-DQB10503 DQA10103-DQB10601 DQA10103-DQB10609 DQA10201-DQB10301 DQA10201-DQB10303 DQA10301-DQB10301 DQA10302-DQB10301 DQA10303-DQB10301 DQA10401-DQB10301 DQA10401-DQB10319 DQA10501-DQB10301 DQA10501-DQB10319; note = HLAs: DQA10503-DQB10301 DQA10505-DQB10301 DQA10505-DQB10309 DQA10505-DQB10319 DQA10505-DQB10402 DQA10506-DQB10303 DQA10508-DQB10301 DQA10509-DQB10301 DQA10601-DQB10301
LNKRTQDFWEVQLGIPHPAG

SEQ ID NO: 4462 - protein, 21 aa, Human immunodeficiency virus 1
  source 1..21: note = HLAs: DRB1_0101 DRB1_1001 DPA10103-DPB10101 DPA10103-DPB11501 DPA10103-DPB13101 DPA10103-DPB15001 DPA10104-DPB10101 DPA10104-DPB11501 DPA10105-DPB10101 DPA10105-DPB15001 DPA10202-DPB10101 DPA10301-DPB10101 DPA10301-DPB10201 DPA10301-DPB10202 DPA10301-DPB10401 DPA10301-DPB110601 DPA10301-DPB11801 DPA10301-DPB12301 DPA10301-DPB13901 DPA10301-DPB14001 DPA10301-DPB16501 DPA10401-DPB10101 DQA10102-DQB10501 DQA10102-DQB10503 DQA10102-DQB10601 DQA10103-DQB10501 DQA10103-DQB10601 DQA10201-DQB10301 DQA10201-DQB10303 DQA10301-DQB10301 DQA10302-DQB10301 DQA10303-DQB10301 DQA10501-DQB10301 DQA10501-DQB10319 DQA10503-DQB10301 DQA10505-DQB10301 DQA10505-DQB10309 DQA10505-DQB10319 DQA10505-DQB10402 DQA10506-DQB10303 DQA10508-DQB10301 DQA10509-DQB10301 DQA10601-DQB10301
LNKRTQDFWEVQLGIPHPAGL

SEQ ID NO: 4463 - protein, 22 aa, Human immunodeficiency virus 1
  source 1..22: note = HLAs: DRB1_0101 DRB1_0102 DRB1_0901 DRB1_1001 DPA10103-DPB10101 DPA10103-DPB11501 DPA10103-DPB13101 DPA10103-DPB15001 DPA10104-DPB10101 DPA10104-DPB11501 DPA10105-DPB10101 DPA10105-DPB15001 DPA10202-DPB10101 DPA10301-DPB10101 DPA10301-DPB10201 DPA10301-DPB10202 DPA10301-DPB10401 DPA10301-DPB110601 DPA10301-DPB11801 DPA10301-DPB12301 DPA10301-DPB13901 DPA10301-DPB14001 DPA10301-DPB16501 DPA10401-DPB10101 DPA10401-DPB10501 DQA10102-DQB10501 DQA10102-DQB10503 DQA10102-DQB10601 DQA10103-DQB10501 DQA10103-DQB10601 DQA10103-DQB10602 DQA10201-DQB10301 DQA10201-DQB10303 DQA10301-DQB10301 DQA10302-DQB10301 DQA10303-DQB10301 DQA10401-DQB10301 DQA10401-DQB10319 DQA10501-DQB10301 DQA10501-DQB10319 DQA10503-DQB10301 DQA10505-DQB10301 DQA10505-DQB10309 DQA10505-DQB10319 DQA10505-DQB10402 DQA10506-DQB10303 DQA10508-DQB10301 DQA10509-DQB10301 DQA10601-DQB10301
LNKRTQDFWEVQLGIPHPAGLK

SEQ ID NO: 4464 - protein, 23 aa, Human immunodeficiency virus 1
  source 1..23: note = HLAs: DRB1_0101 DRB1_0102 DRB1_0901 DRB1_1001 DPA10103-DPB10101 DPA10103-DPB11501 DPA10103-DPB13101 DPA10103-DPB15001 DPA10104-DPB10101 DPA10104-DPB11501 DPA10105-DPB10101 DPA10105-DPB15001 DPA10202-DPB10101 DPA10301-DPB10101 DPA10301-DPB10201 DPA10301-DPB10202 DPA10301-DPB10401 DPA10301-DPB110601 DPA10301-DPB11801 DPA10301-DPB12301 DPA10301-DPB13901 DPA10301-DPB14001 DPA10301-DPB16501 DPA10401-DPB10101 DPA10401-DPB10501 DQA10102-DQB10501 DQA10102-DQB10503 DQA10102-DQB10601 DQA10103-DQB10501 DQA10103-DQB10601 DQA10103-DQB10602 DQA10201-DQB10301 DQA10201-DQB10303 DQA10301-DQB10301 DQA10302-DQB10301 DQA10303-DQB10301 DQA10401-DQB10301 DQA10401-DQB10319 DQA10501-DQB10301 DQA10501-DQB10319 DQA10503-DQB10301 DQA10505-DQB10301 DQA10505-DQB10309 DQA10505-DQB10319 DQA10505-DQB10402 DQA10506-DQB10303 DQA10508-DQB10301 DQA10509-DQB10301 DQA10601-DQB10301
LNKRTQDFWEVQLGIPHPAGLKK

SEQ ID NO: 4465 - protein, 24 aa, Human immunodeficiency virus 1
  source 1..24: note = HLAs: DRB1_0101 DRB1_0102 DRB1_0901 DRB1_1001 DPA10103-DPB10101 DPA10103-DPB11501 DPA10103-DPB13101 DPA10103-DPB15001 DPA10104-DPB10101 DPA10104-DPB11501 DPA10105-DPB10101 DPA10105-DPB15001 DPA10202-DPB10101 DPA10301-DPB10101 DPA10301-DPB10201 DPA10301-DPB10202 DPA10301-DPB10401 DPA10301-DPB110601 DPA10301-DPB11801 DPA10301-DPB12301 DPA10301-DPB13901 DPA10301-DPB14001 DPA10301-DPB16501 DPA10401-DPB10101 DPA10401-DPB10202 DPA10401-DPB10501 DQA10102-DQB10501 DQA10102-DQB10503 DQA10102-DQB10601 DQA10103-DQB10501 DQA10103-DQB10601 DQA10103-DQB10602 DQA10201-DQB10301 DQA10201-DQB10303 DQA10301-DQB10301 DQA10302-DQB10301 DQA10303-DQB10301 DQA10401-DQB10301 DQA10401-DQB10319 DQA10501-DQB10301 DQA10501-DQB10319 DQA10503-DQB10301 DQA10505-DQB10301 DQA10505-DQB10309 DQA10505-DQB10319 DQA10505-DQB10402 DQA10506-DQB10303 DQA10508-DQB10301 DQA10509-DQB10301 DQA10601-DQB10301
LNKRTQDFWEVQLGIPHPAGLKKK

SEQ ID NO: 4466 - protein, 25 aa, Human immunodeficiency virus 1
  source 1..25: note = HLAs: DRB1_0101 DRB1_0102 DRB1_0901 DRB1_1001 DPA10103-DPB10101 DPA10103-DPB11501 DPA10103-DPB13101 DPA10103-DPB15001 DPA10104-DPB10101 DPA10104-DPB11501 DPA10105-DPB10101 DPA10105-DPB15001 DPA10202-DPB10101 DPA10301-DPB10101 DPA10301-DPB10201 DPA10301-DPB10202 DPA10301-DPB10401 DPA10301-DPB110601 DPA10301-DPB11801 DPA10301-DPB12301 DPA10301-DPB13901 DPA10301-DPB14001 DPA10301-DPB16501 DPA10401-DPB10101 DPA10401-DPB10202 DPA10401-DPB10501 DQA10102-DQB10501 DQA10102-DQB10503 DQA10102-DQB10601 DQA10103-DQB10501 DQA10103-DQB10601 DQA10103-DQB10602 DQA10201-DQB10301 DQA10201-DQB10303 DQA10301-DQB10301 DQA10302-DQB10301 DQA10303-DQB10301 DQA10401-DQB10301 DQA10401-DQB10319 DQA10501-DQB10301 DQA10501-DQB10319 DQA10503-DQB10301 DQA10505-DQB10301 DQA10505-DQB10309 DQA10505-DQB10319 DQA10505-DQB10402 DQA10506-DQB10303 DQA10508-DQB10301 DQA10509-DQB10301 DQA10601-DQB10301
LNKRTQDFWEVQLGIPHPAGLKKKK

SEQ ID NO: 4467 - protein, 15 aa, Human immunodeficiency virus 1
  source 1..15: note = HLAs: DRB1_0101 DRB1_0102 DRB1_0901 DRB1_1001 DQA10102-DQB10501 DQA10102-DQB10601 DQA10103-DQB10601 DQA10201-DQB10301 DQA10201-DQB10303 DQA10501-DQB10301 DQA10501-DQB10319 DQA10503-DQB10301 DQA10505-DQB10301 DQA10505-DQB10309 DQA10505-DQB10319 DQA10505-DQB10402 DQA10506-DQB10303 DQA10508-DQB10301 DQA10509-DQB10301
LNTMLNTVGGHQAAM

SEQ ID NO: 4468 - protein, 16 aa, Human immunodeficiency virus 1
  source 1..16: note = HLAs: DRB1_0101 DRB1_0102 DQA10102-DQB10501 DQA10102-DQB10601 DQA10103-DQB10601 DQA10201-DQB10301 DQA10201-DQB10303 DQA10501-DQB10301 DQA10501-DQB10319 DQA10503-DQB10301 DQA10505-DQB10301 DQA10505-DQB10309 DQA10505-DQB10319 DQA10506-DQB10303 DQA10508-DQB10301 DQA10509-DQB10301
LNTMLNTVGGHQAAMQ

SEQ ID NO: 4469 - protein, 17 aa, Human immunodeficiency virus 1
  source 1..17: note = HLAs: DRB1_0101 DRB1_1001 DQA10102-DQB10501 DQA10102-DQB10601 DQA10103-DQB10601 DQA10201-DQB10301 DQA10201-DQB10303 DQA10506-DQB10303
LNTMLNTVGGHQAAMQM

SEQ ID NO: 4470 - protein, 18 aa, Human immunodeficiency virus 1
  source 1..18: note = HLAs: DQA10102-DQB10601 DQA10103-DQB10601
LNTMLNTVGGHQAAMQML

SEQ ID NO: 4471 - protein, 19 aa, Human immunodeficiency virus 1
  source 1..19: note = HLAs: DRB1_0101 DRB1_1001 DQA10102-DQB10501 DQA10102-DQB10601 DQA10102-DQB10602 DQA10103-DQB10601 DQA10103-DQB10602 DQA10103-DQB10609 DQA10201-DQB10301 DQA10201-DQB10303 DQA10505-DQB10402 DQA10506-DQB10303
LNTMLNTVGGHQAAMQMLK

SEQ ID NO: 4472 - protein, 20 aa, Human immunodeficiency virus 1
  source 1..20: note = HLAs: DRB1_0101 DRB1_1001 DPA10401-DPB10101 DQA10102-DQB10501 DQA10102-DQB10503 DQA10102-DQB10601 DQA10102-DQB10602 DQA10102-DQB10609 DQA10102-DQB10611 DQA10103-DQB10501 DQA10103-DQB10601 DQA10103-DQB10602 DQA10103-DQB10609 DQA10201-DQB10301 DQA10201-DQB10303 DQA10501-DQB10301 DQA10501-DQB10319 DQA10503-DQB10301 DQA10505-DQB10301 DQA10505-DQB10309 DQA10505-DQB10319 DQA10505-DQB10402 DQA10506-DQB10303 DQA10508-DQB10301 DQA10509-DQB10301
LNTMLNTVGGHQAAMQMLKD

SEQ ID NO: 4473 - protein, 21 aa, Human immunodeficiency virus 1
  source 1..21: note = HLAs: DRB1_0101 DRB1_1001 DQA10102-DQB10501 DQA10102-DQB10601 DQA10103-DQB10601 DQA10103-DQB10609 DQA10201-DQB10301
LNTMLNTVGGHQAAMQMLKDT

SEQ ID NO: 4474 - protein, 22 aa, Human immunodeficiency virus 1
  source 1..22: note = HLAs: DRB1_0101 DRB1_1001 DPA10401-DPB10101 DQA10102-DQB10501 DQA10102-DQB10601 DQA10102-DQB10609 DQA10103-DQB10601 DQA10103-DQB10609 DQA10201-DQB10301
LNTMLNTVGGHQAAMQMLKDTI

SEQ ID NO: 4475 - protein, 23 aa, Human immunodeficiency virus 1
  source 1..23: note = HLAs: DRB1_0101 DRB1_1001 DPA10401-DPB10101 DQA10102-DQB10501 DQA10102-DQB10601 DQA10102-DQB10609 DQA10103-DQB10501 DQA10103-DQB10601 DQA10103-DQB10609 DQA10201-DQB10301
LNTMLNTVGGHQAAMQMLKDTIN

SEQ ID NO: 4476 - protein, 14 aa, Human immunodeficiency virus 1
  source 1..14: note = HLAs: DQA10102-DQB10601 DQA10103-DQB10601 DQA10201-DQB10301
LNTVGGHQAAMQML

SEQ ID NO: 4477 - protein, 15 aa, Human immunodeficiency virus 1
  source 1..15: note = HLAs: DRB1_0101 DRB1_1001 DQA10102-DQB10601 DQA10102-DQB10602 DQA10103-DQB10601 DQA10103-DQB10602 DQA10103-DQB10609 DQA10201-DQB10301 DQA10201-DQB10303 DQA10301-DQB10301 DQA10302-DQB10301 DQA10303-DQB10301 DQA10501-DQB10301 DQA10501-DQB10319 DQA10503-DQB10301 DQA10505-DQB10301 DQA10505-DQB10309 DQA10505-DQB10319 DQA10505-DQB10402 DQA10506-DQB10303 DQA10508-DQB10301 DQA10509-DQB10301
LNTVGGHQAAMQMLK

SEQ ID NO: 4478 - protein, 16 aa, Human immunodeficiency virus 1
  source 1..16: note = HLAs: DQA10102-DQB10501 DQA10102-DQB10601 DQA10102-DQB10602 DQA10102-DQB10609 DQA10102-DQB10611 DQA10103-DQB10601 DQA10103-DQB10609 DQA10201-DQB10301 DQA10201-DQB10303 DQA10501-DQB10301 DQA10501-DQB10319 DQA10503-DQB10301 DQA10505-DQB10301 DQA10505-DQB10309 DQA10505-DQB10319 DQA10505-DQB10402 DQA10506-DQB10303 DQA10508-DQB10301 DQA10509-DQB10301
LNTVGGHQAAMQMLKD

SEQ ID NO: 4479 - protein, 17 aa, Human immunodeficiency virus 1
  source 1..17: note = HLAs: DQA10102-DQB10501 DQA10102-DQB10601 DQA10102-DQB10602 DQA10102-DQB10609 DQA10102-DQB10611 DQA10103-DQB10601 DQA10103-DQB10602 DQA10103-DQB10609 DQA10201-DQB10301
LNTVGGHQAAMQMLKDT

SEQ ID NO: 4480 - protein, 18 aa, Human immunodeficiency virus 1
  source 1..18: note = HLAs: DQA10102-DQB10601 DQA10103-DQB10601
LNTVGGHQAAMQMLKDTI

SEQ ID NO: 4481 - protein, 19 aa, Human immunodeficiency virus 1
  source 1..19: note = HLAs: DQA10102-DQB10501 DQA10102-DQB10601 DQA10102-DQB10602 DQA10102-DQB10609 DQA10102-DQB10611 DQA10103-DQB10601 DQA10103-DQB10609 DQA10201-DQB10301
LNTVGGHQAAMQMLKDTIN

SEQ ID NO: 4482 - protein, 20 aa, Human immunodeficiency virus 1
  source 1..20: note = HLAs: DRB1_1001 DPA10301-DPB10101 DPA10401-DPB10101 DQA10102-DQB10501 DQA10102-DQB10503 DQA10102-DQB10601 DQA10102-DQB10602 DQA10102-DQB10609 DQA10102-DQB10611 DQA10103-DQB10501 DQA10103-DQB10601 DQA10103-DQB10602 DQA10103-DQB10609 DQA10201-DQB10301
LNTVGGHQAAMQMLKDTINE

SEQ ID NO: 4483 - protein, 21 aa, Human immunodeficiency virus 1
  source 1..21: note = HLAs: DRB1_1001 DPA10401-DPB10101 DQA10102-DQB10501 DQA10102-DQB10601 DQA10102-DQB10609 DQA10103-DQB10601 DQA10103-DQB10609
LNTVGGHQAAMQMLKDTINEE

SEQ ID NO: 4484 - protein, 22 aa, Human immunodeficiency virus 1
  source 1..22: note = HLAs: DRB1_1001 DPA10301-DPB10101 DPA10401-DPB10101 DQA10102-DQB10501 DQA10102-DQB10601 DQA10102-DQB10609 DQA10103-DQB10501 DQA10103-DQB10601 DQA10103-DQB10609
LNTVGGHQAAMQMLKDTINEEA

SEQ ID NO: 4485 - protein, 23 aa, Human immunodeficiency virus 1
  source 1..23: note = HLAs: DRB1_1001 DPA10301-DPB10101 DPA10401-DPB10101 DQA10102-DQB10501 DQA10102-DQB10503 DQA10102-DQB10601 DQA10102-DQB10609 DQA10103-DQB10501 DQA10103-DQB10601 DQA10103-DQB10609
LNTVGGHQAAMQMLKDTINEEAA

SEQ ID NO: 4486 - protein, 24 aa, Human immunodeficiency virus 1
  source 1..24: note = HLAs: DRB1_1001 DPA10301-DPB10101 DPA10401-DPB10101 DQA10102-DQB10501 DQA10102-DQB10503 DQA10102-DQB10601 DQA10102-DQB10609 DQA10103-DQB10501 DQA10103-DQB10601 DQA10103-DQB10609
LNTVGGHQAAMQMLKDTINEEAAE

SEQ ID NO: 4487 - protein, 25 aa, Human immunodeficiency virus 1
  source 1..25: note = HLAs: DRB1_1001 DPA10301-DPB10101 DPA10401-DPB10101 DQA10102-DQB10501 DQA10102-DQB10503 DQA10102-DQB10601 DQA10102-DQB10609 DQA10103-DQB10501 DQA10103-DQB10601 DQA10103-DQB10609
LNTVGGHQAAMQMLKDTINEEAAEW

SEQ ID NO: 4488 - protein, 13 aa, Human immunodeficiency virus 1
  source 1..13: note = HLAs: DQA10101-DQB10601 DQA10102-DQB10601 DQA10102-DQB10602 DQA10102-DQB10610 DQA10102-DQB10611 DQA10103-DQB10601 DQA10103-DQB10602 DQA10201-DQB10301
LNWASQIYPGIKV

SEQ ID NO: 4489 - protein, 17 aa, Human immunodeficiency virus 1
  source 1..17: note = HLAs: DRB1_0101 DRB1_0901 DQA10201-DQB10301
LPGKWKPKMIGGIGGFI

SEQ ID NO: 4490 - protein, 18 aa, Human immunodeficiency virus 1
  source 1..18: note = HLAs: DQA10201-DQB10301
LPGKWKPKMIGGIGGFIK

SEQ ID NO: 4491 - protein, 19 aa, Human immunodeficiency virus 1
  source 1..19: note = HLAs: DRB1_0101 DRB1_0901 DQA10201-DQB10301 DQA10501-DQB10301 DQA10501-DQB10319 DQA10503-DQB10301 DQA10505-DQB10301 DQA10505-DQB10309 DQA10505-DQB10319 DQA10508-DQB10301 DQA10509-DQB10301
LPGKWKPKMIGGIGGFIKV

SEQ ID NO: 4492 - protein, 20 aa, Human immunodeficiency virus 1
  source 1..20: note = HLAs: DRB1_0101 DRB1_0102 DRB1_0701 DRB1_0901 DRB1_1001 DRB1_1501 DQA10102-DQB10501 DQA10102-DQB10601 DQA10103-DQB10601 DQA10201-DQB10301 DQA10501-DQB10301 DQA10501-DQB10319 DQA10503-DQB10301 DQA10505-DQB10301 DQA10505-DQB10309 DQA10505-DQB10319 DQA10505-DQB10402 DQA10508-DQB10301 DQA10509-DQB10301
LPGKWKPKMIGGIGGFIKVR

SEQ ID NO: 4493 - protein, 21 aa, Human immunodeficiency virus 1
  source 1..21: note = HLAs: DRB1_0101 DRB1_0806 DRB1_0901 DRB1_1102 DRB1_1103 DRB1_1104 DRB1_1301 DRB1_1304 DRB1_1501 DQA10102-DQB10501 DQA10201-DQB10301 DQA10501-DQB10301 DQA10501-DQB10319 DQA10503-DQB10301 DQA10505-DQB10301 DQA10505-DQB10309 DQA10505-DQB10319 DQA10508-DQB10301 DQA10509-DQB10301
LPGKWKPKMIGGIGGFIKVRQ

SEQ ID NO: 4494 - protein, 22 aa, Human immunodeficiency virus 1
  source 1..22: note = HLAs: DRB1_0101 DRB1_0806 DRB1_0901 DRB1_1001 DRB1_1102 DRB1_1103 DRB1_1104 DRB1_1301 DRB1_1304 DRB1_1406 DRB1_1501 DQA10102-DQB10501 DQA10103-DQB10601 DQA10201-DQB10301 DQA10501-DQB10301 DQA10501-DQB10319 DQA10503-DQB10301 DQA10505-DQB10301 DQA10505-DQB10309 DQA10505-DQB10319 DQA10508-DQB10301 DQA10509-DQB10301
LPGKWKPKMIGGIGGFIKVRQY

SEQ ID NO: 4495 - protein, 14 aa, Human immunodeficiency virus 1
  source 1..14: note = HLAs: DRB1_1001 DQA10201-DQB10301 DQA10501-DQB10301 DQA10501-DQB10319 DQA10503-DQB10301 DQA10505-DQB10301 DQA10505-DQB10309 DQA10505-DQB10319 DQA10508-DQB10301 DQA10509-DQB10301
LPQGWKGSPAIFQS

SEQ ID NO: 4496 - protein, 15 aa, Human immunodeficiency virus 1
  source 1..15: note = HLAs: DRB1_0101 DRB1_0401 DRB1_0408 DRB1_0701 DRB1_0901 DRB1_1001 DQA10102-DQB10601 DQA10103-DQB10601 DQA10201-DQB10301 DQA10301-DQB10301 DQA10302-DQB10301 DQA10303-DQB10301 DQA10501-DQB10301 DQA10501-DQB10319 DQA10503-DQB10301 DQA10505-DQB10301 DQA10505-DQB10309 DQA10505-DQB10319 DQA10505-DQB10402 DQA10508-DQB10301 DQA10509-DQB10301
LPQGWKGSPAIFQSS

SEQ ID NO: 4497 - protein, 16 aa, Human immunodeficiency virus 1
  source 1..16: note = HLAs: DRB1_0101 DRB1_0401 DRB1_0901 DRB1_1001 DQA10102-DQB10601 DQA10103-DQB10601 DQA10201-DQB10301 DQA10301-DQB10301 DQA10302-DQB10301 DQA10303-DQB10301 DQA10501-DQB10301 DQA10501-DQB10319 DQA10503-DQB10301 DQA10505-DQB10301 DQA10505-DQB10309 DQA10505-DQB10319 DQA10505-DQB10402 DQA10506-DQB10303 DQA10508-DQB10301 DQA10509-DQB10301 DQA10601-DQB10301
LPQGWKGSPAIFQSSM

SEQ ID NO: 4498 - protein, 13 aa, Human immunodeficiency virus 1
  source 1..13: note = HLAs: DRB1_0101 DRB1_0701 DRB1_1102 DRB1_1114 DRB1_1201 DRB1_1301 DRB1_1302 DRB1_1304 DRB1_1406 DRB1_1501 DRB1_1502 DRB1_1503 DRB1_1602 DQA10102-DQB10501
LQKQITKIQNFRV

SEQ ID NO: 4499 - protein, 14 aa, Human immunodeficiency virus 1
  source 1..14: note = HLAs: DRB1_0101 DRB1_0102 DRB1_0401 DRB1_0402 DRB1_0404 DRB1_0405 DRB1_0408 DRB1_0410 DRB1_0701 DRB1_0801 DRB1_0802 DRB1_0803 DRB1_0804 DRB1_0806 DRB1_0809 DRB1_0813 DRB1_0901 DRB1_1001 DRB1_1101 DRB1_1102 DRB1_1103 DRB1_1104 DRB1_1114 DRB1_1201 DRB1_1202 DRB1_1301 DRB1_1302 DRB1_1304 DRB1_1305 DRB1_1401 DRB1_1402 DRB1_1404 DRB1_1406 DRB1_1454 DRB1_1501 DRB1_1502 DRB1_1503 DRB1_1601 DRB1_1602 DPA10103-DPB10101 DPA10103-DPB11501 DPA10104-DPB10101 DPA10104-DPB11501 DPA10105-DPB10101 DPA10106-DPB10101 DPA10201-DPB10101 DPA10201-DPB11501 DPA10202-DPB10101 DPA10202-DPB10202 DPA10202-DPB10501 DPA10202-DPB110601 DPA10202-DPB11801 DPA10202-DPB11901 DPA10202-DPB13101 DPA10202-DPB13801 DPA10202-DPB15501 DPA10202-DPB16501 DPA10301-DPB10101 DPA10301-DPB10201 DPA10301-DPB10202 DPA10301-DPB10401 DPA10301-DPB110601 DPA10301-DPB11801 DPA10301-DPB12301 DPA10301-DPB13901 DPA10301-DPB14001 DPA10301-DPB16501 DPA10401-DPB10101 DPA10401-DPB10201 DPA10401-DPB10202 DQA10102-DQB10501 DQA10103-DQB10501
LQKQITKIQNFRVY

SEQ ID NO: 4500 - protein, 15 aa, Human immunodeficiency virus 1
  source 1..15: note = HLAs: DRB1_0101 DRB1_0102 DRB1_0103 DRB1_0401 DRB1_0402 DRB1_0403 DRB1_0404 DRB1_0405 DRB1_0406 DRB1_0408 DRB1_0410 DRB1_0411 DRB1_0701 DRB1_0801 DRB1_0802 DRB1_0803 DRB1_0804 DRB1_0806 DRB1_0809 DRB1_0813 DRB1_0901 DRB1_1001 DRB1_1101 DRB1_1102 DRB1_1103 DRB1_1104 DRB1_1114 DRB1_1201 DRB1_1202 DRB1_1301 DRB1_1302 DRB1_1303 DRB1_1304 DRB1_1305 DRB1_1312 DRB1_1401 DRB1_1402 DRB1_1403 DRB1_1404 DRB1_1405 DRB1_1406 DRB1_1407 DRB1_1418 DRB1_1454 DRB1_1501 DRB1_1502 DRB1_1503 DRB1_1601 DRB1_1602 DPA10103-DPB10101 DPA10103-DPB10201 DPA10103-DPB10202 DPA10103-DPB10501 DPA10103-DPB11501 DPA10103-DPB11601 DPA10103-DPB11801 DPA10103-DPB11901 DPA10103-DPB13101 DPA10103-DPB13401 DPA10103-DPB14001 DPA10103-DPB14801 DPA10103-DPB15001 DPA10104-DPB10101 DPA10104-DPB11501 DPA10105-DPB10101 DPA10105-DPB11801 DPA10105-DPB15001 DPA10106-DPB10101 DPA10201-DPB10101 DPA10201-DPB110601 DPA10201-DPB11501 DPA10201-DPB11601 DPA10201-DPB11801 DPA10201-DPB11901 DPA10201-DPB13401 DPA10202-DPB10101; note = HLAs: DPA10202-DPB10201 DPA10202-DPB10202 DPA10202-DPB10401 DPA10202-DPB10402 DPA10202-DPB10501 DPA10202-DPB110001 DPA10202-DPB110501 DPA10202-DPB110601 DPA10202-DPB11301 DPA10202-DPB11801 DPA10202-DPB11901 DPA10202-DPB13101 DPA10202-DPB13801 DPA10202-DPB15501 DPA10202-DPB16501 DPA10301-DPB10101 DPA10301-DPB10201 DPA10301-DPB10202 DPA10301-DPB10401 DPA10301-DPB10402 DPA10301-DPB110501 DPA10301-DPB110601 DPA10301-DPB11801 DPA10301-DPB12301 DPA10301-DPB13901 DPA10301-DPB14001 DPA10301-DPB14901 DPA10301-DPB16501 DPA10301-DPB17501 DPA10301-DPB18001 DPA10401-DPB10101 DPA10401-DPB10201 DPA10401-DPB10202 DPA10401-DPB10501 DQA10102-DQB10501 DQA10103-DQB10501 DQA10103-DQB10609 DQA10505-DQB10402
LQKQITKIQNFRVYY

SEQ ID NO: 4501 - protein, 16 aa, Human immunodeficiency virus 1
  source 1..16: note = HLAs: DRB1_0101 DRB1_0102 DRB1_0103 DRB1_0401 DRB1_0402 DRB1_0404 DRB1_0405 DRB1_0408 DRB1_0410 DRB1_0701 DRB1_0801 DRB1_0802 DRB1_0803 DRB1_0804 DRB1_0806 DRB1_0809 DRB1_0813 DRB1_0901 DRB1_1001 DRB1_1101 DRB1_1102 DRB1_1103 DRB1_1104 DRB1_1114 DRB1_1201 DRB1_1202 DRB1_1301 DRB1_1302 DRB1_1303 DRB1_1304 DRB1_1305 DRB1_1312 DRB1_1401 DRB1_1402 DRB1_1403 DRB1_1404 DRB1_1405 DRB1_1406 DRB1_1454 DRB1_1501 DRB1_1502 DRB1_1503 DRB1_1601 DRB1_1602 DPA10103-DPB10101 DPA10103-DPB10201 DPA10103-DPB10202 DPA10103-DPB10501 DPA10103-DPB11501 DPA10103-DPB11601 DPA10103-DPB11801 DPA10103-DPB11901 DPA10103-DPB13101 DPA10103-DPB13401 DPA10103-DPB14001 DPA10103-DPB14101 DPA10103-DPB14801 DPA10103-DPB15001 DPA10104-DPB10101 DPA10104-DPB11501 DPA10105-DPB10101 DPA10105-DPB11801 DPA10105-DPB15001 DPA10106-DPB10101 DPA10201-DPB10101 DPA10201-DPB10202 DPA10201-DPB10501 DPA10201-DPB110601 DPA10201-DPB11501 DPA10201-DPB11601 DPA10201-DPB11801 DPA10201-DPB11901 DPA10201-DPB13401 DPA10202-DPB10101; note = HLAs: DPA10202-DPB10201 DPA10202-DPB10202 DPA10202-DPB10401 DPA10202-DPB10402 DPA10202-DPB10501 DPA10202-DPB10901 DPA10202-DPB110001 DPA10202-DPB110501 DPA10202-DPB110601 DPA10202-DPB11101 DPA10202-DPB11301 DPA10202-DPB11801 DPA10202-DPB11901 DPA10202-DPB12101 DPA10202-DPB12901 DPA10202-DPB13001 DPA10202-DPB13101 DPA10202-DPB13801 DPA10202-DPB15501 DPA10202-DPB16501 DPA10202-DPB18501 DPA10301-DPB10101 DPA10301-DPB10201 DPA10301-DPB10202 DPA10301-DPB10401 DPA10301-DPB10402 DPA10301-DPB110501 DPA10301-DPB110601 DPA10301-DPB11801 DPA10301-DPB12301 DPA10301-DPB13901 DPA10301-DPB14001 DPA10301-DPB14901 DPA10301-DPB15501 DPA10301-DPB16501 DPA10301-DPB17501 DPA10301-DPB18001 DPA10401-DPB10101 DPA10401-DPB10201 DPA10401-DPB10202 DPA10401-DPB10501 DQA10102-DQB10501 DQA10102-DQB10503 DQA10102-DQB10609 DQA10103-DQB10501 DQA10103-DQB10503 DQA10103-DQB10601 DQA10103-DQB10608 DQA10103-DQB10609 DQA10505-DQB10402
LQKQITKIQNFRVYYR

SEQ ID NO: 4502 - protein, 17 aa, Human immunodeficiency virus 1
  source 1..17: note = HLAs: DRB1_0101 DRB1_0102 DRB1_0103 DRB1_0401 DRB1_0402 DRB1_0404 DRB1_0405 DRB1_0408 DRB1_0410 DRB1_0701 DRB1_0801 DRB1_0802 DRB1_0803 DRB1_0804 DRB1_0806 DRB1_0809 DRB1_0813 DRB1_0901 DRB1_1001 DRB1_1101 DRB1_1102 DRB1_1103 DRB1_1104 DRB1_1114 DRB1_1201 DRB1_1202 DRB1_1301 DRB1_1302 DRB1_1303 DRB1_1304 DRB1_1305 DRB1_1312 DRB1_1401 DRB1_1402 DRB1_1403 DRB1_1404 DRB1_1405 DRB1_1406 DRB1_1418 DRB1_1454 DRB1_1501 DRB1_1502 DRB1_1503 DRB1_1601 DRB1_1602 DPA10103-DPB10101 DPA10103-DPB10201 DPA10103-DPB10202 DPA10103-DPB10501 DPA10103-DPB11501 DPA10103-DPB11601 DPA10103-DPB11801 DPA10103-DPB11901 DPA10103-DPB13101 DPA10103-DPB13401 DPA10103-DPB14001 DPA10103-DPB14101 DPA10103-DPB14801 DPA10103-DPB15001 DPA10103-DPB15901 DPA10104-DPB10101 DPA10104-DPB11501 DPA10105-DPB10101 DPA10105-DPB11801 DPA10105-DPB15001 DPA10106-DPB10101 DPA10201-DPB10101 DPA10201-DPB10202 DPA10201-DPB10501 DPA10201-DPB110601 DPA10201-DPB11501 DPA10201-DPB11601 DPA10201-DPB11801 DPA10201-DPB11901 DPA10201-DPB13401; note = HLAs: DPA10202-DPB10101 DPA10202-DPB10201 DPA10202-DPB10202 DPA10202-DPB10401 DPA10202-DPB10402 DPA10202-DPB10501 DPA10202-DPB110001 DPA10202-DPB110501 DPA10202-DPB110601 DPA10202-DPB11101 DPA10202-DPB11301 DPA10202-DPB11801 DPA10202-DPB11901 DPA10202-DPB12101 DPA10202-DPB13001 DPA10202-DPB13101 DPA10202-DPB13801 DPA10202-DPB15501 DPA10202-DPB16501 DPA10301-DPB10101 DPA10301-DPB10201 DPA10301-DPB10202 DPA10301-DPB10401 DPA10301-DPB10402 DPA10301-DPB110501 DPA10301-DPB110601 DPA10301-DPB11801 DPA10301-DPB12301 DPA10301-DPB13901 DPA10301-DPB14001 DPA10301-DPB14901 DPA10301-DPB16501 DPA10301-DPB17501 DPA10301-DPB18001 DPA10401-DPB10101 DPA10401-DPB10201 DPA10401-DPB10202 DPA10401-DPB10501 DQA10102-DQB10501 DQA10102-DQB10503 DQA10103-DQB10501 DQA10103-DQB10503 DQA10103-DQB10601 DQA10103-DQB10608 DQA10103-DQB10609 DQA10505-DQB10402
LQKQITKIQNFRVYYRD

SEQ ID NO: 4503 - protein, 15 aa, Human immunodeficiency virus 1
  source 1..15: note = HLAs: DQA10201-DQB10301
LSEGATPQDLNTMLN

SEQ ID NO: 4504 - protein, 20 aa, Human immunodeficiency virus 1
  source 1..20: note = HLAs: DRB1_0404 DRB1_1001 DQA10102-DQB10501
LSEGATPQDLNTMLNTVGGH

SEQ ID NO: 4505 - protein, 21 aa, Human immunodeficiency virus 1
  source 1..21: note = HLAs: DRB1_0404
LSEGATPQDLNTMLNTVGGHQ

SEQ ID NO: 4506 - protein, 22 aa, Human immunodeficiency virus 1
  source 1..22: note = HLAs: DRB1_0404 DRB1_0408 DRB1_1001 DQA10102-DQB10501
LSEGATPQDLNTMLNTVGGHQA

SEQ ID NO: 4507 - protein, 23 aa, Human immunodeficiency virus 1
  source 1..23: note = HLAs: DRB1_0404 DRB1_0408 DRB1_1001 DQA10102-DQB10501
LSEGATPQDLNTMLNTVGGHQAA

SEQ ID NO: 4508 - protein, 24 aa, Human immunodeficiency virus 1
  source 1..24: note = HLAs: DRB1_0101 DRB1_0404 DRB1_0408 DRB1_1001 DQA10102-DQB10501
LSEGATPQDLNTMLNTVGGHQAAM

SEQ ID NO: 4509 - protein, 25 aa, Human immunodeficiency virus 1
  source 1..25: note = HLAs: DRB1_0101 DRB1_0404 DRB1_0408 DRB1_1001 DQA10102-DQB10501 DQA10102-DQB10601 DQA10103-DQB10601 DQA10201-DQB10301
LSEGATPQDLNTMLNTVGGHQAAMQ

SEQ ID NO: 4510 - protein, 14 aa, Human immunodeficiency virus 1
  source 1..14: note = HLAs: DRB1_1101 DRB1_1305
LSWVPAHKGIGGNE

SEQ ID NO: 4511 - protein, 15 aa, Human immunodeficiency virus 1
  source 1..15: note = HLAs: DRB1_1101 DRB1_1305
LSWVPAHKGIGGNEQ

SEQ ID NO: 4512 - protein, 16 aa, Human immunodeficiency virus 1
  source 1..16: note = HLAs: DRB1_1101 DRB1_1305
LSWVPAHKGIGGNEQV

SEQ ID NO: 4513 - protein, 17 aa, Human immunodeficiency virus 1
  source 1..17: note = HLAs: DRB1_1101 DRB1_1305
LSWVPAHKGIGGNEQVD

SEQ ID NO: 4514 - protein, 19 aa, Human immunodeficiency virus 1
  source 1..19: note = HLAs: DRB1_1101 DRB1_1305
LSWVPAHKGIGGNEQVDKL

SEQ ID NO: 4515 - protein, 20 aa, Human immunodeficiency virus 1
  source 1..20: note = HLAs: DRB1_1101 DRB1_1305
LSWVPAHKGIGGNEQVDKLV

SEQ ID NO: 4516 - protein, 21 aa, Human immunodeficiency virus 1
  source 1..21: note = HLAs: DRB1_1101 DRB1_1305
LSWVPAHKGIGGNEQVDKLVS

SEQ ID NO: 4517 - protein, 22 aa, Human immunodeficiency virus 1
  source 1..22: note = HLAs: DRB1_1101 DRB1_1305
LSWVPAHKGIGGNEQVDKLVSS

SEQ ID NO: 4518 - protein, 23 aa, Human immunodeficiency virus 1
  source 1..23: note = HLAs: DRB1_1101 DRB1_1305
LSWVPAHKGIGGNEQVDKLVSSG

SEQ ID NO: 4519 - protein, 24 aa, Human immunodeficiency virus 1
  source 1..24: note = HLAs: DRB1_1101 DRB1_1305
LSWVPAHKGIGGNEQVDKLVSSGI

SEQ ID NO: 4520 - protein, 25 aa, Human immunodeficiency virus 1
  source 1..25: note = HLAs: DRB1_1101 DRB1_1305
LSWVPAHKGIGGNEQVDKLVSSGIR

SEQ ID NO: 4521 - protein, 14 aa, Human immunodeficiency virus 1
  source 1..14: note = HLAs: DRB1_0701 DQA10102-DQB10501
LTQIGCTLNFPISP

SEQ ID NO: 4522 - protein, 15 aa, Human immunodeficiency virus 1
  source 1..15: note = HLAs: DRB1_0101 DRB1_0102 DRB1_0404 DRB1_0405 DRB1_0410 DRB1_0701 DRB1_0813 DRB1_0901 DRB1_1001 DRB1_1102 DRB1_1114 DRB1_1301 DRB1_1302 DRB1_1304 DRB1_1401 DRB1_1404 DRB1_1406 DRB1_1454 DRB1_1501 DRB1_1502 DRB1_1503 DRB1_1602 DPA10301-DPB10101 DPA10301-DPB10201 DPA10301-DPB10202 DPA10301-DPB11801 DPA10301-DPB14001 DQA10102-DQB10501 DQA10103-DQB10501 DQA10103-DQB10609
LTQIGCTLNFPISPI

SEQ ID NO: 4523 - protein, 16 aa, Human immunodeficiency virus 1
  source 1..16: note = HLAs: DRB1_0101 DRB1_0701 DRB1_1114 DRB1_1302 DRB1_1501 DPA10301-DPB10101 DPA10301-DPB10201 DPA10301-DPB10202 DQA10102-DQB10501 DQA10102-DQB10503 DQA10102-DQB10609 DQA10103-DQB10501
LTQIGCTLNFPISPIE

SEQ ID NO: 4524 - protein, 17 aa, Human immunodeficiency virus 1
  source 1..17: note = HLAs: DRB1_0101 DRB1_0701 DRB1_1114 DRB1_1302 DRB1_1501 DPA10301-DPB10101 DQA10102-DQB10501 DQA10102-DQB10609 DQA10103-DQB10501
LTQIGCTLNFPISPIET

SEQ ID NO: 4525 - protein, 18 aa, Human immunodeficiency virus 1
  source 1..18: note = HLAs: DPA10301-DPB10101 DQA10102-DQB10501
LTQIGCTLNFPISPIETV

SEQ ID NO: 4526 - protein, 19 aa, Human immunodeficiency virus 1
  source 1..19: note = HLAs: DRB1_0701 DPA10202-DPB10101 DPA10301-DPB10101 DPA10301-DPB10201 DPA10301-DPB10202 DPA10301-DPB10401 DPA10301-DPB11801 DPA10301-DPB12301 DPA10301-DPB13901 DPA10301-DPB14001 DPA10301-DPB16501 DPA10401-DPB10101 DQA10102-DQB10501 DQA10102-DQB10503 DQA10102-DQB10609 DQA10103-DQB10501 DQA10103-DQB10609
LTQIGCTLNFPISPIETVP

SEQ ID NO: 4527 - protein, 20 aa, Human immunodeficiency virus 1
  source 1..20: note = HLAs: DRB1_0101 DRB1_0405 DRB1_0410 DRB1_0701 DRB1_0813 DRB1_0901 DRB1_1001 DRB1_1114 DRB1_1302 DRB1_1404 DRB1_1501 DRB1_1502 DRB1_1602 DPA10103-DPB10101 DPA10103-DPB11501 DPA10104-DPB10101 DPA10104-DPB11501 DPA10105-DPB10101 DPA10202-DPB10101 DPA10202-DPB110601 DPA10202-DPB11901 DPA10202-DPB13101 DPA10301-DPB10101 DPA10301-DPB10201 DPA10301-DPB10202 DPA10301-DPB10401 DPA10301-DPB10402 DPA10301-DPB110501 DPA10301-DPB110601 DPA10301-DPB11801 DPA10301-DPB12301 DPA10301-DPB13901 DPA10301-DPB14001 DPA10301-DPB14901 DPA10301-DPB16501 DPA10301-DPB18001 DPA10401-DPB10101 DPA10401-DPB10201 DPA10401-DPB10202 DQA10102-DQB10501 DQA10102-DQB10503 DQA10102-DQB10601 DQA10102-DQB10609 DQA10103-DQB10501 DQA10103-DQB10601 DQA10103-DQB10604 DQA10103-DQB10609 DQA10201-DQB10301 DQA10201-DQB10303 DQA10505-DQB10402
LTQIGCTLNFPISPIETVPV

SEQ ID NO: 4528 - protein, 21 aa, Human immunodeficiency virus 1
  source 1..21: note = HLAs: DRB1_0101 DRB1_0404 DRB1_0405 DRB1_0408 DRB1_0410 DRB1_0701 DRB1_0813 DRB1_0901 DRB1_1001 DRB1_1114 DRB1_1302 DRB1_1304 DRB1_1401 DRB1_1404 DRB1_1406 DRB1_1454 DRB1_1501 DRB1_1602 DPA10103-DPB10101 DPA10103-DPB11501 DPA10104-DPB10101 DPA10104-DPB11501 DPA10105-DPB10101 DPA10202-DPB10101 DPA10301-DPB10101 DPA10301-DPB10201 DPA10301-DPB10202 DPA10301-DPB10401 DPA10301-DPB110601 DPA10301-DPB11801 DPA10301-DPB12301 DPA10301-DPB13901 DPA10301-DPB14001 DPA10301-DPB16501 DPA10401-DPB10101 DPA10401-DPB10201 DQA10102-DQB10501 DQA10102-DQB10609 DQA10103-DQB10501 DQA10103-DQB10601 DQA10103-DQB10609
LTQIGCTLNFPISPIETVPVK

SEQ ID NO: 4529 - protein, 22 aa, Human immunodeficiency virus 1
  source 1..22: note = HLAs: DRB1_0101 DRB1_0102 DRB1_0401 DRB1_0404 DRB1_0405 DRB1_0408 DRB1_0410 DRB1_0701 DRB1_0803 DRB1_0813 DRB1_0901 DRB1_1001 DRB1_1102 DRB1_1114 DRB1_1301 DRB1_1302 DRB1_1304 DRB1_1401 DRB1_1404 DRB1_1406 DRB1_1454 DRB1_1501 DRB1_1502 DRB1_1602 DPA10103-DPB10101 DPA10103-DPB11501 DPA10104-DPB10101 DPA10104-DPB11501 DPA10105-DPB10101 DPA10202-DPB10101 DPA10301-DPB10101 DPA10301-DPB10201 DPA10301-DPB10202 DPA10301-DPB10401 DPA10301-DPB110601 DPA10301-DPB11801 DPA10301-DPB12301 DPA10301-DPB13901 DPA10301-DPB14001 DPA10301-DPB16501 DPA10401-DPB10101 DPA10401-DPB10201 DPA10401-DPB10202 DQA10102-DQB10501 DQA10102-DQB10503 DQA10102-DQB10601 DQA10102-DQB10609 DQA10103-DQB10501 DQA10103-DQB10601 DQA10103-DQB10604 DQA10103-DQB10609
LTQIGCTLNFPISPIETVPVKL

SEQ ID NO: 4530 - protein, 23 aa, Human immunodeficiency virus 1
  source 1..23: note = HLAs: DRB1_0101 DRB1_0102 DRB1_0401 DRB1_0404 DRB1_0405 DRB1_0408 DRB1_0410 DRB1_0701 DRB1_0801 DRB1_0802 DRB1_0803 DRB1_0804 DRB1_0806 DRB1_0809 DRB1_0813 DRB1_0901 DRB1_1001 DRB1_1102 DRB1_1114 DRB1_1201 DRB1_1301 DRB1_1302 DRB1_1304 DRB1_1312 DRB1_1401 DRB1_1402 DRB1_1404 DRB1_1406 DRB1_1454 DRB1_1501 DRB1_1502 DRB1_1503 DRB1_1602 DPA10103-DPB10101 DPA10103-DPB11501 DPA10104-DPB10101 DPA10104-DPB11501 DPA10105-DPB10101 DPA10202-DPB10101 DPA10202-DPB110601 DPA10202-DPB11901 DPA10202-DPB13101 DPA10301-DPB10101 DPA10301-DPB10201 DPA10301-DPB10202 DPA10301-DPB10401 DPA10301-DPB110601 DPA10301-DPB11801 DPA10301-DPB12301 DPA10301-DPB13901 DPA10301-DPB14001 DPA10301-DPB16501 DPA10401-DPB10101 DPA10401-DPB10201 DPA10401-DPB10202 DQA10102-DQB10501 DQA10102-DQB10503 DQA10102-DQB10601 DQA10102-DQB10609 DQA10103-DQB10501 DQA10103-DQB10601 DQA10103-DQB10604 DQA10103-DQB10609 DQA10505-DQB10402
LTQIGCTLNFPISPIETVPVKLK

SEQ ID NO: 4531 - protein, 24 aa, Human immunodeficiency virus 1
  source 1..24: note = HLAs: DRB1_0101 DRB1_0102 DRB1_0401 DRB1_0404 DRB1_0405 DRB1_0408 DRB1_0410 DRB1_0701 DRB1_0801 DRB1_0802 DRB1_0803 DRB1_0804 DRB1_0806 DRB1_0809 DRB1_0813 DRB1_0901 DRB1_1001 DRB1_1102 DRB1_1103 DRB1_1114 DRB1_1201 DRB1_1301 DRB1_1302 DRB1_1304 DRB1_1312 DRB1_1401 DRB1_1402 DRB1_1404 DRB1_1406 DRB1_1454 DRB1_1501 DRB1_1502 DRB1_1503 DRB1_1602 DPA10103-DPB10101 DPA10103-DPB11501 DPA10104-DPB10101 DPA10104-DPB11501 DPA10105-DPB10101 DPA10202-DPB10101 DPA10202-DPB110601 DPA10202-DPB11901 DPA10202-DPB13101 DPA10301-DPB10101 DPA10301-DPB10201 DPA10301-DPB10202 DPA10301-DPB10401 DPA10301-DPB110601 DPA10301-DPB11801 DPA10301-DPB12301 DPA10301-DPB13901 DPA10301-DPB14001 DPA10301-DPB16501 DPA10401-DPB10101 DPA10401-DPB10201 DPA10401-DPB10202 DPA10401-DPB10501 DQA10102-DQB10501 DQA10102-DQB10503 DQA10102-DQB10601 DQA10102-DQB10609 DQA10103-DQB10501 DQA10103-DQB10601 DQA10103-DQB10604 DQA10103-DQB10608 DQA10103-DQB10609 DQA10505-DQB10402
LTQIGCTLNFPISPIETVPVKLKP

SEQ ID NO: 4532 - protein, 25 aa, Human immunodeficiency virus 1
  source 1..25: note = HLAs: DRB1_0101 DRB1_0102 DRB1_0401 DRB1_0404 DRB1_0405 DRB1_0408 DRB1_0410 DRB1_0701 DRB1_0801 DRB1_0802 DRB1_0803 DRB1_0804 DRB1_0806 DRB1_0809 DRB1_0813 DRB1_0901 DRB1_1001 DRB1_1102 DRB1_1103 DRB1_1114 DRB1_1201 DRB1_1301 DRB1_1302 DRB1_1304 DRB1_1312 DRB1_1401 DRB1_1402 DRB1_1404 DRB1_1406 DRB1_1454 DRB1_1501 DRB1_1502 DRB1_1503 DRB1_1601 DRB1_1602 DPA10103-DPB10101 DPA10103-DPB11501 DPA10104-DPB10101 DPA10104-DPB11501 DPA10105-DPB10101 DPA10202-DPB10101 DPA10202-DPB110601 DPA10202-DPB11901 DPA10202-DPB13101 DPA10202-DPB16501 DPA10301-DPB10101 DPA10301-DPB10201 DPA10301-DPB10202 DPA10301-DPB10401 DPA10301-DPB110601 DPA10301-DPB11801 DPA10301-DPB12301 DPA10301-DPB13901 DPA10301-DPB14001 DPA10301-DPB16501 DPA10401-DPB10101 DPA10401-DPB10201 DPA10401-DPB10202 DPA10401-DPB10501 DQA10102-DQB10501 DQA10102-DQB10503 DQA10102-DQB10601 DQA10102-DQB10609 DQA10103-DQB10501 DQA10103-DQB10601 DQA10103-DQB10604 DQA10103-DQB10608 DQA10103-DQB10609 DQA10201-DQB10303 DQA10505-DQB10402
LTQIGCTLNFPISPIETVPVKLKPG

SEQ ID NO: 4533 - protein, 14 aa, Human immunodeficiency virus 1
  source 1..14: note = HLAs: DQA10102-DQB10501 DQA10102-DQB10601 DQA10102-DQB10609 DQA10103-DQB10601 DQA10103-DQB10609 DQA10201-DQB10201 DQA10201-DQB10202 DQA10201-DQB10301 DQA10201-DQB10302 DQA10201-DQB10303 DQA10301-DQB10301 DQA10301-DQB10302 DQA10301-DQB10304 DQA10302-DQB10301 DQA10302-DQB10302 DQA10302-DQB10304 DQA10303-DQB10301 DQA10303-DQB10302 DQA10303-DQB10304 DQA10401-DQB10301 DQA10401-DQB10319 DQA10401-DQB10402 DQA10402-DQB10402 DQA10501-DQB10201 DQA10501-DQB10203 DQA10501-DQB10301 DQA10501-DQB10319 DQA10503-DQB10301 DQA10505-DQB10201 DQA10505-DQB10202 DQA10505-DQB10301 DQA10505-DQB10302 DQA10505-DQB10309 DQA10505-DQB10319 DQA10506-DQB10303 DQA10508-DQB10301 DQA10509-DQB10301 DQA10601-DQB10301
LVAVHVASGYIEAE

SEQ ID NO: 4534 - protein, 15 aa, Human immunodeficiency virus 1
  source 1..15: note = HLAs: DRB1_0101 DRB1_0102 DRB1_0701 DRB1_0901 DRB1_1001 DRB1_1102 DRB1_1301 DRB1_1304 DRB1_1406 DRB1_1501 DPA10103-DPB11501 DPA10104-DPB11501 DPA10301-DPB10101 DPA10301-DPB10201 DPA10301-DPB10202 DPA10301-DPB11801 DPA10401-DPB10101 DQA10102-DQB10501 DQA10102-DQB10503 DQA10102-DQB10601 DQA10102-DQB10609 DQA10102-DQB10611 DQA10103-DQB10501 DQA10103-DQB10601 DQA10103-DQB10609 DQA10201-DQB10201 DQA10201-DQB10202 DQA10201-DQB10301 DQA10201-DQB10302 DQA10201-DQB10303 DQA10301-DQB10301 DQA10301-DQB10302 DQA10301-DQB10304 DQA10302-DQB10301 DQA10302-DQB10302 DQA10302-DQB10304 DQA10303-DQB10301 DQA10303-DQB10302 DQA10303-DQB10304 DQA10401-DQB10201 DQA10401-DQB10301 DQA10401-DQB10319 DQA10401-DQB10402 DQA10402-DQB10402 DQA10501-DQB10201 DQA10501-DQB10203 DQA10501-DQB10301 DQA10501-DQB10319 DQA10503-DQB10301 DQA10505-DQB10201 DQA10505-DQB10202 DQA10505-DQB10301 DQA10505-DQB10302 DQA10505-DQB10309 DQA10505-DQB10319 DQA10505-DQB10402 DQA10506-DQB10303 DQA10508-DQB10301 DQA10509-DQB10301; note = HLAs: DQA10601-DQB10301
LVAVHVASGYIEAEV

SEQ ID NO: 4535 - protein, 16 aa, Human immunodeficiency virus 1
  source 1..16: note = HLAs: DRB1_0701 DRB1_0901 DRB1_1001 DPA10103-DPB11501 DPA10104-DPB11501 DPA10202-DPB10101 DPA10301-DPB10101 DPA10301-DPB10201 DPA10301-DPB10202 DPA10301-DPB110601 DPA10301-DPB11801 DPA10301-DPB14001 DPA10301-DPB16501 DPA10401-DPB10101 DPA10401-DPB10201 DPA10401-DPB10202 DQA10102-DQB10501 DQA10102-DQB10502 DQA10102-DQB10503 DQA10102-DQB10601 DQA10102-DQB10602 DQA10102-DQB10604 DQA10102-DQB10609 DQA10102-DQB10611 DQA10103-DQB10501 DQA10103-DQB10601 DQA10103-DQB10609 DQA10201-DQB10201 DQA10201-DQB10202 DQA10201-DQB10301 DQA10201-DQB10302 DQA10201-DQB10303 DQA10301-DQB10301 DQA10301-DQB10302 DQA10301-DQB10303 DQA10301-DQB10304 DQA10301-DQB10305 DQA10302-DQB10301 DQA10302-DQB10302 DQA10302-DQB10303 DQA10302-DQB10304 DQA10303-DQB10301 DQA10303-DQB10302 DQA10303-DQB10303 DQA10303-DQB10304 DQA10401-DQB10201 DQA10401-DQB10301 DQA10401-DQB10319 DQA10401-DQB10402 DQA10402-DQB10402 DQA10501-DQB10201 DQA10501-DQB10203 DQA10501-DQB10301 DQA10501-DQB10319 DQA10503-DQB10301 DQA10505-DQB10201; note = HLAs: DQA10505-DQB10202 DQA10505-DQB10301 DQA10505-DQB10302 DQA10505-DQB10309 DQA10505-DQB10319 DQA10505-DQB10402 DQA10506-DQB10303 DQA10508-DQB10301 DQA10509-DQB10301 DQA10601-DQB10301
LVAVHVASGYIEAEVI

SEQ ID NO: 4536 - protein, 17 aa, Human immunodeficiency virus 1
  source 1..17: note = HLAs: DRB1_0701 DRB1_0901 DRB1_1001 DPA10103-DPB11501 DPA10104-DPB11501 DPA10202-DPB10101 DPA10301-DPB10101 DPA10301-DPB10201 DPA10301-DPB10202 DPA10301-DPB110601 DPA10301-DPB11801 DPA10301-DPB14001 DPA10301-DPB16501 DPA10401-DPB10101 DPA10401-DPB10201 DPA10401-DPB10202 DQA10102-DQB10501 DQA10102-DQB10503 DQA10102-DQB10601 DQA10102-DQB10602 DQA10102-DQB10604 DQA10102-DQB10609 DQA10102-DQB10611 DQA10103-DQB10501 DQA10103-DQB10601 DQA10103-DQB10609 DQA10201-DQB10201 DQA10201-DQB10202 DQA10201-DQB10301 DQA10201-DQB10302 DQA10201-DQB10303 DQA10301-DQB10301 DQA10301-DQB10302 DQA10301-DQB10303 DQA10301-DQB10304 DQA10301-DQB10305 DQA10302-DQB10301 DQA10302-DQB10302 DQA10302-DQB10303 DQA10302-DQB10304 DQA10303-DQB10301 DQA10303-DQB10302 DQA10303-DQB10303 DQA10303-DQB10304 DQA10401-DQB10201 DQA10401-DQB10301 DQA10401-DQB10319 DQA10401-DQB10402 DQA10402-DQB10402 DQA10501-DQB10201 DQA10501-DQB10203 DQA10501-DQB10301 DQA10501-DQB10319 DQA10503-DQB10301 DQA10505-DQB10201 DQA10505-DQB10202; note = HLAs: DQA10505-DQB10301 DQA10505-DQB10302 DQA10505-DQB10309 DQA10505-DQB10319 DQA10505-DQB10402 DQA10506-DQB10303 DQA10508-DQB10301 DQA10509-DQB10301 DQA10601-DQB10301
LVAVHVASGYIEAEVIP

SEQ ID NO: 4537 - protein, 18 aa, Human immunodeficiency virus 1
  source 1..18: note = HLAs: DRB1_1001 DPA10301-DPB10101 DPA10401-DPB10101 DQA10102-DQB10501 DQA10102-DQB10503 DQA10102-DQB10601 DQA10102-DQB10609 DQA10103-DQB10601 DQA10103-DQB10609 DQA10201-DQB10201 DQA10201-DQB10202 DQA10201-DQB10301 DQA10201-DQB10302 DQA10201-DQB10303 DQA10301-DQB10301 DQA10301-DQB10302 DQA10301-DQB10304 DQA10302-DQB10301 DQA10302-DQB10302 DQA10302-DQB10304 DQA10303-DQB10301 DQA10303-DQB10302 DQA10303-DQB10304 DQA10401-DQB10201 DQA10401-DQB10301 DQA10401-DQB10319 DQA10401-DQB10402 DQA10402-DQB10402 DQA10501-DQB10201 DQA10501-DQB10203 DQA10501-DQB10301 DQA10501-DQB10319 DQA10503-DQB10301 DQA10505-DQB10201 DQA10505-DQB10202 DQA10505-DQB10301 DQA10505-DQB10302 DQA10505-DQB10309 DQA10505-DQB10319 DQA10506-DQB10303 DQA10508-DQB10301 DQA10509-DQB10301 DQA10601-DQB10301
LVAVHVASGYIEAEVIPA

SEQ ID NO: 4538 - protein, 19 aa, Human immunodeficiency virus 1
  source 1..19: note = HLAs: DRB1_0101 DRB1_0401 DRB1_0408 DRB1_0701 DRB1_0901 DRB1_1001 DPA10103-DPB10101 DPA10103-DPB11501 DPA10104-DPB10101 DPA10104-DPB11501 DPA10105-DPB10101 DPA10202-DPB10101 DPA10301-DPB10101 DPA10301-DPB10201 DPA10301-DPB10202 DPA10301-DPB10401 DPA10301-DPB110601 DPA10301-DPB11801 DPA10301-DPB12301 DPA10301-DPB13901 DPA10301-DPB14001 DPA10301-DPB16501 DPA10401-DPB10101 DPA10401-DPB10201 DPA10401-DPB10202 DQA10101-DQB10501 DQA10102-DQB10501 DQA10102-DQB10502 DQA10102-DQB10503 DQA10102-DQB10601 DQA10102-DQB10602 DQA10102-DQB10604 DQA10102-DQB10609 DQA10102-DQB10610 DQA10102-DQB10611 DQA10103-DQB10501 DQA10103-DQB10601 DQA10103-DQB10609 DQA10104-DQB10501 DQA10105-DQB10501 DQA10201-DQB10201 DQA10201-DQB10202 DQA10201-DQB10301 DQA10201-DQB10302 DQA10201-DQB10303 DQA10301-DQB10301 DQA10301-DQB10302 DQA10301-DQB10303 DQA10301-DQB10304 DQA10301-DQB10305 DQA10302-DQB10301 DQA10302-DQB10302 DQA10302-DQB10303 DQA10302-DQB10304 DQA10303-DQB10301 DQA10303-DQB10302 DQA10303-DQB10303; note = HLAs: DQA10303-DQB10304 DQA10401-DQB10201 DQA10401-DQB10301 DQA10401-DQB10319 DQA10401-DQB10402 DQA10402-DQB10402 DQA10501-DQB10201 DQA10501-DQB10203 DQA10501-DQB10301 DQA10501-DQB10319 DQA10503-DQB10301 DQA10505-DQB10201 DQA10505-DQB10202 DQA10505-DQB10301 DQA10505-DQB10302 DQA10505-DQB10309 DQA10505-DQB10319 DQA10506-DQB10303 DQA10508-DQB10301 DQA10509-DQB10301 DQA10601-DQB10301
LVAVHVASGYIEAEVIPAE

SEQ ID NO: 4539 - protein, 20 aa, Human immunodeficiency virus 1
  source 1..20: note = HLAs: DRB1_0101 DRB1_0401 DRB1_0404 DRB1_0405 DRB1_0408 DRB1_0701 DRB1_0813 DRB1_0901 DRB1_1001 DRB1_1602 DPA10103-DPB10101 DPA10103-DPB11501 DPA10103-DPB15001 DPA10104-DPB10101 DPA10104-DPB11501 DPA10105-DPB10101 DPA10105-DPB15001 DPA10202-DPB10101 DPA10202-DPB110601 DPA10202-DPB11901 DPA10301-DPB10101 DPA10301-DPB10201 DPA10301-DPB10202 DPA10301-DPB10401 DPA10301-DPB110601 DPA10301-DPB11101 DPA10301-DPB11801 DPA10301-DPB12301 DPA10301-DPB13901 DPA10301-DPB14001 DPA10301-DPB15501 DPA10301-DPB16501 DPA10401-DPB10101 DPA10401-DPB10201 DPA10401-DPB10202 DPA10401-DPB10301 DPA10401-DPB10501 DPA10401-DPB11401 DQA10101-DQB10501 DQA10101-DQB10601 DQA10102-DQB10501 DQA10102-DQB10502 DQA10102-DQB10503 DQA10102-DQB10601 DQA10102-DQB10602 DQA10102-DQB10604 DQA10102-DQB10609 DQA10102-DQB10610 DQA10102-DQB10611 DQA10103-DQB10501 DQA10103-DQB10503 DQA10103-DQB10601 DQA10103-DQB10602 DQA10103-DQB10604 DQA10103-DQB10609 DQA10104-DQB10501 DQA10105-DQB10501 DQA10201-DQB10201 DQA10201-DQB10202; note = HLAs: DQA10201-DQB10301 DQA10201-DQB10302 DQA10201-DQB10303 DQA10301-DQB10301 DQA10301-DQB10302 DQA10301-DQB10303 DQA10301-DQB10304 DQA10301-DQB10305 DQA10302-DQB10301 DQA10302-DQB10302 DQA10302-DQB10303 DQA10302-DQB10304 DQA10303-DQB10301 DQA10303-DQB10302 DQA10303-DQB10303 DQA10303-DQB10304 DQA10401-DQB10201 DQA10401-DQB10301 DQA10401-DQB10319 DQA10401-DQB10402 DQA10402-DQB10402 DQA10501-DQB10201 DQA10501-DQB10203 DQA10501-DQB10301 DQA10501-DQB10319 DQA10503-DQB10301 DQA10505-DQB10201 DQA10505-DQB10202 DQA10505-DQB10301 DQA10505-DQB10302 DQA10505-DQB10309 DQA10505-DQB10319 DQA10505-DQB10402 DQA10506-DQB10303 DQA10508-DQB10301 DQA10509-DQB10301 DQA10601-DQB10301
LVAVHVASGYIEAEVIPAET

SEQ ID NO: 4540 - protein, 21 aa, Human immunodeficiency virus 1
  source 1..21: note = HLAs: DRB1_0101 DRB1_0401 DRB1_0405 DRB1_0408 DRB1_0701 DRB1_0901 DRB1_1001 DPA10103-DPB10101 DPA10103-DPB11501 DPA10104-DPB10101 DPA10104-DPB11501 DPA10105-DPB10101 DPA10301-DPB10101 DPA10301-DPB10201 DPA10301-DPB10202 DPA10301-DPB110601 DPA10301-DPB11801 DPA10301-DPB16501 DPA10401-DPB10101 DQA10102-DQB10501 DQA10102-DQB10502 DQA10102-DQB10503 DQA10102-DQB10601 DQA10102-DQB10604 DQA10102-DQB10609 DQA10102-DQB10611 DQA10103-DQB10501 DQA10103-DQB10601 DQA10103-DQB10609 DQA10201-DQB10201 DQA10201-DQB10202 DQA10201-DQB10301 DQA10201-DQB10302 DQA10201-DQB10303 DQA10301-DQB10301 DQA10301-DQB10302 DQA10301-DQB10304 DQA10302-DQB10301 DQA10302-DQB10302 DQA10302-DQB10304 DQA10303-DQB10301 DQA10303-DQB10302 DQA10303-DQB10304 DQA10401-DQB10201 DQA10401-DQB10301 DQA10401-DQB10319 DQA10401-DQB10402 DQA10402-DQB10402 DQA10501-DQB10201 DQA10501-DQB10203 DQA10501-DQB10301 DQA10501-DQB10319 DQA10503-DQB10301 DQA10505-DQB10201 DQA10505-DQB10202 DQA10505-DQB10301 DQA10505-DQB10302 DQA10505-DQB10309; note = HLAs: DQA10505-DQB10319 DQA10506-DQB10303 DQA10508-DQB10301 DQA10509-DQB10301 DQA10601-DQB10301
LVAVHVASGYIEAEVIPAETG

SEQ ID NO: 4541 - protein, 22 aa, Human immunodeficiency virus 1
  source 1..22: note = HLAs: DRB1_0101 DRB1_0401 DRB1_0405 DRB1_0408 DRB1_0701 DRB1_0901 DRB1_1001 DPA10103-DPB10101 DPA10103-DPB11501 DPA10104-DPB10101 DPA10104-DPB11501 DPA10105-DPB10101 DPA10301-DPB10101 DPA10301-DPB10201 DPA10301-DPB10202 DPA10301-DPB110601 DPA10301-DPB11801 DPA10301-DPB14001 DPA10301-DPB16501 DPA10401-DPB10101 DQA10102-DQB10501 DQA10102-DQB10502 DQA10102-DQB10503 DQA10102-DQB10601 DQA10102-DQB10604 DQA10102-DQB10609 DQA10102-DQB10611 DQA10103-DQB10501 DQA10103-DQB10601 DQA10103-DQB10609 DQA10201-DQB10201 DQA10201-DQB10202 DQA10201-DQB10301 DQA10201-DQB10302 DQA10201-DQB10303 DQA10301-DQB10301 DQA10301-DQB10302 DQA10301-DQB10304 DQA10302-DQB10301 DQA10302-DQB10302 DQA10302-DQB10304 DQA10303-DQB10301 DQA10303-DQB10302 DQA10303-DQB10304 DQA10401-DQB10201 DQA10401-DQB10301 DQA10401-DQB10319 DQA10401-DQB10402 DQA10402-DQB10402 DQA10501-DQB10201 DQA10501-DQB10203 DQA10501-DQB10301 DQA10501-DQB10319 DQA10503-DQB10301 DQA10505-DQB10201 DQA10505-DQB10202 DQA10505-DQB10301 DQA10505-DQB10302; note = HLAs: DQA10505-DQB10309 DQA10505-DQB10319 DQA10506-DQB10303 DQA10508-DQB10301 DQA10509-DQB10301 DQA10601-DQB10301
LVAVHVASGYIEAEVIPAETGQ

SEQ ID NO: 4542 - protein, 23 aa, Human immunodeficiency virus 1
  source 1..23: note = HLAs: DRB1_0101 DRB1_0401 DRB1_0405 DRB1_0408 DRB1_0701 DRB1_0813 DRB1_0901 DRB1_1001 DPA10103-DPB10101 DPA10103-DPB11501 DPA10104-DPB10101 DPA10104-DPB11501 DPA10105-DPB10101 DPA10301-DPB10101 DPA10301-DPB10201 DPA10301-DPB10202 DPA10301-DPB110601 DPA10301-DPB11801 DPA10301-DPB14001 DPA10301-DPB16501 DPA10401-DPB10101 DQA10102-DQB10501 DQA10102-DQB10502 DQA10102-DQB10503 DQA10102-DQB10601 DQA10102-DQB10604 DQA10102-DQB10609 DQA10102-DQB10611 DQA10103-DQB10501 DQA10103-DQB10601 DQA10103-DQB10609 DQA10201-DQB10201 DQA10201-DQB10202 DQA10201-DQB10301 DQA10201-DQB10302 DQA10201-DQB10303 DQA10301-DQB10301 DQA10301-DQB10302 DQA10301-DQB10304 DQA10302-DQB10301 DQA10302-DQB10302 DQA10302-DQB10304 DQA10303-DQB10301 DQA10303-DQB10302 DQA10303-DQB10304 DQA10401-DQB10201 DQA10401-DQB10301 DQA10401-DQB10319 DQA10401-DQB10402 DQA10402-DQB10402 DQA10501-DQB10201 DQA10501-DQB10203 DQA10501-DQB10301 DQA10501-DQB10319 DQA10503-DQB10301 DQA10505-DQB10201 DQA10505-DQB10202 DQA10505-DQB10301; note = HLAs: DQA10505-DQB10302 DQA10505-DQB10309 DQA10505-DQB10319 DQA10506-DQB10303 DQA10508-DQB10301 DQA10509-DQB10301 DQA10601-DQB10301
LVAVHVASGYIEAEVIPAETGQE

SEQ ID NO: 4543 - protein, 24 aa, Human immunodeficiency virus 1
  source 1..24: note = HLAs: DRB1_0101 DRB1_0401 DRB1_0405 DRB1_0408 DRB1_0701 DRB1_0813 DRB1_0901 DRB1_1001 DPA10103-DPB10101 DPA10103-DPB11501 DPA10104-DPB10101 DPA10104-DPB11501 DPA10105-DPB10101 DPA10301-DPB10101 DPA10301-DPB10201 DPA10301-DPB10202 DPA10301-DPB110601 DPA10301-DPB11801 DPA10301-DPB14001 DPA10301-DPB16501 DPA10401-DPB10101 DQA10102-DQB10501 DQA10102-DQB10502 DQA10102-DQB10503 DQA10102-DQB10601 DQA10102-DQB10604 DQA10102-DQB10609 DQA10102-DQB10611 DQA10103-DQB10501 DQA10103-DQB10601 DQA10103-DQB10609 DQA10201-DQB10201 DQA10201-DQB10202 DQA10201-DQB10301 DQA10201-DQB10302 DQA10201-DQB10303 DQA10301-DQB10301 DQA10301-DQB10302 DQA10301-DQB10304 DQA10302-DQB10301 DQA10302-DQB10302 DQA10302-DQB10304 DQA10303-DQB10301 DQA10303-DQB10302 DQA10303-DQB10304 DQA10401-DQB10201 DQA10401-DQB10301 DQA10401-DQB10319 DQA10401-DQB10402 DQA10402-DQB10402 DQA10501-DQB10201 DQA10501-DQB10203 DQA10501-DQB10301 DQA10501-DQB10319 DQA10503-DQB10301 DQA10505-DQB10201 DQA10505-DQB10202 DQA10505-DQB10301; note = HLAs: DQA10505-DQB10302 DQA10505-DQB10309 DQA10505-DQB10319 DQA10506-DQB10303 DQA10508-DQB10301 DQA10509-DQB10301 DQA10601-DQB10301
LVAVHVASGYIEAEVIPAETGQET

SEQ ID NO: 4544 - protein, 25 aa, Human immunodeficiency virus 1
  source 1..25: note = HLAs: DRB1_0101 DRB1_0401 DRB1_0405 DRB1_0408 DRB1_0701 DRB1_0813 DRB1_0901 DRB1_1001 DPA10103-DPB10101 DPA10103-DPB11501 DPA10104-DPB10101 DPA10104-DPB11501 DPA10105-DPB10101 DPA10301-DPB10101 DPA10301-DPB10201 DPA10301-DPB10202 DPA10301-DPB110601 DPA10301-DPB11801 DPA10301-DPB14001 DPA10301-DPB16501 DPA10401-DPB10101 DQA10102-DQB10501 DQA10102-DQB10502 DQA10102-DQB10503 DQA10102-DQB10601 DQA10102-DQB10604 DQA10102-DQB10609 DQA10102-DQB10611 DQA10103-DQB10501 DQA10103-DQB10601 DQA10103-DQB10609 DQA10201-DQB10201 DQA10201-DQB10202 DQA10201-DQB10301 DQA10201-DQB10302 DQA10201-DQB10303 DQA10301-DQB10301 DQA10301-DQB10302 DQA10301-DQB10304 DQA10302-DQB10301 DQA10302-DQB10302 DQA10302-DQB10304 DQA10303-DQB10301 DQA10303-DQB10302 DQA10303-DQB10304 DQA10401-DQB10201 DQA10401-DQB10301 DQA10401-DQB10319 DQA10401-DQB10402 DQA10402-DQB10402 DQA10501-DQB10201 DQA10501-DQB10203 DQA10501-DQB10301 DQA10501-DQB10319 DQA10503-DQB10301 DQA10505-DQB10201 DQA10505-DQB10202 DQA10505-DQB10301; note = HLAs: DQA10505-DQB10302 DQA10505-DQB10309 DQA10505-DQB10319 DQA10506-DQB10303 DQA10508-DQB10301 DQA10509-DQB10301 DQA10601-DQB10301
LVAVHVASGYIEAEVIPAETGQETA

SEQ ID NO: 4545 - protein, 13 aa, Human immunodeficiency virus 1
  source 1..13: note = HLAs: DRB1_1101 DRB1_1305
LVDFRELNKRTQD

SEQ ID NO: 4546 - protein, 14 aa, Human immunodeficiency virus 1
  source 1..14: note = HLAs: DRB1_1101 DRB1_1103 DRB1_1104 DRB1_1305
LVDFRELNKRTQDF

SEQ ID NO: 4547 - protein, 15 aa, Human immunodeficiency virus 1
  source 1..15: note = HLAs: DRB1_0801 DRB1_0802 DRB1_0804 DRB1_0806 DRB1_0809 DRB1_1101 DRB1_1103 DRB1_1104 DRB1_1304 DRB1_1305
LVDFRELNKRTQDFW

SEQ ID NO: 4548 - protein, 16 aa, Human immunodeficiency virus 1
  source 1..16: note = HLAs: DRB1_0801 DRB1_0806 DRB1_1101 DRB1_1103 DRB1_1104 DRB1_1305
LVDFRELNKRTQDFWE

SEQ ID NO: 4549 - protein, 17 aa, Human immunodeficiency virus 1
  source 1..17: note = HLAs: DRB1_0801 DRB1_0806 DRB1_1101 DRB1_1103 DRB1_1104 DRB1_1305
LVDFRELNKRTQDFWEV

SEQ ID NO: 4550 - protein, 18 aa, Human immunodeficiency virus 1
  source 1..18: note = HLAs: DRB1_1101 DRB1_1305
LVDFRELNKRTQDFWEVQ

SEQ ID NO: 4551 - protein, 19 aa, Human immunodeficiency virus 1
  source 1..19: note = HLAs: DRB1_1101 DRB1_1104 DRB1_1305 DPA10103-DPB11501 DPA10104-DPB11501 DPA10301-DPB10101 DPA10301-DPB10201 DPA10301-DPB10202 DPA10301-DPB14001 DPA10401-DPB10101
LVDFRELNKRTQDFWEVQL

SEQ ID NO: 4552 - protein, 20 aa, Human immunodeficiency virus 1
  source 1..20: note = HLAs: DRB1_0801 DRB1_0806 DRB1_1101 DRB1_1103 DRB1_1104 DRB1_1305 DPA10103-DPB11501 DPA10103-DPB13101 DPA10104-DPB11501 DPA10301-DPB10101 DPA10301-DPB10201 DPA10301-DPB10202 DPA10301-DPB110601 DPA10301-DPB11801 DPA10301-DPB14001 DPA10301-DPB16501 DPA10401-DPB10101 DPA10401-DPB10501 DQA10102-DQB10501
LVDFRELNKRTQDFWEVQLG

SEQ ID NO: 4553 - protein, 21 aa, Human immunodeficiency virus 1
  source 1..21: note = HLAs: DRB1_0806 DRB1_1101 DRB1_1103 DRB1_1104 DRB1_1305 DPA10103-DPB10101 DPA10103-DPB11501 DPA10103-DPB13101 DPA10104-DPB10101 DPA10104-DPB11501 DPA10105-DPB10101 DPA10301-DPB10101 DPA10301-DPB10201 DPA10301-DPB10202 DPA10301-DPB110601 DPA10301-DPB14001 DPA10301-DPB16501 DPA10401-DPB10101 DQA10102-DQB10501
LVDFRELNKRTQDFWEVQLGI

SEQ ID NO: 4554 - protein, 22 aa, Human immunodeficiency virus 1
  source 1..22: note = HLAs: DRB1_0806 DRB1_1101 DRB1_1103 DRB1_1104 DRB1_1305 DPA10103-DPB10101 DPA10103-DPB11501 DPA10103-DPB13101 DPA10103-DPB15001 DPA10104-DPB10101 DPA10104-DPB11501 DPA10105-DPB10101 DPA10105-DPB15001 DPA10301-DPB10101 DPA10301-DPB10201 DPA10301-DPB10202 DPA10301-DPB10401 DPA10301-DPB110601 DPA10301-DPB11801 DPA10301-DPB12301 DPA10301-DPB13901 DPA10301-DPB14001 DPA10301-DPB16501 DPA10401-DPB10101 DPA10401-DPB10501 DQA10102-DQB10501
LVDFRELNKRTQDFWEVQLGIP

SEQ ID NO: 4555 - protein, 23 aa, Human immunodeficiency virus 1
  source 1..23: note = HLAs: DRB1_0806 DRB1_1001 DRB1_1101 DRB1_1103 DRB1_1104 DRB1_1305 DPA10103-DPB10101 DPA10103-DPB11501 DPA10103-DPB13101 DPA10103-DPB15001 DPA10104-DPB10101 DPA10104-DPB11501 DPA10105-DPB10101 DPA10105-DPB15001 DPA10202-DPB10101 DPA10202-DPB13101 DPA10301-DPB10101 DPA10301-DPB10201 DPA10301-DPB10202 DPA10301-DPB10401 DPA10301-DPB110601 DPA10301-DPB11801 DPA10301-DPB12301 DPA10301-DPB13901 DPA10301-DPB14001 DPA10301-DPB16501 DPA10401-DPB10101 DPA10401-DPB10201 DPA10401-DPB10202 DPA10401-DPB10501 DQA10102-DQB10501
LVDFRELNKRTQDFWEVQLGIPH

SEQ ID NO: 4556 - protein, 24 aa, Human immunodeficiency virus 1
  source 1..24: note = HLAs: DRB1_0801 DRB1_0806 DRB1_1001 DRB1_1101 DRB1_1103 DRB1_1104 DRB1_1305 DPA10103-DPB10101 DPA10103-DPB11501 DPA10103-DPB11601 DPA10103-DPB13101 DPA10103-DPB15001 DPA10104-DPB10101 DPA10104-DPB11501 DPA10105-DPB10101 DPA10105-DPB15001 DPA10202-DPB10101 DPA10202-DPB13101 DPA10301-DPB10101 DPA10301-DPB10201 DPA10301-DPB10202 DPA10301-DPB10401 DPA10301-DPB110601 DPA10301-DPB11801 DPA10301-DPB12301 DPA10301-DPB13901 DPA10301-DPB14001 DPA10301-DPB16501 DPA10401-DPB10101 DPA10401-DPB10201 DPA10401-DPB10202 DPA10401-DPB10501 DQA10102-DQB10501 DQA10102-DQB10503
LVDFRELNKRTQDFWEVQLGIPHP

SEQ ID NO: 4557 - protein, 25 aa, Human immunodeficiency virus 1
  source 1..25: note = HLAs: DRB1_0101 DRB1_0801 DRB1_0806 DRB1_1001 DRB1_1101 DRB1_1103 DRB1_1104 DRB1_1304 DRB1_1305 DPA10103-DPB10101 DPA10103-DPB11501 DPA10103-DPB11601 DPA10103-DPB13101 DPA10103-DPB15001 DPA10104-DPB10101 DPA10104-DPB11501 DPA10105-DPB10101 DPA10105-DPB15001 DPA10106-DPB10101 DPA10201-DPB10101 DPA10202-DPB10101 DPA10202-DPB110601 DPA10202-DPB11901 DPA10202-DPB13101 DPA10301-DPB10101 DPA10301-DPB10201 DPA10301-DPB10202 DPA10301-DPB10401 DPA10301-DPB110601 DPA10301-DPB11801 DPA10301-DPB12301 DPA10301-DPB13901 DPA10301-DPB14001 DPA10301-DPB16501 DPA10401-DPB10101 DPA10401-DPB10201 DPA10401-DPB10202 DPA10401-DPB10501 DQA10102-DQB10501 DQA10102-DQB10503 DQA10102-DQB10601 DQA10102-DQB10609 DQA10103-DQB10501 DQA10103-DQB10601 DQA10201-DQB10301 DQA10501-DQB10301 DQA10501-DQB10319 DQA10503-DQB10301 DQA10505-DQB10301 DQA10505-DQB10309 DQA10505-DQB10319 DQA10508-DQB10301 DQA10509-DQB10301 DQA10601-DQB10301
LVDFRELNKRTQDFWEVQLGIPHPA

SEQ ID NO: 4558 - protein, 14 aa, Human immunodeficiency virus 1
  source 1..14: note = HLAs: DRB1_1114 DRB1_1302 DQA10101-DQB10601 DQA10102-DQB10501 DQA10102-DQB10601 DQA10102-DQB10602 DQA10102-DQB10609 DQA10102-DQB10610 DQA10102-DQB10611 DQA10103-DQB10601 DQA10103-DQB10602 DQA10103-DQB10609 DQA10201-DQB10301
LVGKLNWASQIYPG

SEQ ID NO: 4559 - protein, 15 aa, Human immunodeficiency virus 1
  source 1..15: note = HLAs: DRB1_0101 DRB1_0701 DRB1_0806 DRB1_0901 DRB1_1001 DRB1_1102 DRB1_1114 DRB1_1301 DRB1_1302 DRB1_1304 DRB1_1406 DPA10103-DPB11501 DPA10104-DPB11501 DPA10301-DPB10101 DPA10301-DPB10201 DPA10301-DPB10202 DPA10301-DPB11801 DPA10301-DPB14001 DPA10401-DPB10101 DPA10401-DPB10201 DPA10401-DPB10202 DQA10101-DQB10601 DQA10101-DQB10602 DQA10102-DQB10501 DQA10102-DQB10503 DQA10102-DQB10601 DQA10102-DQB10602 DQA10102-DQB10603 DQA10102-DQB10609 DQA10102-DQB10610 DQA10102-DQB10611 DQA10102-DQB10614 DQA10103-DQB10501 DQA10103-DQB10601 DQA10103-DQB10602 DQA10103-DQB10603 DQA10103-DQB10608 DQA10103-DQB10609 DQA10103-DQB10614 DQA10104-DQB10602 DQA10105-DQB10602 DQA10201-DQB10301 DQA10201-DQB10303 DQA10301-DQB10301 DQA10302-DQB10301 DQA10303-DQB10301 DQA10401-DQB10301 DQA10401-DQB10319 DQA10501-DQB10301 DQA10501-DQB10319 DQA10503-DQB10301 DQA10505-DQB10301 DQA10505-DQB10309 DQA10505-DQB10319 DQA10505-DQB10402 DQA10506-DQB10303 DQA10508-DQB10301 DQA10509-DQB10301 DQA10601-DQB10301
LVGKLNWASQIYPGI

SEQ ID NO: 4560 - protein, 16 aa, Human immunodeficiency virus 1
  source 1..16: note = HLAs: DRB1_0101 DRB1_1001 DRB1_1114 DRB1_1302 DPA10103-DPB11501 DPA10104-DPB11501 DPA10202-DPB10101 DPA10301-DPB10101 DPA10301-DPB10201 DPA10301-DPB10202 DPA10301-DPB10401 DPA10301-DPB110601 DPA10301-DPB11801 DPA10301-DPB12301 DPA10301-DPB13901 DPA10301-DPB14001 DPA10401-DPB10101 DPA10401-DPB10201 DPA10401-DPB10202 DQA10101-DQB10601 DQA10101-DQB10602 DQA10102-DQB10501 DQA10102-DQB10503 DQA10102-DQB10601 DQA10102-DQB10602 DQA10102-DQB10603 DQA10102-DQB10604 DQA10102-DQB10609 DQA10102-DQB10610 DQA10102-DQB10611 DQA10102-DQB10614 DQA10103-DQB10501 DQA10103-DQB10503 DQA10103-DQB10601 DQA10103-DQB10602 DQA10103-DQB10603 DQA10103-DQB10608 DQA10103-DQB10609 DQA10103-DQB10614 DQA10104-DQB10602 DQA10105-DQB10602 DQA10201-DQB10301 DQA10201-DQB10303 DQA10301-DQB10301 DQA10302-DQB10301 DQA10303-DQB10301 DQA10401-DQB10301 DQA10401-DQB10319 DQA10501-DQB10301 DQA10501-DQB10319 DQA10503-DQB10301 DQA10505-DQB10301 DQA10505-DQB10309 DQA10505-DQB10319 DQA10505-DQB10402 DQA10506-DQB10303; note = HLAs: DQA10508-DQB10301 DQA10509-DQB10301 DQA10601-DQB10301
LVGKLNWASQIYPGIK

SEQ ID NO: 4561 - protein, 17 aa, Human immunodeficiency virus 1
  source 1..17: note = HLAs: DRB1_0101 DRB1_0901 DRB1_1001 DRB1_1114 DRB1_1302 DRB1_1304 DRB1_1501 DPA10103-DPB10101 DPA10103-DPB10201 DPA10103-DPB10202 DPA10103-DPB11501 DPA10103-DPB13401 DPA10103-DPB14801 DPA10104-DPB10101 DPA10104-DPB11501 DPA10105-DPB10101 DPA10202-DPB10101 DPA10202-DPB10202 DPA10301-DPB10101 DPA10301-DPB10201 DPA10301-DPB10202 DPA10301-DPB10401 DPA10301-DPB110601 DPA10301-DPB11801 DPA10301-DPB12301 DPA10301-DPB13901 DPA10301-DPB14001 DPA10301-DPB16501 DPA10401-DPB10101 DPA10401-DPB10201 DPA10401-DPB10202 DQA10101-DQB10601 DQA10101-DQB10602 DQA10102-DQB10501 DQA10102-DQB10503 DQA10102-DQB10601 DQA10102-DQB10602 DQA10102-DQB10603 DQA10102-DQB10609 DQA10102-DQB10610 DQA10102-DQB10611 DQA10102-DQB10614 DQA10103-DQB10501 DQA10103-DQB10503 DQA10103-DQB10601 DQA10103-DQB10602 DQA10103-DQB10603 DQA10103-DQB10608 DQA10103-DQB10609 DQA10103-DQB10614 DQA10104-DQB10602 DQA10105-DQB10602 DQA10201-DQB10301 DQA10201-DQB10303 DQA10301-DQB10301 DQA10302-DQB10301 DQA10303-DQB10301 DQA10401-DQB10301; note = HLAs: DQA10401-DQB10319 DQA10501-DQB10301 DQA10501-DQB10319 DQA10503-DQB10301 DQA10505-DQB10301 DQA10505-DQB10309 DQA10505-DQB10319 DQA10505-DQB10402 DQA10506-DQB10303 DQA10508-DQB10301 DQA10509-DQB10301 DQA10601-DQB10301
LVGKLNWASQIYPGIKV

SEQ ID NO: 4562 - protein, 13 aa, Human immunodeficiency virus 1
  source 1..13: note = HLAs: DRB1_0101 DRB1_1001 DPA10103-DPB11501 DPA10104-DPB11501 DPA10202-DPB10101 DPA10301-DPB10101 DPA10301-DPB10201 DPA10301-DPB10202 DPA10301-DPB10401 DPA10301-DPB110601 DPA10301-DPB11801 DPA10301-DPB12301 DPA10301-DPB13901 DPA10301-DPB14001 DPA10301-DPB16501 DPA10401-DPB10101 DQA10102-DQB10501 DQA10501-DQB10201 DQA10505-DQB10201 DQA10505-DQB10202
LVKLWYQLETEPI

SEQ ID NO: 4563 - protein, 13 aa, Human immunodeficiency virus 1
  source 1..13: note = HLAs: DQA10102-DQB10501
LVSSGIRKVLFLD

SEQ ID NO: 4564 - protein, 14 aa, Human immunodeficiency virus 1
  source 1..14: note = HLAs: DRB1_1304 DPA10103-DPB10201 DPA10103-DPB10202 DPA10103-DPB11501 DPA10103-DPB13401 DPA10103-DPB14001 DPA10103-DPB14801 DPA10104-DPB11501 DPA10201-DPB11501 DPA10202-DPB10101 DPA10202-DPB110601 DPA10202-DPB11901 DPA10301-DPB10101 DPA10301-DPB10201 DPA10301-DPB10202 DPA10301-DPB10401 DPA10301-DPB110601 DPA10301-DPB11801 DPA10301-DPB12301 DPA10301-DPB13901 DPA10301-DPB14001 DPA10301-DPB16501 DPA10401-DPB10101 DPA10401-DPB10201 DPA10401-DPB10202 DQA10102-DQB10501 DQA10103-DQB10601
LVSSGIRKVLFLDG

SEQ ID NO: 4565 - protein, 15 aa, Human immunodeficiency virus 1
  source 1..15: note = HLAs: DRB1_0101 DRB1_0102 DRB1_0410 DRB1_0701 DRB1_0804 DRB1_0806 DRB1_0901 DRB1_1001 DRB1_1102 DRB1_1103 DRB1_1104 DRB1_1114 DRB1_1301 DRB1_1302 DRB1_1304 DRB1_1401 DRB1_1406 DRB1_1454 DRB1_1501 DPA10103-DPB10101 DPA10103-DPB10201 DPA10103-DPB10202 DPA10103-DPB10401 DPA10103-DPB112601 DPA10103-DPB11501 DPA10103-DPB11601 DPA10103-DPB11801 DPA10103-DPB11901 DPA10103-DPB12301 DPA10103-DPB13101 DPA10103-DPB13401 DPA10103-DPB13901 DPA10103-DPB14001 DPA10103-DPB14101 DPA10103-DPB14801 DPA10103-DPB15001 DPA10104-DPB10101 DPA10104-DPB11501 DPA10105-DPB10101 DPA10105-DPB10401 DPA10105-DPB11801 DPA10105-DPB15001 DPA10106-DPB10101 DPA10201-DPB10101 DPA10201-DPB110601 DPA10201-DPB11501 DPA10201-DPB11901 DPA10202-DPB10101 DPA10202-DPB10201 DPA10202-DPB10202 DPA10202-DPB10501 DPA10202-DPB110601 DPA10202-DPB11801 DPA10202-DPB11901 DPA10202-DPB13101 DPA10202-DPB13801 DPA10202-DPB16501 DPA10301-DPB10101 DPA10301-DPB10201 DPA10301-DPB10202 DPA10301-DPB10401 DPA10301-DPB10402 DPA10301-DPB110501; note = HLAs: DPA10301-DPB110601 DPA10301-DPB11801 DPA10301-DPB12301 DPA10301-DPB13901 DPA10301-DPB14001 DPA10301-DPB14901 DPA10301-DPB16501 DPA10301-DPB17501 DPA10301-DPB18001 DPA10401-DPB10101 DPA10401-DPB10201 DPA10401-DPB10202 DPA10401-DPB10501 DQA10102-DQB10501 DQA10102-DQB10601 DQA10103-DQB10501 DQA10103-DQB10601 DQA10103-DQB10602 DQA10103-DQB10609 DQA10201-DQB10301
LVSSGIRKVLFLDGI

SEQ ID NO: 4566 - protein, 14 aa, Human immunodeficiency virus 1
  source 1..14: note = HLAs: DRB1_0101 DRB1_0901 DQA10102-DQB10601 DQA10102-DQB10609 DQA10201-DQB10301 DQA10401-DQB10301 DQA10401-DQB10319
LWKGEGAVVIQDNS

SEQ ID NO: 4567 - protein, 14 aa, Human immunodeficiency virus 1
  source 1..14: note = HLAs: DQA10101-DQB10501 DQA10102-DQB10501 DQA10102-DQB10502 DQA10104-DQB10501 DQA10105-DQB10501
LWMGYELHPDKWTV

SEQ ID NO: 4568 - protein, 15 aa, Human immunodeficiency virus 1
  source 1..15: note = HLAs: DQA10101-DQB10501 DQA10102-DQB10501 DQA10102-DQB10502 DQA10102-DQB10503 DQA10104-DQB10501 DQA10105-DQB10501
LWMGYELHPDKWTVQ

SEQ ID NO: 4569 - protein, 16 aa, Human immunodeficiency virus 1
  source 1..16: note = HLAs: DQA10101-DQB10501 DQA10102-DQB10501 DQA10102-DQB10502 DQA10102-DQB10503 DQA10104-DQB10501 DQA10105-DQB10501
LWMGYELHPDKWTVQP

SEQ ID NO: 4570 - protein, 17 aa, Human immunodeficiency virus 1
  source 1..17: note = HLAs: DQA10101-DQB10501 DQA10102-DQB10501 DQA10102-DQB10502 DQA10104-DQB10501 DQA10105-DQB10501
LWMGYELHPDKWTVQPI

SEQ ID NO: 4571 - protein, 19 aa, Human immunodeficiency virus 1
  source 1..19: note = HLAs: DPA10301-DPB10101 DQA10101-DQB10501 DQA10102-DQB10501 DQA10102-DQB10502 DQA10104-DQB10501 DQA10105-DQB10501
LWMGYELHPDKWTVQPIQL

SEQ ID NO: 4572 - protein, 20 aa, Human immunodeficiency virus 1
  source 1..20: note = HLAs: DPA10103-DPB11501 DPA10104-DPB11501 DPA10202-DPB10101 DPA10301-DPB10101 DPA10301-DPB10201 DPA10301-DPB10202 DPA10301-DPB10401 DPA10301-DPB110601 DPA10301-DPB12301 DPA10301-DPB13901 DPA10301-DPB14001 DPA10301-DPB16501 DPA10401-DPB10101 DQA10101-DQB10501 DQA10102-DQB10501 DQA10102-DQB10502 DQA10102-DQB10503 DQA10103-DQB10501 DQA10104-DQB10501 DQA10105-DQB10501 DQA10505-DQB10402
LWMGYELHPDKWTVQPIQLP

SEQ ID NO: 4573 - protein, 14 aa, Human immunodeficiency virus 1
  source 1..14: note = HLAs: DQA10102-DQB10501
MASDFNLPPVVAKE

SEQ ID NO: 4574 - protein, 15 aa, Human immunodeficiency virus 1
  source 1..15: note = HLAs: DRB1_0101 DRB1_1001 DQA10102-DQB10501
MASDFNLPPVVAKEI

SEQ ID NO: 4575 - protein, 16 aa, Human immunodeficiency virus 1
  source 1..16: note = HLAs: DRB1_1001 DQA10102-DQB10501
MASDFNLPPVVAKEIV

SEQ ID NO: 4576 - protein, 17 aa, Human immunodeficiency virus 1
  source 1..17: note = HLAs: DRB1_0101 DRB1_1001 DQA10102-DQB10501
MASDFNLPPVVAKEIVA

SEQ ID NO: 4577 - protein, 13 aa, Human immunodeficiency virus 1
  source 1..13: note = HLAs: DRB1_1101 DRB1_1103 DRB1_1104 DRB1_1305
MAVFIHNFKRKGG

SEQ ID NO: 4578 - protein, 14 aa, Human immunodeficiency virus 1
  source 1..14: note = HLAs: DRB1_0801 DRB1_0802 DRB1_0804 DRB1_0806 DRB1_0809 DRB1_1101 DRB1_1102 DRB1_1103 DRB1_1104 DRB1_1301 DRB1_1304 DRB1_1305 DRB1_1406
MAVFIHNFKRKGGI

SEQ ID NO: 4579 - protein, 15 aa, Human immunodeficiency virus 1
  source 1..15: note = HLAs: DRB1_0101 DRB1_0801 DRB1_0802 DRB1_0804 DRB1_0806 DRB1_0809 DRB1_1101 DRB1_1102 DRB1_1103 DRB1_1104 DRB1_1114 DRB1_1202 DRB1_1301 DRB1_1302 DRB1_1303 DRB1_1304 DRB1_1305 DRB1_1402 DRB1_1406 DRB1_1501 DRB1_1503 DRB1_1601
MAVFIHNFKRKGGIG

SEQ ID NO: 4580 - protein, 16 aa, Human immunodeficiency virus 1
  source 1..16: note = HLAs: DRB1_0801 DRB1_0802 DRB1_0804 DRB1_0806 DRB1_0809 DRB1_1101 DRB1_1102 DRB1_1103 DRB1_1104 DRB1_1301 DRB1_1304 DRB1_1305 DRB1_1406
MAVFIHNFKRKGGIGG

SEQ ID NO: 4581 - protein, 17 aa, Human immunodeficiency virus 1
  source 1..17: note = HLAs: DRB1_0801 DRB1_0802 DRB1_0804 DRB1_0806 DRB1_0809 DRB1_1101 DRB1_1102 DRB1_1103 DRB1_1104 DRB1_1301 DRB1_1304 DRB1_1305 DRB1_1406
MAVFIHNFKRKGGIGGY

SEQ ID NO: 4582 - protein, 18 aa, Human immunodeficiency virus 1
  source 1..18: note = HLAs: DRB1_1101 DRB1_1103 DRB1_1104 DRB1_1305
MAVFIHNFKRKGGIGGYS

SEQ ID NO: 4583 - protein, 19 aa, Human immunodeficiency virus 1
  source 1..19: note = HLAs: DRB1_0802 DRB1_0804 DRB1_0806 DRB1_0809 DRB1_1101 DRB1_1102 DRB1_1103 DRB1_1104 DRB1_1301 DRB1_1304 DRB1_1305
MAVFIHNFKRKGGIGGYSA

SEQ ID NO: 4584 - protein, 20 aa, Human immunodeficiency virus 1
  source 1..20: note = HLAs: DRB1_0101 DRB1_0801 DRB1_0802 DRB1_0804 DRB1_0806 DRB1_0809 DRB1_1101 DRB1_1102 DRB1_1103 DRB1_1104 DRB1_1301 DRB1_1304 DRB1_1305 DRB1_1406 DRB1_1601
MAVFIHNFKRKGGIGGYSAG

SEQ ID NO: 4585 - protein, 21 aa, Human immunodeficiency virus 1
  source 1..21: note = HLAs: DRB1_0802 DRB1_0804 DRB1_0806 DRB1_0809 DRB1_1101 DRB1_1102 DRB1_1103 DRB1_1104 DRB1_1301 DRB1_1304 DRB1_1305
MAVFIHNFKRKGGIGGYSAGE

SEQ ID NO: 4586 - protein, 22 aa, Human immunodeficiency virus 1
  source 1..22: note = HLAs: DRB1_0802 DRB1_0804 DRB1_0806 DRB1_0809 DRB1_1101 DRB1_1102 DRB1_1103 DRB1_1104 DRB1_1301 DRB1_1304 DRB1_1305
MAVFIHNFKRKGGIGGYSAGER

SEQ ID NO: 4587 - protein, 23 aa, Human immunodeficiency virus 1
  source 1..23: note = HLAs: DRB1_0801 DRB1_0802 DRB1_0804 DRB1_0806 DRB1_0809 DRB1_1101 DRB1_1102 DRB1_1103 DRB1_1104 DRB1_1301 DRB1_1304 DRB1_1305
MAVFIHNFKRKGGIGGYSAGERI

SEQ ID NO: 4588 - protein, 24 aa, Human immunodeficiency virus 1
  source 1..24: note = HLAs: DRB1_0801 DRB1_0802 DRB1_0804 DRB1_0806 DRB1_0809 DRB1_1101 DRB1_1102 DRB1_1103 DRB1_1104 DRB1_1301 DRB1_1304 DRB1_1305
MAVFIHNFKRKGGIGGYSAGERII

SEQ ID NO: 4589 - protein, 25 aa, Human immunodeficiency virus 1
  source 1..25: note = HLAs: DRB1_0801 DRB1_0802 DRB1_0804 DRB1_0806 DRB1_0809 DRB1_1101 DRB1_1102 DRB1_1103 DRB1_1104 DRB1_1301 DRB1_1304 DRB1_1305
MAVFIHNFKRKGGIGGYSAGERIID

SEQ ID NO: 4590 - protein, 14 aa, Human immunodeficiency virus 1
  source 1..14: note = HLAs: DQA10102-DQB10609 DQA10501-DQB10201 DQA10505-DQB10201 DQA10505-DQB10202
MDDLYVGSDLEIGQ

SEQ ID NO: 4591 - protein, 15 aa, Human immunodeficiency virus 1
  source 1..15: note = HLAs: DQA10102-DQB10501 DQA10102-DQB10609
MDDLYVGSDLEIGQH

SEQ ID NO: 4592 - protein, 16 aa, Human immunodeficiency virus 1
  source 1..16: note = HLAs: DQA10102-DQB10501 DQA10102-DQB10609
MDDLYVGSDLEIGQHR

SEQ ID NO: 4593 - protein, 17 aa, Human immunodeficiency virus 1
  source 1..17: note = HLAs: DQA10102-DQB10501 DQA10102-DQB10609
MDDLYVGSDLEIGQHRA

SEQ ID NO: 4594 - protein, 19 aa, Human immunodeficiency virus 1
  source 1..19: note = HLAs: DPA10301-DPB10101
MDGPKVKQWPLTEEKIKAL

SEQ ID NO: 4595 - protein, 14 aa, Human immunodeficiency virus 1
  source 1..14: note = HLAs: DQA10201-DQB10301 DQA10401-DQB10301 DQA10401-DQB10319
MFSALSEGATPQDL

SEQ ID NO: 4596 - protein, 15 aa, Human immunodeficiency virus 1
  source 1..15: note = HLAs: DRB1_0101 DRB1_1001 DQA10102-DQB10601 DQA10103-DQB10601 DQA10201-DQB10301 DQA10201-DQB10303 DQA10301-DQB10301 DQA10302-DQB10301 DQA10303-DQB10301 DQA10401-DQB10301 DQA10401-DQB10319 DQA10501-DQB10301 DQA10501-DQB10319 DQA10503-DQB10301 DQA10505-DQB10301 DQA10505-DQB10309 DQA10505-DQB10319 DQA10506-DQB10303 DQA10508-DQB10301 DQA10509-DQB10301 DQA10601-DQB10301
MFSALSEGATPQDLN

SEQ ID NO: 4597 - protein, 16 aa, Human immunodeficiency virus 1
  source 1..16: note = HLAs: DQA10102-DQB10601 DQA10103-DQB10601 DQA10201-DQB10301 DQA10201-DQB10303 DQA10301-DQB10301 DQA10302-DQB10301 DQA10303-DQB10301 DQA10401-DQB10301 DQA10401-DQB10319 DQA10501-DQB10301 DQA10501-DQB10319 DQA10503-DQB10301 DQA10505-DQB10301 DQA10505-DQB10309 DQA10505-DQB10319 DQA10508-DQB10301 DQA10509-DQB10301 DQA10601-DQB10301
MFSALSEGATPQDLNT

SEQ ID NO: 4598 - protein, 17 aa, Human immunodeficiency virus 1
  source 1..17: note = HLAs: DQA10102-DQB10601 DQA10103-DQB10601 DQA10201-DQB10301 DQA10501-DQB10301 DQA10501-DQB10319 DQA10503-DQB10301 DQA10505-DQB10301 DQA10505-DQB10309 DQA10505-DQB10319 DQA10508-DQB10301 DQA10509-DQB10301
MFSALSEGATPQDLNTM

SEQ ID NO: 4599 - protein, 18 aa, Human immunodeficiency virus 1
  source 1..18: note = HLAs: DQA10201-DQB10301
MFSALSEGATPQDLNTML

SEQ ID NO: 4600 - protein, 19 aa, Human immunodeficiency virus 1
  source 1..19: note = HLAs: DQA10102-DQB10601 DQA10201-DQB10301
MFSALSEGATPQDLNTMLN

SEQ ID NO: 4601 - protein, 20 aa, Human immunodeficiency virus 1
  source 1..20: note = HLAs: DQA10102-DQB10601 DQA10201-DQB10301 DQA10201-DQB10303
MFSALSEGATPQDLNTMLNT

SEQ ID NO: 4602 - protein, 21 aa, Human immunodeficiency virus 1
  source 1..21: note = HLAs: DQA10201-DQB10301
MFSALSEGATPQDLNTMLNTV

SEQ ID NO: 4603 - protein, 22 aa, Human immunodeficiency virus 1
  source 1..22: note = HLAs: DQA10201-DQB10301
MFSALSEGATPQDLNTMLNTVG

SEQ ID NO: 4604 - protein, 23 aa, Human immunodeficiency virus 1
  source 1..23: note = HLAs: DQA10102-DQB10501 DQA10201-DQB10301
MFSALSEGATPQDLNTMLNTVGG

SEQ ID NO: 4605 - protein, 24 aa, Human immunodeficiency virus 1
  source 1..24: note = HLAs: DRB1_0404 DRB1_1001 DQA10102-DQB10501 DQA10102-DQB10601 DQA10201-DQB10301
MFSALSEGATPQDLNTMLNTVGGH

SEQ ID NO: 4606 - protein, 25 aa, Human immunodeficiency virus 1
  source 1..25: note = HLAs: DRB1_0404 DRB1_0408 DRB1_1001 DQA10102-DQB10501 DQA10102-DQB10601 DQA10201-DQB10301
MFSALSEGATPQDLNTMLNTVGGHQ

SEQ ID NO: 4607 - protein, 14 aa, Human immunodeficiency virus 1
  source 1..14: note = HLAs: DRB1_0804 DRB1_0806 DRB1_1103 DRB1_1104 DRB1_1304
MIGGIGGFIKVRQY

SEQ ID NO: 4608 - protein, 15 aa, Human immunodeficiency virus 1
  source 1..15: note = HLAs: DRB1_0101 DRB1_0804 DRB1_0806 DRB1_1101 DRB1_1102 DRB1_1103 DRB1_1104 DRB1_1301 DRB1_1304 DRB1_1305 DRB1_1406 DRB1_1501 DRB1_1503 DQA10102-DQB10601 DQA10103-DQB10601 DQA10201-DQB10301
MIGGIGGFIKVRQYD

SEQ ID NO: 4609 - protein, 16 aa, Human immunodeficiency virus 1
  source 1..16: note = HLAs: DRB1_0804 DRB1_0806 DRB1_1103 DRB1_1104 DRB1_1304 DQA10102-DQB10601 DQA10103-DQB10601
MIGGIGGFIKVRQYDQ

SEQ ID NO: 4610 - protein, 14 aa, Human immunodeficiency virus 1
  source 1..14: note = HLAs: DQA10102-DQB10601 DQA10103-DQB10601 DQA10201-DQB10301
MLNTVGGHQAAMQM

SEQ ID NO: 4611 - protein, 15 aa, Human immunodeficiency virus 1
  source 1..15: note = HLAs: DRB1_0101 DRB1_0102 DRB1_1001 DQA10102-DQB10501 DQA10102-DQB10601 DQA10102-DQB10602 DQA10102-DQB10609 DQA10103-DQB10601 DQA10103-DQB10602 DQA10103-DQB10609 DQA10201-DQB10301 DQA10201-DQB10303 DQA10301-DQB10301 DQA10302-DQB10301 DQA10303-DQB10301 DQA10501-DQB10301 DQA10501-DQB10319 DQA10503-DQB10301 DQA10505-DQB10301 DQA10505-DQB10309 DQA10505-DQB10319 DQA10505-DQB10402 DQA10506-DQB10303 DQA10508-DQB10301 DQA10509-DQB10301
MLNTVGGHQAAMQML

SEQ ID NO: 4612 - protein, 16 aa, Human immunodeficiency virus 1
  source 1..16: note = HLAs: DQA10102-DQB10501 DQA10102-DQB10601 DQA10102-DQB10602 DQA10102-DQB10609 DQA10102-DQB10611 DQA10103-DQB10601 DQA10103-DQB10602 DQA10103-DQB10609 DQA10201-DQB10301 DQA10201-DQB10303 DQA10301-DQB10301 DQA10302-DQB10301 DQA10303-DQB10301 DQA10501-DQB10301 DQA10501-DQB10319 DQA10503-DQB10301 DQA10505-DQB10301 DQA10505-DQB10309 DQA10505-DQB10319 DQA10505-DQB10402 DQA10506-DQB10303 DQA10508-DQB10301 DQA10509-DQB10301
MLNTVGGHQAAMQMLK

SEQ ID NO: 4613 - protein, 17 aa, Human immunodeficiency virus 1
  source 1..17: note = HLAs: DRB1_0101 DRB1_1001 DQA10102-DQB10501 DQA10102-DQB10601 DQA10102-DQB10602 DQA10102-DQB10609 DQA10102-DQB10611 DQA10103-DQB10601 DQA10103-DQB10602 DQA10103-DQB10609 DQA10201-DQB10301 DQA10201-DQB10303 DQA10505-DQB10402 DQA10506-DQB10303
MLNTVGGHQAAMQMLKD

SEQ ID NO: 4614 - protein, 18 aa, Human immunodeficiency virus 1
  source 1..18: note = HLAs: DQA10102-DQB10601 DQA10103-DQB10601
MLNTVGGHQAAMQMLKDT

SEQ ID NO: 4615 - protein, 19 aa, Human immunodeficiency virus 1
  source 1..19: note = HLAs: DQA10102-DQB10501 DQA10102-DQB10601 DQA10102-DQB10602 DQA10102-DQB10609 DQA10102-DQB10611 DQA10103-DQB10601 DQA10103-DQB10609 DQA10201-DQB10301 DQA10201-DQB10303
MLNTVGGHQAAMQMLKDTI

SEQ ID NO: 4616 - protein, 20 aa, Human immunodeficiency virus 1
  source 1..20: note = HLAs: DRB1_0101 DRB1_1001 DPA10301-DPB10101 DPA10401-DPB10101 DQA10102-DQB10501 DQA10102-DQB10503 DQA10102-DQB10601 DQA10102-DQB10602 DQA10102-DQB10609 DQA10102-DQB10610 DQA10102-DQB10611 DQA10103-DQB10501 DQA10103-DQB10601 DQA10103-DQB10602 DQA10103-DQB10609 DQA10201-DQB10301 DQA10201-DQB10303 DQA10505-DQB10402 DQA10506-DQB10303
MLNTVGGHQAAMQMLKDTIN

SEQ ID NO: 4617 - protein, 21 aa, Human immunodeficiency virus 1
  source 1..21: note = HLAs: DRB1_1001 DQA10102-DQB10501 DQA10102-DQB10601 DQA10102-DQB10609 DQA10103-DQB10601 DQA10103-DQB10609
MLNTVGGHQAAMQMLKDTINE

SEQ ID NO: 4618 - protein, 22 aa, Human immunodeficiency virus 1
  source 1..22: note = HLAs: DRB1_1001 DPA10301-DPB10101 DPA10401-DPB10101 DQA10102-DQB10501 DQA10102-DQB10601 DQA10102-DQB10609 DQA10103-DQB10501 DQA10103-DQB10601 DQA10103-DQB10609
MLNTVGGHQAAMQMLKDTINEE

SEQ ID NO: 4619 - protein, 23 aa, Human immunodeficiency virus 1
  source 1..23: note = HLAs: DRB1_1001 DPA10301-DPB10101 DPA10401-DPB10101 DQA10102-DQB10501 DQA10102-DQB10503 DQA10102-DQB10601 DQA10102-DQB10609 DQA10103-DQB10501 DQA10103-DQB10601 DQA10103-DQB10609 DQA10201-DQB10301
MLNTVGGHQAAMQMLKDTINEEA

SEQ ID NO: 4620 - protein, 24 aa, Human immunodeficiency virus 1
  source 1..24: note = HLAs: DRB1_1001 DPA10301-DPB10101 DPA10401-DPB10101 DQA10102-DQB10501 DQA10102-DQB10503 DQA10102-DQB10601 DQA10102-DQB10609 DQA10103-DQB10501 DQA10103-DQB10601 DQA10103-DQB10609 DQA10201-DQB10301
MLNTVGGHQAAMQMLKDTINEEAA

SEQ ID NO: 4621 - protein, 25 aa, Human immunodeficiency virus 1
  source 1..25: note = HLAs: DRB1_1001 DPA10301-DPB10101 DPA10401-DPB10101 DQA10102-DQB10501 DQA10102-DQB10503 DQA10102-DQB10601 DQA10102-DQB10609 DQA10103-DQB10501 DQA10103-DQB10601 DQA10103-DQB10609 DQA10201-DQB10301
MLNTVGGHQAAMQMLKDTINEEAAE

SEQ ID NO: 4622 - protein, 14 aa, Human immunodeficiency virus 1
  source 1..14: note = HLAs: DRB1_1102 DRB1_1103 DRB1_1104 DRB1_1301 DRB1_1304 DRB1_1406
MNKELKKIIGQVRD

SEQ ID NO: 4623 - protein, 15 aa, Human immunodeficiency virus 1
  source 1..15: note = HLAs: DRB1_0101 DRB1_0102 DRB1_0804 DRB1_0806 DRB1_1101 DRB1_1102 DRB1_1103 DRB1_1104 DRB1_1202 DRB1_1301 DRB1_1304 DRB1_1305 DRB1_1406 DRB1_1601
MNKELKKIIGQVRDQ

SEQ ID NO: 4624 - protein, 16 aa, Human immunodeficiency virus 1
  source 1..16: note = HLAs: DRB1_0804 DRB1_0806 DRB1_1102 DRB1_1103 DRB1_1104 DRB1_1301 DRB1_1304 DRB1_1406 DRB1_1601
MNKELKKIIGQVRDQA

SEQ ID NO: 4625 - protein, 17 aa, Human immunodeficiency virus 1
  source 1..17: note = HLAs: DRB1_0101 DRB1_0804 DRB1_0806 DRB1_1101 DRB1_1102 DRB1_1103 DRB1_1104 DRB1_1301 DRB1_1304 DRB1_1305 DRB1_1406 DRB1_1601
MNKELKKIIGQVRDQAE

SEQ ID NO: 4626 - protein, 18 aa, Human immunodeficiency virus 1
  source 1..18: note = HLAs: DRB1_1102 DRB1_1103 DRB1_1104 DRB1_1301 DRB1_1406
MNKELKKIIGQVRDQAEH

SEQ ID NO: 4627 - protein, 19 aa, Human immunodeficiency virus 1
  source 1..19: note = HLAs: DRB1_0804 DRB1_0806 DRB1_1101 DRB1_1102 DRB1_1103 DRB1_1104 DRB1_1301 DRB1_1304 DRB1_1305 DRB1_1406 DQA10102-DQB10501 DQA10102-DQB10604 DQA10102-DQB10609
MNKELKKIIGQVRDQAEHL

SEQ ID NO: 4628 - protein, 16 aa, Human immunodeficiency virus 1
  source 1..16: note = HLAs: DQA10102-DQB10501 DQA10102-DQB10609
MQMLKDTINEEAAEWD

SEQ ID NO: 4629 - protein, 13 aa, Human immunodeficiency virus 1
  source 1..13: note = HLAs: DQA10201-DQB10301 DQA10501-DQB10301 DQA10501-DQB10319 DQA10503-DQB10301 DQA10505-DQB10301 DQA10505-DQB10309 DQA10505-DQB10319 DQA10508-DQB10301 DQA10509-DQB10301 DQA10601-DQB10301
MREPRGSDIAGTT

SEQ ID NO: 4630 - protein, 14 aa, Human immunodeficiency virus 1
  source 1..14: note = HLAs: DQA10201-DQB10301 DQA10301-DQB10301 DQA10302-DQB10301 DQA10303-DQB10301 DQA10401-DQB10301 DQA10401-DQB10319 DQA10501-DQB10301 DQA10501-DQB10319 DQA10503-DQB10301 DQA10505-DQB10301 DQA10505-DQB10309 DQA10505-DQB10319 DQA10508-DQB10301 DQA10509-DQB10301 DQA10601-DQB10301
MREPRGSDIAGTTS

SEQ ID NO: 4631 - protein, 15 aa, Human immunodeficiency virus 1
  source 1..15: note = HLAs: DQA10102-DQB10601 DQA10201-DQB10301 DQA10201-DQB10303 DQA10301-DQB10301 DQA10302-DQB10301 DQA10303-DQB10301 DQA10401-DQB10301 DQA10401-DQB10319 DQA10501-DQB10301 DQA10501-DQB10319 DQA10503-DQB10301 DQA10505-DQB10301 DQA10505-DQB10309 DQA10505-DQB10319 DQA10506-DQB10303 DQA10508-DQB10301 DQA10509-DQB10301 DQA10601-DQB10301
MREPRGSDIAGTTST

SEQ ID NO: 4632 - protein, 16 aa, Human immunodeficiency virus 1
  source 1..16: note = HLAs: DQA10102-DQB10601 DQA10201-DQB10301 DQA10201-DQB10303 DQA10301-DQB10301 DQA10302-DQB10301 DQA10303-DQB10301 DQA10401-DQB10301 DQA10401-DQB10319 DQA10501-DQB10301 DQA10501-DQB10319 DQA10503-DQB10301 DQA10505-DQB10301 DQA10505-DQB10309 DQA10505-DQB10319 DQA10506-DQB10303 DQA10508-DQB10301 DQA10509-DQB10301 DQA10601-DQB10301
MREPRGSDIAGTTSTL

SEQ ID NO: 4633 - protein, 17 aa, Human immunodeficiency virus 1
  source 1..17: note = HLAs: DQA10102-DQB10601 DQA10103-DQB10601 DQA10201-DQB10301 DQA10201-DQB10303 DQA10301-DQB10301 DQA10302-DQB10301 DQA10303-DQB10301 DQA10401-DQB10301 DQA10401-DQB10319 DQA10501-DQB10301 DQA10501-DQB10319 DQA10503-DQB10301 DQA10505-DQB10301 DQA10505-DQB10309 DQA10505-DQB10319 DQA10506-DQB10303 DQA10508-DQB10301 DQA10509-DQB10301 DQA10601-DQB10301
MREPRGSDIAGTTSTLQ

SEQ ID NO: 4634 - protein, 18 aa, Human immunodeficiency virus 1
  source 1..18: note = HLAs: DQA10201-DQB10301 DQA10301-DQB10301 DQA10302-DQB10301 DQA10303-DQB10301 DQA10401-DQB10301 DQA10401-DQB10319 DQA10501-DQB10301 DQA10501-DQB10319 DQA10503-DQB10301 DQA10505-DQB10301 DQA10505-DQB10309 DQA10505-DQB10319 DQA10508-DQB10301 DQA10509-DQB10301 DQA10601-DQB10301
MREPRGSDIAGTTSTLQE

SEQ ID NO: 4635 - protein, 19 aa, Human immunodeficiency virus 1
  source 1..19: note = HLAs: DQA10102-DQB10601 DQA10103-DQB10601 DQA10201-DQB10301 DQA10201-DQB10303 DQA10301-DQB10301 DQA10302-DQB10301 DQA10303-DQB10301 DQA10401-DQB10301 DQA10401-DQB10319 DQA10501-DQB10301 DQA10501-DQB10319 DQA10503-DQB10301 DQA10505-DQB10301 DQA10505-DQB10309 DQA10505-DQB10319 DQA10506-DQB10303 DQA10508-DQB10301 DQA10509-DQB10301 DQA10601-DQB10301
MREPRGSDIAGTTSTLQEQ

SEQ ID NO: 4636 - protein, 20 aa, Human immunodeficiency virus 1
  source 1..20: note = HLAs: DQA10102-DQB10601 DQA10102-DQB10611 DQA10103-DQB10601 DQA10201-DQB10301 DQA10201-DQB10303 DQA10301-DQB10301 DQA10302-DQB10301 DQA10303-DQB10301 DQA10401-DQB10301 DQA10401-DQB10319 DQA10501-DQB10301 DQA10501-DQB10319 DQA10503-DQB10301 DQA10505-DQB10301 DQA10505-DQB10309 DQA10505-DQB10319 DQA10506-DQB10303 DQA10508-DQB10301 DQA10509-DQB10301 DQA10601-DQB10301
MREPRGSDIAGTTSTLQEQI

SEQ ID NO: 4637 - protein, 15 aa, Human immunodeficiency virus 1
  source 1..15: note = HLAs: DRB1_0405 DRB1_0410 DRB1_1001 DRB1_1114 DRB1_1302 DQA10102-DQB10501
MTDTLLVQNANPDCK

SEQ ID NO: 4638 - protein, 16 aa, Human immunodeficiency virus 1
  source 1..16: note = HLAs: DRB1_0405 DQA10102-DQB10501
MTDTLLVQNANPDCKT

SEQ ID NO: 4639 - protein, 17 aa, Human immunodeficiency virus 1
  source 1..17: note = HLAs: DQA10102-DQB10501
MTDTLLVQNANPDCKTI

SEQ ID NO: 4640 - protein, 14 aa, Human immunodeficiency virus 1
  source 1..14: note = HLAs: DRB1_1001
NAWVKVVEEKAFSP

SEQ ID NO: 4641 - protein, 15 aa, Human immunodeficiency virus 1
  source 1..15: note = HLAs: DRB1_0101 DRB1_1001
NAWVKVVEEKAFSPE

SEQ ID NO: 4642 - protein, 16 aa, Human immunodeficiency virus 1
  source 1..16: note = HLAs: DRB1_1001 DPA10301-DPB10101 DPA10401-DPB10101
NAWVKVVEEKAFSPEV

SEQ ID NO: 4643 - protein, 17 aa, Human immunodeficiency virus 1
  source 1..17: note = HLAs: DRB1_1001 DPA10103-DPB11501 DPA10104-DPB11501 DPA10301-DPB10101 DPA10301-DPB10201 DPA10301-DPB10202 DPA10401-DPB10101 DQA10102-DQB10501
NAWVKVVEEKAFSPEVI

SEQ ID NO: 4644 - protein, 19 aa, Human immunodeficiency virus 1
  source 1..19: note = HLAs: DRB1_1001 DPA10301-DPB10101 DPA10301-DPB10201 DPA10301-DPB10202 DPA10401-DPB10101 DQA10102-DQB10501
NAWVKVVEEKAFSPEVIPM

SEQ ID NO: 4645 - protein, 20 aa, Human immunodeficiency virus 1
  source 1..20: note = HLAs: DRB1_0101 DRB1_1001 DPA10103-DPB10101 DPA10103-DPB11501 DPA10103-DPB13101 DPA10103-DPB15001 DPA10104-DPB10101 DPA10104-DPB11501 DPA10105-DPB10101 DPA10105-DPB15001 DPA10202-DPB10101 DPA10202-DPB110601 DPA10202-DPB11901 DPA10202-DPB13101 DPA10202-DPB16501 DPA10301-DPB10101 DPA10301-DPB10201 DPA10301-DPB10202 DPA10301-DPB10401 DPA10301-DPB110601 DPA10301-DPB11801 DPA10301-DPB12301 DPA10301-DPB13901 DPA10301-DPB14001 DPA10301-DPB16501 DPA10401-DPB10101 DPA10401-DPB10201 DPA10401-DPB10202 DPA10401-DPB10501 DQA10102-DQB10501 DQA10102-DQB10503 DQA10102-DQB10609 DQA10103-DQB10501 DQA10103-DQB10609 DQA10505-DQB10402
NAWVKVVEEKAFSPEVIPMF

SEQ ID NO: 4646 - protein, 14 aa, Human immunodeficiency virus 1
  source 1..14: note = HLAs: DRB1_0101 DRB1_0102 DRB1_0806 DRB1_1001
NDIQKLVGKLNWAS

SEQ ID NO: 4647 - protein, 15 aa, Human immunodeficiency virus 1
  source 1..15: note = HLAs: DRB1_0101 DRB1_0102 DRB1_0402 DRB1_0404 DRB1_0410 DRB1_0801 DRB1_0802 DRB1_0804 DRB1_0806 DRB1_0809 DRB1_1001 DRB1_1101 DRB1_1102 DRB1_1103 DRB1_1104 DRB1_1202 DRB1_1301 DRB1_1304 DRB1_1305 DRB1_1406 DRB1_1501 DRB1_1503 DRB1_1601
NDIQKLVGKLNWASQ

SEQ ID NO: 4648 - protein, 16 aa, Human immunodeficiency virus 1
  source 1..16: note = HLAs: DRB1_0101 DRB1_0102 DRB1_0801 DRB1_0802 DRB1_0804 DRB1_0806 DRB1_0809 DRB1_0813 DRB1_1001 DRB1_1102 DRB1_1103 DRB1_1104 DRB1_1114 DRB1_1301 DRB1_1302 DRB1_1304 DRB1_1406 DRB1_1501 DQA10102-DQB10501
NDIQKLVGKLNWASQI

SEQ ID NO: 4649 - protein, 17 aa, Human immunodeficiency virus 1
  source 1..17: note = HLAs: DRB1_0101 DRB1_0102 DRB1_0402 DRB1_0404 DRB1_0410 DRB1_0801 DRB1_0802 DRB1_0804 DRB1_0806 DRB1_0809 DRB1_0813 DRB1_1001 DRB1_1101 DRB1_1102 DRB1_1103 DRB1_1104 DRB1_1114 DRB1_1301 DRB1_1302 DRB1_1304 DRB1_1305 DRB1_1406 DRB1_1501 DRB1_1503 DQA10102-DQB10501 DQA10103-DQB10501
NDIQKLVGKLNWASQIY

SEQ ID NO: 4650 - protein, 18 aa, Human immunodeficiency virus 1
  source 1..18: note = HLAs: DRB1_1001 DQA10102-DQB10501
NDIQKLVGKLNWASQIYP

SEQ ID NO: 4651 - protein, 19 aa, Human immunodeficiency virus 1
  source 1..19: note = HLAs: DRB1_0101 DRB1_0102 DRB1_0804 DRB1_0806 DRB1_1001 DRB1_1102 DRB1_1104 DRB1_1114 DRB1_1301 DRB1_1302 DRB1_1304 DRB1_1501 DQA10101-DQB10601 DQA10102-DQB10501 DQA10102-DQB10503 DQA10102-DQB10601 DQA10102-DQB10602 DQA10102-DQB10609 DQA10102-DQB10610 DQA10102-DQB10611 DQA10103-DQB10501 DQA10103-DQB10601 DQA10103-DQB10602 DQA10103-DQB10609 DQA10201-DQB10301
NDIQKLVGKLNWASQIYPG

SEQ ID NO: 4652 - protein, 20 aa, Human immunodeficiency virus 1
  source 1..20: note = HLAs: DRB1_0101 DRB1_0102 DRB1_0404 DRB1_0410 DRB1_0701 DRB1_0801 DRB1_0802 DRB1_0804 DRB1_0806 DRB1_0809 DRB1_0813 DRB1_0901 DRB1_1001 DRB1_1101 DRB1_1102 DRB1_1103 DRB1_1104 DRB1_1114 DRB1_1301 DRB1_1302 DRB1_1304 DRB1_1305 DRB1_1406 DRB1_1501 DRB1_1502 DRB1_1503 DRB1_1601 DRB1_1602 DPA10103-DPB10101 DPA10103-DPB11501 DPA10103-DPB15001 DPA10104-DPB10101 DPA10104-DPB11501 DPA10105-DPB10101 DPA10105-DPB15001 DPA10202-DPB10101 DPA10202-DPB10202 DPA10202-DPB110601 DPA10202-DPB11901 DPA10301-DPB10101 DPA10301-DPB10201 DPA10301-DPB10202 DPA10301-DPB10401 DPA10301-DPB110601 DPA10301-DPB11801 DPA10301-DPB12301 DPA10301-DPB13901 DPA10301-DPB14001 DPA10301-DPB16501 DPA10401-DPB10101 DPA10401-DPB10201 DPA10401-DPB10202 DPA10401-DPB10501 DQA10101-DQB10601 DQA10101-DQB10602 DQA10102-DQB10501 DQA10102-DQB10503 DQA10102-DQB10601 DQA10102-DQB10602 DQA10102-DQB10603 DQA10102-DQB10609 DQA10102-DQB10610 DQA10102-DQB10611 DQA10102-DQB10614 DQA10103-DQB10501 DQA10103-DQB10503 DQA10103-DQB10601; note = HLAs: DQA10103-DQB10602 DQA10103-DQB10603 DQA10103-DQB10608 DQA10103-DQB10609 DQA10103-DQB10614 DQA10104-DQB10602 DQA10105-DQB10602 DQA10201-DQB10301 DQA10201-DQB10303 DQA10301-DQB10301 DQA10302-DQB10301 DQA10303-DQB10301 DQA10501-DQB10301 DQA10501-DQB10319 DQA10503-DQB10301 DQA10505-DQB10301 DQA10505-DQB10309 DQA10505-DQB10319 DQA10505-DQB10402 DQA10508-DQB10301 DQA10509-DQB10301 DQA10601-DQB10301
NDIQKLVGKLNWASQIYPGI

SEQ ID NO: 4653 - protein, 21 aa, Human immunodeficiency virus 1
  source 1..21: note = HLAs: DRB1_0101 DRB1_0801 DRB1_0804 DRB1_0806 DRB1_1001 DRB1_1102 DRB1_1104 DRB1_1114 DRB1_1301 DRB1_1302 DRB1_1304 DRB1_1406 DRB1_1501 DPA10103-DPB11501 DPA10104-DPB11501 DPA10202-DPB10101 DPA10301-DPB10101 DPA10301-DPB10201 DPA10301-DPB10202 DPA10301-DPB10401 DPA10301-DPB110601 DPA10301-DPB11801 DPA10301-DPB12301 DPA10301-DPB13901 DPA10301-DPB14001 DPA10401-DPB10101 DPA10401-DPB10201 DPA10401-DPB10202 DQA10101-DQB10601 DQA10102-DQB10501 DQA10102-DQB10503 DQA10102-DQB10601 DQA10102-DQB10602 DQA10102-DQB10609 DQA10102-DQB10610 DQA10102-DQB10611 DQA10103-DQB10501 DQA10103-DQB10601 DQA10103-DQB10602 DQA10103-DQB10609 DQA10201-DQB10301
NDIQKLVGKLNWASQIYPGIK

SEQ ID NO: 4654 - protein, 22 aa, Human immunodeficiency virus 1
  source 1..22: note = HLAs: DRB1_0101 DRB1_0102 DRB1_0404 DRB1_0410 DRB1_0801 DRB1_0804 DRB1_0806 DRB1_0813 DRB1_0901 DRB1_1001 DRB1_1102 DRB1_1104 DRB1_1114 DRB1_1301 DRB1_1302 DRB1_1304 DRB1_1406 DRB1_1501 DRB1_1502 DRB1_1503 DRB1_1602 DPA10103-DPB10101 DPA10103-DPB11501 DPA10104-DPB10101 DPA10104-DPB11501 DPA10105-DPB10101 DPA10202-DPB10101 DPA10301-DPB10101 DPA10301-DPB10201 DPA10301-DPB10202 DPA10301-DPB10401 DPA10301-DPB110601 DPA10301-DPB11801 DPA10301-DPB12301 DPA10301-DPB13901 DPA10301-DPB14001 DPA10301-DPB16501 DPA10401-DPB10101 DPA10401-DPB10201 DPA10401-DPB10202 DQA10101-DQB10601 DQA10101-DQB10602 DQA10102-DQB10501 DQA10102-DQB10503 DQA10102-DQB10601 DQA10102-DQB10602 DQA10102-DQB10603 DQA10102-DQB10609 DQA10102-DQB10610 DQA10102-DQB10611 DQA10102-DQB10614 DQA10103-DQB10501 DQA10103-DQB10503 DQA10103-DQB10601 DQA10103-DQB10602 DQA10103-DQB10603 DQA10103-DQB10608 DQA10103-DQB10609 DQA10103-DQB10614 DQA10104-DQB10602 DQA10105-DQB10602 DQA10201-DQB10301 DQA10501-DQB10301 DQA10501-DQB10319; note = HLAs: DQA10503-DQB10301 DQA10505-DQB10301 DQA10505-DQB10309 DQA10505-DQB10319 DQA10508-DQB10301 DQA10509-DQB10301
NDIQKLVGKLNWASQIYPGIKV

SEQ ID NO: 4655 - protein, 14 aa, Human immunodeficiency virus 1
  source 1..14: note = HLAs: DRB1_0101 DRB1_0102
NEQVDKLVSSGIRK

SEQ ID NO: 4656 - protein, 15 aa, Human immunodeficiency virus 1
  source 1..15: note = HLAs: DRB1_0101 DRB1_0102 DRB1_0404 DRB1_0410 DRB1_0701 DRB1_0801 DRB1_0804 DRB1_0806 DRB1_0813 DRB1_0901 DRB1_1001 DRB1_1102 DRB1_1103 DRB1_1104 DRB1_1114 DRB1_1201 DRB1_1301 DRB1_1302 DRB1_1304 DRB1_1401 DRB1_1402 DRB1_1404 DRB1_1406 DRB1_1454 DRB1_1501 DRB1_1503 DRB1_1601 DRB1_1602 DPA10103-DPB10201 DPA10103-DPB10202 DPA10103-DPB11501 DPA10103-DPB13401 DPA10103-DPB14801 DPA10103-DPB15001 DPA10104-DPB11501 DPA10105-DPB15001 DPA10202-DPB10101 DPA10202-DPB10201 DPA10202-DPB10202 DPA10202-DPB110601 DPA10202-DPB11801 DPA10202-DPB11901 DPA10202-DPB13101 DPA10301-DPB10101 DPA10301-DPB10201 DPA10301-DPB10202 DPA10301-DPB10401 DPA10301-DPB110601 DPA10301-DPB11801 DPA10301-DPB12301 DPA10301-DPB13901 DPA10301-DPB14001 DPA10401-DPB10101 DPA10401-DPB10201 DPA10401-DPB10202 DQA10102-DQB10501 DQA10102-DQB10601 DQA10103-DQB10601 DQA10103-DQB10602 DQA10103-DQB10609 DQA10201-DQB10301 DQA10201-DQB10303 DQA10505-DQB10402
NEQVDKLVSSGIRKV

SEQ ID NO: 4657 - protein, 16 aa, Human immunodeficiency virus 1
  source 1..16: note = HLAs: DRB1_0101 DRB1_0102 DRB1_0701 DRB1_0804 DRB1_0806 DRB1_0813 DRB1_0901 DRB1_1001 DRB1_1102 DRB1_1103 DRB1_1104 DRB1_1114 DRB1_1301 DRB1_1302 DRB1_1304 DRB1_1401 DRB1_1404 DRB1_1406 DRB1_1454 DRB1_1501 DRB1_1602 DPA10103-DPB10101 DPA10103-DPB10201 DPA10103-DPB10202 DPA10103-DPB11501 DPA10103-DPB11901 DPA10103-DPB13401 DPA10103-DPB14801 DPA10103-DPB15001 DPA10104-DPB10101 DPA10104-DPB11501 DPA10105-DPB10101 DPA10105-DPB15001 DPA10106-DPB10101 DPA10201-DPB10101 DPA10201-DPB110601 DPA10201-DPB11501 DPA10201-DPB11901 DPA10202-DPB10101 DPA10202-DPB10201 DPA10202-DPB10202 DPA10202-DPB10501 DPA10202-DPB110601 DPA10202-DPB11801 DPA10202-DPB11901 DPA10202-DPB13101 DPA10202-DPB13801 DPA10202-DPB15501 DPA10202-DPB16501 DPA10301-DPB10101 DPA10301-DPB10201 DPA10301-DPB10202 DPA10301-DPB10401 DPA10301-DPB10402 DPA10301-DPB110501 DPA10301-DPB110601 DPA10301-DPB11801 DPA10301-DPB12301 DPA10301-DPB13901 DPA10301-DPB14001 DPA10301-DPB14901 DPA10301-DPB15501 DPA10301-DPB16501 DPA10301-DPB17501; note = HLAs: DPA10301-DPB18001 DPA10401-DPB10101 DPA10401-DPB10201 DPA10401-DPB10202 DPA10401-DPB10501 DQA10102-DQB10501 DQA10102-DQB10601 DQA10102-DQB10602 DQA10102-DQB10609 DQA10102-DQB10611 DQA10103-DQB10501 DQA10103-DQB10601 DQA10103-DQB10602 DQA10103-DQB10609 DQA10201-DQB10301 DQA10201-DQB10303 DQA10501-DQB10301 DQA10501-DQB10319 DQA10503-DQB10301 DQA10505-DQB10301 DQA10505-DQB10309 DQA10505-DQB10319 DQA10505-DQB10402 DQA10506-DQB10303 DQA10508-DQB10301 DQA10509-DQB10301
NEQVDKLVSSGIRKVL

SEQ ID NO: 4658 - protein, 17 aa, Human immunodeficiency virus 1
  source 1..17: note = HLAs: DRB1_0101 DRB1_0102 DRB1_0404 DRB1_0410 DRB1_0701 DRB1_0801 DRB1_0802 DRB1_0804 DRB1_0806 DRB1_0809 DRB1_0813 DRB1_0901 DRB1_1001 DRB1_1101 DRB1_1102 DRB1_1103 DRB1_1104 DRB1_1114 DRB1_1201 DRB1_1301 DRB1_1302 DRB1_1303 DRB1_1304 DRB1_1305 DRB1_1312 DRB1_1401 DRB1_1402 DRB1_1403 DRB1_1404 DRB1_1405 DRB1_1406 DRB1_1454 DRB1_1501 DRB1_1503 DRB1_1601 DRB1_1602 DPA10103-DPB10101 DPA10103-DPB10201 DPA10103-DPB10202 DPA10103-DPB10401 DPA10103-DPB112601 DPA10103-DPB11501 DPA10103-DPB11601 DPA10103-DPB11801 DPA10103-DPB11901 DPA10103-DPB12301 DPA10103-DPB13101 DPA10103-DPB13401 DPA10103-DPB13901 DPA10103-DPB14001 DPA10103-DPB14101 DPA10103-DPB14801 DPA10103-DPB15001 DPA10103-DPB15901 DPA10104-DPB10101 DPA10104-DPB11501 DPA10105-DPB10101 DPA10105-DPB10401 DPA10105-DPB11801 DPA10105-DPB15001 DPA10106-DPB10101 DPA10201-DPB10101 DPA10201-DPB10201 DPA10201-DPB10202 DPA10201-DPB110601 DPA10201-DPB11501 DPA10201-DPB11601 DPA10201-DPB11901 DPA10202-DPB10101 DPA10202-DPB10201 DPA10202-DPB10202; note = HLAs: DPA10202-DPB10401 DPA10202-DPB10501 DPA10202-DPB10901 DPA10202-DPB110601 DPA10202-DPB11401 DPA10202-DPB11801 DPA10202-DPB11901 DPA10202-DPB13101 DPA10202-DPB13801 DPA10202-DPB15501 DPA10202-DPB16501 DPA10301-DPB10101 DPA10301-DPB10201 DPA10301-DPB10202 DPA10301-DPB10401 DPA10301-DPB10402 DPA10301-DPB110501 DPA10301-DPB110601 DPA10301-DPB11801 DPA10301-DPB12301 DPA10301-DPB13901 DPA10301-DPB14001 DPA10301-DPB14901 DPA10301-DPB15501 DPA10301-DPB16501 DPA10301-DPB17501 DPA10301-DPB18001 DPA10401-DPB10101 DPA10401-DPB10201 DPA10401-DPB10202 DPA10401-DPB10402 DPA10401-DPB10501 DPA10401-DPB110501 DPA10401-DPB14901 DQA10102-DQB10501 DQA10102-DQB10601 DQA10102-DQB10602 DQA10102-DQB10609 DQA10102-DQB10611 DQA10103-DQB10501 DQA10103-DQB10601 DQA10103-DQB10602 DQA10103-DQB10608 DQA10103-DQB10609 DQA10201-DQB10301 DQA10201-DQB10303 DQA10505-DQB10402
NEQVDKLVSSGIRKVLF

SEQ ID NO: 4659 - protein, 18 aa, Human immunodeficiency virus 1
  source 1..18: note = HLAs: DRB1_0101 DRB1_0102 DRB1_0701 DRB1_0813 DRB1_0901 DRB1_1001 DRB1_1102 DRB1_1103 DRB1_1114 DRB1_1301 DRB1_1302 DRB1_1304 DRB1_1401 DRB1_1404 DRB1_1406 DRB1_1454 DPA10103-DPB10101 DPA10103-DPB10201 DPA10103-DPB10202 DPA10103-DPB11501 DPA10103-DPB11901 DPA10103-DPB13401 DPA10103-DPB14801 DPA10103-DPB15001 DPA10104-DPB10101 DPA10104-DPB11501 DPA10105-DPB10101 DPA10105-DPB15001 DPA10106-DPB10101 DPA10201-DPB10101 DPA10201-DPB110601 DPA10201-DPB11501 DPA10201-DPB11901 DPA10202-DPB10101 DPA10202-DPB10201 DPA10202-DPB10202 DPA10202-DPB110601 DPA10202-DPB11801 DPA10202-DPB11901 DPA10202-DPB13101 DPA10202-DPB16501 DPA10301-DPB10101 DPA10301-DPB10201 DPA10301-DPB10202 DPA10301-DPB10401 DPA10301-DPB10402 DPA10301-DPB110501 DPA10301-DPB110601 DPA10301-DPB11801 DPA10301-DPB12301 DPA10301-DPB13901 DPA10301-DPB14001 DPA10301-DPB14901 DPA10301-DPB16501 DPA10301-DPB17501 DPA10301-DPB18001 DPA10401-DPB10101 DPA10401-DPB10201 DPA10401-DPB10202 DQA10102-DQB10501 DQA10102-DQB10601 DQA10102-DQB10602; note = HLAs: DQA10102-DQB10609 DQA10102-DQB10611 DQA10103-DQB10501 DQA10103-DQB10601 DQA10103-DQB10602 DQA10103-DQB10609 DQA10201-DQB10301
NEQVDKLVSSGIRKVLFL

SEQ ID NO: 4660 - protein, 19 aa, Human immunodeficiency virus 1
  source 1..19: note = HLAs: DRB1_0101 DRB1_0102 DRB1_0404 DRB1_0410 DRB1_0701 DRB1_0801 DRB1_0804 DRB1_0806 DRB1_0813 DRB1_0901 DRB1_1001 DRB1_1101 DRB1_1102 DRB1_1103 DRB1_1104 DRB1_1114 DRB1_1201 DRB1_1301 DRB1_1302 DRB1_1303 DRB1_1304 DRB1_1305 DRB1_1401 DRB1_1402 DRB1_1404 DRB1_1405 DRB1_1406 DRB1_1454 DRB1_1501 DRB1_1502 DRB1_1503 DRB1_1602 DPA10103-DPB10101 DPA10103-DPB10201 DPA10103-DPB10202 DPA10103-DPB10401 DPA10103-DPB112601 DPA10103-DPB11501 DPA10103-DPB11601 DPA10103-DPB11801 DPA10103-DPB11901 DPA10103-DPB12301 DPA10103-DPB13101 DPA10103-DPB13401 DPA10103-DPB13901 DPA10103-DPB14001 DPA10103-DPB14101 DPA10103-DPB14801 DPA10103-DPB15001 DPA10104-DPB10101 DPA10104-DPB11501 DPA10105-DPB10101 DPA10105-DPB10401 DPA10105-DPB11801 DPA10105-DPB15001 DPA10106-DPB10101 DPA10201-DPB10101 DPA10201-DPB10201 DPA10201-DPB10202 DPA10201-DPB110601 DPA10201-DPB11501 DPA10201-DPB11601 DPA10201-DPB11901 DPA10202-DPB10101 DPA10202-DPB10201 DPA10202-DPB10202 DPA10202-DPB10401 DPA10202-DPB10501 DPA10202-DPB10901; note = HLAs: DPA10202-DPB110601 DPA10202-DPB11801 DPA10202-DPB11901 DPA10202-DPB13101 DPA10202-DPB13801 DPA10202-DPB15501 DPA10202-DPB16501 DPA10301-DPB10101 DPA10301-DPB10201 DPA10301-DPB10202 DPA10301-DPB10401 DPA10301-DPB10402 DPA10301-DPB110501 DPA10301-DPB110601 DPA10301-DPB11801 DPA10301-DPB12301 DPA10301-DPB13901 DPA10301-DPB14001 DPA10301-DPB14901 DPA10301-DPB15501 DPA10301-DPB16501 DPA10301-DPB17501 DPA10301-DPB18001 DPA10401-DPB10101 DPA10401-DPB10201 DPA10401-DPB10202 DPA10401-DPB10402 DPA10401-DPB10501 DPA10401-DPB110501 DPA10401-DPB14901 DQA10102-DQB10501 DQA10102-DQB10503 DQA10102-DQB10601 DQA10102-DQB10602 DQA10102-DQB10609 DQA10102-DQB10611 DQA10103-DQB10501 DQA10103-DQB10601 DQA10103-DQB10602 DQA10103-DQB10608 DQA10103-DQB10609 DQA10201-DQB10301 DQA10201-DQB10303 DQA10505-DQB10402
NEQVDKLVSSGIRKVLFLD

SEQ ID NO: 4661 - protein, 20 aa, Human immunodeficiency virus 1
  source 1..20: note = HLAs: DRB1_0101 DRB1_0102 DRB1_0404 DRB1_0410 DRB1_0701 DRB1_0801 DRB1_0802 DRB1_0803 DRB1_0804 DRB1_0806 DRB1_0809 DRB1_0813 DRB1_0901 DRB1_1001 DRB1_1101 DRB1_1102 DRB1_1103 DRB1_1104 DRB1_1114 DRB1_1201 DRB1_1202 DRB1_1301 DRB1_1302 DRB1_1303 DRB1_1304 DRB1_1305 DRB1_1312 DRB1_1401 DRB1_1402 DRB1_1403 DRB1_1404 DRB1_1405 DRB1_1406 DRB1_1454 DRB1_1501 DRB1_1502 DRB1_1503 DRB1_1601 DRB1_1602 DPA10103-DPB10101 DPA10103-DPB10201 DPA10103-DPB10202 DPA10103-DPB10401 DPA10103-DPB10402 DPA10103-DPB10501 DPA10103-DPB110501 DPA10103-DPB112601 DPA10103-DPB11501 DPA10103-DPB11601 DPA10103-DPB11801 DPA10103-DPB11901 DPA10103-DPB12301 DPA10103-DPB13101 DPA10103-DPB13401 DPA10103-DPB13901 DPA10103-DPB14001 DPA10103-DPB14101 DPA10103-DPB14801 DPA10103-DPB14901 DPA10103-DPB15001 DPA10103-DPB15101 DPA10103-DPB15501 DPA10103-DPB15901 DPA10103-DPB18001 DPA10104-DPB10101 DPA10104-DPB11501 DPA10105-DPB10101 DPA10105-DPB10401 DPA10105-DPB11801 DPA10105-DPB15001 DPA10106-DPB10101 DPA10201-DPB10101; note = HLAs: DPA10201-DPB10201 DPA10201-DPB10202 DPA10201-DPB10501 DPA10201-DPB110601 DPA10201-DPB11501 DPA10201-DPB11601 DPA10201-DPB11801 DPA10201-DPB11901 DPA10201-DPB13401 DPA10202-DPB10101 DPA10202-DPB10201 DPA10202-DPB10202 DPA10202-DPB10401 DPA10202-DPB10402 DPA10202-DPB10501 DPA10202-DPB10901 DPA10202-DPB110001 DPA10202-DPB110501 DPA10202-DPB110601 DPA10202-DPB11101 DPA10202-DPB11301 DPA10202-DPB113101 DPA10202-DPB11401 DPA10202-DPB11701 DPA10202-DPB11801 DPA10202-DPB11901 DPA10202-DPB12101 DPA10202-DPB12901 DPA10202-DPB13001 DPA10202-DPB13101 DPA10202-DPB13801 DPA10202-DPB15501 DPA10202-DPB16501 DPA10301-DPB10101 DPA10301-DPB10201 DPA10301-DPB10202 DPA10301-DPB10401 DPA10301-DPB10402 DPA10301-DPB10901 DPA10301-DPB110501 DPA10301-DPB110601 DPA10301-DPB11101 DPA10301-DPB11301 DPA10301-DPB11701 DPA10301-DPB11801 DPA10301-DPB12301 DPA10301-DPB13901 DPA10301-DPB14001 DPA10301-DPB14901 DPA10301-DPB15501 DPA10301-DPB16501 DPA10301-DPB17501 DPA10301-DPB18001 DPA10401-DPB10101; note = HLAs: DPA10401-DPB10201 DPA10401-DPB10202 DPA10401-DPB10301 DPA10401-DPB10402 DPA10401-DPB10501 DPA10401-DPB110501 DPA10401-DPB11301 DPA10401-DPB113301 DPA10401-DPB11401 DPA10401-DPB14901 DQA10102-DQB10501 DQA10102-DQB10503 DQA10102-DQB10601 DQA10102-DQB10602 DQA10102-DQB10609 DQA10102-DQB10611 DQA10103-DQB10501 DQA10103-DQB10503 DQA10103-DQB10601 DQA10103-DQB10602 DQA10103-DQB10604 DQA10103-DQB10608 DQA10103-DQB10609 DQA10201-DQB10301 DQA10201-DQB10303 DQA10505-DQB10402 DQA10506-DQB10303
NEQVDKLVSSGIRKVLFLDG

SEQ ID NO: 4662 - protein, 21 aa, Human immunodeficiency virus 1
  source 1..21: note = HLAs: DRB1_0101 DRB1_0102 DRB1_0404 DRB1_0410 DRB1_0701 DRB1_0801 DRB1_0804 DRB1_0806 DRB1_0813 DRB1_0901 DRB1_1001 DRB1_1101 DRB1_1102 DRB1_1103 DRB1_1104 DRB1_1114 DRB1_1201 DRB1_1301 DRB1_1302 DRB1_1303 DRB1_1304 DRB1_1305 DRB1_1312 DRB1_1401 DRB1_1402 DRB1_1404 DRB1_1405 DRB1_1406 DRB1_1454 DRB1_1501 DRB1_1602 DPA10103-DPB10101 DPA10103-DPB10201 DPA10103-DPB10202 DPA10103-DPB10501 DPA10103-DPB11501 DPA10103-DPB11601 DPA10103-DPB11801 DPA10103-DPB11901 DPA10103-DPB13101 DPA10103-DPB13401 DPA10103-DPB14001 DPA10103-DPB14101 DPA10103-DPB14801 DPA10103-DPB15001 DPA10104-DPB10101 DPA10104-DPB11501 DPA10105-DPB10101 DPA10105-DPB11801 DPA10105-DPB15001 DPA10106-DPB10101 DPA10201-DPB10101 DPA10201-DPB110601 DPA10201-DPB11501 DPA10201-DPB11601 DPA10201-DPB11901 DPA10202-DPB10101 DPA10202-DPB10201 DPA10202-DPB10202 DPA10202-DPB10501 DPA10202-DPB110601 DPA10202-DPB11801 DPA10202-DPB11901 DPA10202-DPB13101 DPA10202-DPB13801 DPA10202-DPB15501 DPA10202-DPB16501 DPA10301-DPB10101; note = HLAs: DPA10301-DPB10201 DPA10301-DPB10202 DPA10301-DPB10401 DPA10301-DPB10402 DPA10301-DPB110501 DPA10301-DPB110601 DPA10301-DPB11801 DPA10301-DPB12301 DPA10301-DPB13901 DPA10301-DPB14001 DPA10301-DPB14901 DPA10301-DPB15501 DPA10301-DPB16501 DPA10301-DPB17501 DPA10301-DPB18001 DPA10401-DPB10101 DPA10401-DPB10201 DPA10401-DPB10202 DPA10401-DPB10402 DPA10401-DPB10501 DPA10401-DPB110501 DPA10401-DPB14901 DQA10102-DQB10501 DQA10102-DQB10601 DQA10102-DQB10602 DQA10102-DQB10609 DQA10103-DQB10501 DQA10103-DQB10601 DQA10103-DQB10602 DQA10103-DQB10609 DQA10201-DQB10301 DQA10505-DQB10402
NEQVDKLVSSGIRKVLFLDGI

SEQ ID NO: 4663 - protein, 14 aa, Human immunodeficiency virus 1
  source 1..14: note = HLAs: DRB1_0404 DRB1_0408
NETPGIRYQYNVLP

SEQ ID NO: 4664 - protein, 15 aa, Human immunodeficiency virus 1
  source 1..15: note = HLAs: DRB1_0101 DRB1_0102 DRB1_0401 DRB1_0402 DRB1_0404 DRB1_0405 DRB1_0408 DRB1_0410 DRB1_0802 DRB1_0806 DRB1_0809 DRB1_0813 DRB1_1001 DRB1_1102 DRB1_1114 DRB1_1301 DRB1_1302 DRB1_1304 DRB1_1406 DRB1_1501 DRB1_1502 DRB1_1503 DRB1_1602 DQA10102-DQB10501
NETPGIRYQYNVLPQ

SEQ ID NO: 4665 - protein, 16 aa, Human immunodeficiency virus 1
  source 1..16: note = HLAs: DRB1_0101 DRB1_0102 DRB1_0401 DRB1_0404 DRB1_0405 DRB1_0408 DRB1_0410 DRB1_0813 DRB1_1001 DRB1_1114 DRB1_1302 DRB1_1501 DRB1_1602 DPA10301-DPB10201 DPA10301-DPB10202 DPA10401-DPB10101 DQA10102-DQB10501 DQA10102-DQB10503 DQA10103-DQB10501
NETPGIRYQYNVLPQG

SEQ ID NO: 4666 - protein, 17 aa, Human immunodeficiency virus 1
  source 1..17: note = HLAs: DRB1_0101 DRB1_0102 DRB1_0401 DRB1_0404 DRB1_0405 DRB1_0408 DRB1_0410 DRB1_0802 DRB1_0809 DRB1_0813 DRB1_1001 DRB1_1114 DRB1_1302 DRB1_1406 DRB1_1501 DRB1_1502 DRB1_1602 DPA10301-DPB10101 DPA10301-DPB10201 DPA10301-DPB10202 DPA10401-DPB10101 DQA10102-DQB10501 DQA10102-DQB10503 DQA10103-DQB10501
NETPGIRYQYNVLPQGW

SEQ ID NO: 4667 - protein, 18 aa, Human immunodeficiency virus 1
  source 1..18: note = HLAs: DRB1_0401 DRB1_0404 DRB1_0408 DRB1_0813 DRB1_1001 DPA10401-DPB10101 DQA10102-DQB10501
NETPGIRYQYNVLPQGWK

SEQ ID NO: 4668 - protein, 19 aa, Human immunodeficiency virus 1
  source 1..19: note = HLAs: DRB1_0101 DRB1_0102 DRB1_0401 DRB1_0404 DRB1_0405 DRB1_0408 DRB1_0410 DRB1_0802 DRB1_0809 DRB1_0813 DRB1_1001 DRB1_1101 DRB1_1114 DRB1_1302 DRB1_1305 DRB1_1406 DRB1_1501 DRB1_1602 DPA10301-DPB10101 DPA10301-DPB10201 DPA10301-DPB10202 DPA10301-DPB110601 DPA10401-DPB10101 DQA10102-DQB10501 DQA10102-DQB10503 DQA10103-DQB10501
NETPGIRYQYNVLPQGWKG

SEQ ID NO: 4669 - protein, 20 aa, Human immunodeficiency virus 1
  source 1..20: note = HLAs: DRB1_0101 DRB1_0102 DRB1_0401 DRB1_0404 DRB1_0405 DRB1_0408 DRB1_0410 DRB1_0801 DRB1_0802 DRB1_0804 DRB1_0806 DRB1_0809 DRB1_0813 DRB1_0901 DRB1_1001 DRB1_1101 DRB1_1102 DRB1_1104 DRB1_1114 DRB1_1301 DRB1_1302 DRB1_1304 DRB1_1305 DRB1_1402 DRB1_1403 DRB1_1406 DRB1_1501 DRB1_1502 DRB1_1503 DRB1_1601 DRB1_1602 DPA10103-DPB10101 DPA10103-DPB11501 DPA10103-DPB15001 DPA10104-DPB10101 DPA10104-DPB11501 DPA10105-DPB10101 DPA10105-DPB15001 DPA10202-DPB10101 DPA10202-DPB10501 DPA10202-DPB110601 DPA10202-DPB11901 DPA10202-DPB13101 DPA10202-DPB13801 DPA10301-DPB10101 DPA10301-DPB10201 DPA10301-DPB10202 DPA10301-DPB110601 DPA10301-DPB11801 DPA10301-DPB14001 DPA10301-DPB16501 DPA10401-DPB10101 DPA10401-DPB10201 DPA10401-DPB10202 DPA10401-DPB10501 DQA10102-DQB10501 DQA10102-DQB10503 DQA10103-DQB10501
NETPGIRYQYNVLPQGWKGS

SEQ ID NO: 4670 - protein, 21 aa, Human immunodeficiency virus 1
  source 1..21: note = HLAs: DRB1_0101 DRB1_0401 DRB1_0404 DRB1_0405 DRB1_0408 DRB1_0410 DRB1_0801 DRB1_0802 DRB1_0809 DRB1_0813 DRB1_1001 DRB1_1101 DRB1_1114 DRB1_1302 DRB1_1305 DRB1_1406 DRB1_1501 DRB1_1602 DPA10301-DPB10101 DPA10301-DPB110601 DPA10401-DPB10101 DQA10102-DQB10501 DQA10103-DQB10501
NETPGIRYQYNVLPQGWKGSP

SEQ ID NO: 4671 - protein, 22 aa, Human immunodeficiency virus 1
  source 1..22: note = HLAs: DRB1_0101 DRB1_0102 DRB1_0401 DRB1_0404 DRB1_0405 DRB1_0408 DRB1_0410 DRB1_0801 DRB1_0802 DRB1_0809 DRB1_0813 DRB1_1001 DRB1_1101 DRB1_1102 DRB1_1114 DRB1_1301 DRB1_1302 DRB1_1305 DRB1_1402 DRB1_1406 DRB1_1501 DRB1_1601 DRB1_1602 DPA10301-DPB10101 DPA10301-DPB10202 DPA10301-DPB110601 DPA10301-DPB11801 DPA10401-DPB10101 DQA10102-DQB10501 DQA10102-DQB10503 DQA10103-DQB10501
NETPGIRYQYNVLPQGWKGSPA

SEQ ID NO: 4672 - protein, 23 aa, Human immunodeficiency virus 1
  source 1..23: note = HLAs: DRB1_0101 DRB1_0102 DRB1_0401 DRB1_0404 DRB1_0405 DRB1_0408 DRB1_0410 DRB1_0801 DRB1_0802 DRB1_0806 DRB1_0809 DRB1_0813 DRB1_1001 DRB1_1101 DRB1_1102 DRB1_1104 DRB1_1114 DRB1_1301 DRB1_1302 DRB1_1304 DRB1_1305 DRB1_1402 DRB1_1406 DRB1_1501 DRB1_1601 DRB1_1602 DPA10301-DPB10101 DPA10301-DPB10201 DPA10301-DPB10202 DPA10301-DPB110601 DPA10301-DPB11801 DPA10401-DPB10101 DQA10102-DQB10501 DQA10102-DQB10503 DQA10103-DQB10501
NETPGIRYQYNVLPQGWKGSPAI

SEQ ID NO: 4673 - protein, 24 aa, Human immunodeficiency virus 1
  source 1..24: note = HLAs: DRB1_0101 DRB1_0102 DRB1_0401 DRB1_0404 DRB1_0405 DRB1_0408 DRB1_0410 DRB1_0801 DRB1_0802 DRB1_0806 DRB1_0809 DRB1_0813 DRB1_1001 DRB1_1101 DRB1_1102 DRB1_1104 DRB1_1114 DRB1_1301 DRB1_1302 DRB1_1304 DRB1_1305 DRB1_1402 DRB1_1406 DRB1_1501 DRB1_1601 DRB1_1602 DPA10301-DPB10101 DPA10301-DPB10201 DPA10301-DPB10202 DPA10301-DPB110601 DPA10301-DPB11801 DPA10401-DPB10101 DQA10102-DQB10501 DQA10102-DQB10503 DQA10103-DQB10501
NETPGIRYQYNVLPQGWKGSPAIF

SEQ ID NO: 4674 - protein, 25 aa, Human immunodeficiency virus 1
  source 1..25: note = HLAs: DRB1_0101 DRB1_0102 DRB1_0401 DRB1_0404 DRB1_0405 DRB1_0408 DRB1_0410 DRB1_0801 DRB1_0802 DRB1_0806 DRB1_0809 DRB1_0813 DRB1_1001 DRB1_1101 DRB1_1102 DRB1_1104 DRB1_1114 DRB1_1301 DRB1_1302 DRB1_1304 DRB1_1305 DRB1_1402 DRB1_1406 DRB1_1501 DRB1_1601 DRB1_1602 DPA10301-DPB10101 DPA10301-DPB10201 DPA10301-DPB10202 DPA10301-DPB110601 DPA10301-DPB11801 DPA10401-DPB10101 DPA10401-DPB10501 DQA10102-DQB10501 DQA10102-DQB10503 DQA10103-DQB10501 DQA10505-DQB10402
NETPGIRYQYNVLPQGWKGSPAIFQ

SEQ ID NO: 4675 - protein, 20 aa, Human immunodeficiency virus 1
  source 1..20: note = HLAs: DQA10201-DQB10301
NFKRKGGIGGYSAGERIIDI

SEQ ID NO: 4676 - protein, 14 aa, Human immunodeficiency virus 1
  source 1..14: note = HLAs: DRB1_0101 DRB1_0102 DRB1_0401 DRB1_0404 DRB1_0405 DRB1_0408 DRB1_0410 DRB1_0701 DRB1_0813 DRB1_0901 DRB1_1001 DRB1_1114 DRB1_1302 DRB1_1404 DRB1_1406 DRB1_1501 DRB1_1602 DPA10301-DPB10101 DPA10401-DPB10101 DQA10102-DQB10501 DQA10102-DQB10609 DQA10103-DQB10601 DQA10103-DQB10609 DQA10201-DQB10301 DQA10506-DQB10303
NFPISPIETVPVKL

SEQ ID NO: 4677 - protein, 15 aa, Human immunodeficiency virus 1
  source 1..15: note = HLAs: DRB1_0101 DRB1_0102 DRB1_0401 DRB1_0402 DRB1_0404 DRB1_0405 DRB1_0408 DRB1_0410 DRB1_0701 DRB1_0801 DRB1_0802 DRB1_0803 DRB1_0804 DRB1_0806 DRB1_0809 DRB1_0813 DRB1_0901 DRB1_1001 DRB1_1102 DRB1_1103 DRB1_1104 DRB1_1114 DRB1_1201 DRB1_1301 DRB1_1302 DRB1_1304 DRB1_1312 DRB1_1401 DRB1_1402 DRB1_1403 DRB1_1404 DRB1_1405 DRB1_1406 DRB1_1454 DRB1_1501 DRB1_1502 DRB1_1503 DRB1_1601 DRB1_1602 DPA10103-DPB11501 DPA10104-DPB11501 DPA10202-DPB10101 DPA10202-DPB110601 DPA10202-DPB11901 DPA10202-DPB13101 DPA10301-DPB10101 DPA10301-DPB10201 DPA10301-DPB10202 DPA10301-DPB11801 DPA10301-DPB14001 DPA10401-DPB10101 DQA10102-DQB10501 DQA10102-DQB10601 DQA10102-DQB10609 DQA10103-DQB10501 DQA10103-DQB10601 DQA10103-DQB10609 DQA10201-DQB10301 DQA10201-DQB10303 DQA10505-DQB10302 DQA10505-DQB10402 DQA10506-DQB10303
NFPISPIETVPVKLK

SEQ ID NO: 4678 - protein, 16 aa, Human immunodeficiency virus 1
  source 1..16: note = HLAs: DRB1_0101 DRB1_0102 DRB1_0401 DRB1_0404 DRB1_0405 DRB1_0408 DRB1_0410 DRB1_0701 DRB1_0802 DRB1_0804 DRB1_0809 DRB1_0813 DRB1_0901 DRB1_1001 DRB1_1102 DRB1_1114 DRB1_1201 DRB1_1301 DRB1_1302 DRB1_1304 DRB1_1402 DRB1_1404 DRB1_1406 DRB1_1501 DRB1_1502 DRB1_1602 DPA10103-DPB11501 DPA10104-DPB11501 DPA10202-DPB10101 DPA10301-DPB10101 DPA10301-DPB10201 DPA10301-DPB10202 DPA10301-DPB11801 DPA10401-DPB10101 DQA10102-DQB10501 DQA10102-DQB10601 DQA10102-DQB10609 DQA10103-DQB10501 DQA10103-DQB10601 DQA10103-DQB10609 DQA10201-DQB10301 DQA10201-DQB10303 DQA10505-DQB10402 DQA10506-DQB10303
NFPISPIETVPVKLKP

SEQ ID NO: 4679 - protein, 17 aa, Human immunodeficiency virus 1
  source 1..17: note = HLAs: DRB1_0101 DRB1_0102 DRB1_0401 DRB1_0404 DRB1_0405 DRB1_0408 DRB1_0410 DRB1_0701 DRB1_0802 DRB1_0804 DRB1_0806 DRB1_0809 DRB1_0813 DRB1_0901 DRB1_1001 DRB1_1102 DRB1_1103 DRB1_1114 DRB1_1201 DRB1_1301 DRB1_1302 DRB1_1304 DRB1_1401 DRB1_1402 DRB1_1404 DRB1_1406 DRB1_1454 DRB1_1501 DRB1_1502 DRB1_1602 DPA10202-DPB10101 DPA10301-DPB10101 DPA10301-DPB11801 DPA10301-DPB14001 DPA10401-DPB10101 DQA10102-DQB10501 DQA10102-DQB10601 DQA10102-DQB10609 DQA10103-DQB10501 DQA10103-DQB10601 DQA10103-DQB10609 DQA10201-DQB10301 DQA10505-DQB10402 DQA10506-DQB10303
NFPISPIETVPVKLKPG

SEQ ID NO: 4680 - protein, 18 aa, Human immunodeficiency virus 1
  source 1..18: note = HLAs: DRB1_0101 DRB1_0102 DRB1_0701 DRB1_0813 DRB1_1114 DRB1_1302 DQA10102-DQB10501
NFPISPIETVPVKLKPGM

SEQ ID NO: 4681 - protein, 19 aa, Human immunodeficiency virus 1
  source 1..19: note = HLAs: DRB1_0101 DRB1_0102 DRB1_0401 DRB1_0404 DRB1_0405 DRB1_0408 DRB1_0410 DRB1_0701 DRB1_0802 DRB1_0809 DRB1_0813 DRB1_0901 DRB1_1001 DRB1_1102 DRB1_1114 DRB1_1201 DRB1_1301 DRB1_1302 DRB1_1304 DRB1_1404 DRB1_1406 DRB1_1501 DRB1_1502 DRB1_1602 DPA10202-DPB10101 DPA10301-DPB10101 DPA10301-DPB11801 DPA10401-DPB10101 DQA10102-DQB10501 DQA10102-DQB10601 DQA10102-DQB10609 DQA10103-DQB10501 DQA10103-DQB10601 DQA10103-DQB10609 DQA10201-DQB10303 DQA10505-DQB10402
NFPISPIETVPVKLKPGMD

SEQ ID NO: 4682 - protein, 20 aa, Human immunodeficiency virus 1
  source 1..20: note = HLAs: DRB1_0101 DRB1_0102 DRB1_0401 DRB1_0404 DRB1_0405 DRB1_0408 DRB1_0410 DRB1_0701 DRB1_0801 DRB1_0802 DRB1_0803 DRB1_0804 DRB1_0806 DRB1_0809 DRB1_0813 DRB1_0901 DRB1_1001 DRB1_1102 DRB1_1103 DRB1_1104 DRB1_1114 DRB1_1201 DRB1_1301 DRB1_1302 DRB1_1304 DRB1_1401 DRB1_1402 DRB1_1404 DRB1_1406 DRB1_1454 DRB1_1501 DRB1_1502 DRB1_1503 DRB1_1602 DPA10103-DPB11501 DPA10104-DPB11501 DPA10202-DPB10101 DPA10202-DPB10501 DPA10202-DPB110601 DPA10202-DPB11801 DPA10202-DPB11901 DPA10202-DPB13101 DPA10202-DPB13801 DPA10301-DPB10101 DPA10301-DPB10201 DPA10301-DPB10202 DPA10301-DPB10401 DPA10301-DPB11801 DPA10301-DPB12301 DPA10301-DPB13901 DPA10301-DPB14001 DPA10301-DPB16501 DPA10401-DPB10101 DQA10102-DQB10501 DQA10102-DQB10601 DQA10102-DQB10609 DQA10103-DQB10501 DQA10103-DQB10601 DQA10103-DQB10602 DQA10103-DQB10609 DQA10201-DQB10301 DQA10201-DQB10303 DQA10505-DQB10402 DQA10506-DQB10303
NFPISPIETVPVKLKPGMDG

SEQ ID NO: 4683 - protein, 21 aa, Human immunodeficiency virus 1
  source 1..21: note = HLAs: DRB1_0101 DRB1_0102 DRB1_0401 DRB1_0404 DRB1_0405 DRB1_0408 DRB1_0410 DRB1_0701 DRB1_0802 DRB1_0804 DRB1_0806 DRB1_0809 DRB1_0813 DRB1_0901 DRB1_1001 DRB1_1102 DRB1_1103 DRB1_1114 DRB1_1201 DRB1_1301 DRB1_1302 DRB1_1304 DRB1_1401 DRB1_1404 DRB1_1406 DRB1_1454 DRB1_1501 DRB1_1502 DRB1_1602 DPA10202-DPB10101 DPA10301-DPB10101 DPA10301-DPB11801 DPA10401-DPB10101 DQA10102-DQB10501 DQA10103-DQB10501 DQA10103-DQB10601 DQA10103-DQB10609
NFPISPIETVPVKLKPGMDGP

SEQ ID NO: 4684 - protein, 22 aa, Human immunodeficiency virus 1
  source 1..22: note = HLAs: DRB1_0101 DRB1_0102 DRB1_0401 DRB1_0404 DRB1_0405 DRB1_0408 DRB1_0410 DRB1_0701 DRB1_0802 DRB1_0804 DRB1_0806 DRB1_0809 DRB1_0813 DRB1_0901 DRB1_1001 DRB1_1102 DRB1_1103 DRB1_1114 DRB1_1201 DRB1_1301 DRB1_1302 DRB1_1304 DRB1_1401 DRB1_1404 DRB1_1406 DRB1_1454 DRB1_1501 DRB1_1502 DRB1_1602 DPA10202-DPB10101 DPA10301-DPB10101 DPA10301-DPB11801 DPA10401-DPB10101 DQA10102-DQB10501 DQA10103-DQB10501 DQA10103-DQB10601 DQA10103-DQB10609
NFPISPIETVPVKLKPGMDGPK

SEQ ID NO: 4685 - protein, 23 aa, Human immunodeficiency virus 1
  source 1..23: note = HLAs: DRB1_0101 DRB1_0102 DRB1_0401 DRB1_0404 DRB1_0405 DRB1_0408 DRB1_0410 DRB1_0701 DRB1_0802 DRB1_0804 DRB1_0806 DRB1_0809 DRB1_0813 DRB1_0901 DRB1_1001 DRB1_1102 DRB1_1103 DRB1_1104 DRB1_1114 DRB1_1201 DRB1_1301 DRB1_1302 DRB1_1304 DRB1_1401 DRB1_1404 DRB1_1406 DRB1_1454 DRB1_1501 DRB1_1502 DRB1_1602 DPA10202-DPB10101 DPA10301-DPB10101 DPA10301-DPB11801 DPA10401-DPB10101 DQA10102-DQB10501 DQA10103-DQB10501 DQA10103-DQB10601 DQA10103-DQB10609
NFPISPIETVPVKLKPGMDGPKV

SEQ ID NO: 4686 - protein, 24 aa, Human immunodeficiency virus 1
  source 1..24: note = HLAs: DRB1_0101 DRB1_0102 DRB1_0401 DRB1_0404 DRB1_0405 DRB1_0408 DRB1_0410 DRB1_0701 DRB1_0802 DRB1_0804 DRB1_0806 DRB1_0809 DRB1_0813 DRB1_0901 DRB1_1001 DRB1_1102 DRB1_1103 DRB1_1104 DRB1_1114 DRB1_1201 DRB1_1301 DRB1_1302 DRB1_1304 DRB1_1401 DRB1_1402 DRB1_1404 DRB1_1406 DRB1_1454 DRB1_1501 DRB1_1502 DRB1_1602 DPA10202-DPB10101 DPA10301-DPB10101 DPA10301-DPB11801 DPA10401-DPB10101 DQA10102-DQB10501 DQA10103-DQB10501 DQA10103-DQB10601 DQA10103-DQB10609
NFPISPIETVPVKLKPGMDGPKVK

SEQ ID NO: 4687 - protein, 25 aa, Human immunodeficiency virus 1
  source 1..25: note = HLAs: DRB1_0101 DRB1_0102 DRB1_0401 DRB1_0404 DRB1_0405 DRB1_0408 DRB1_0410 DRB1_0701 DRB1_0802 DRB1_0804 DRB1_0806 DRB1_0809 DRB1_0813 DRB1_0901 DRB1_1001 DRB1_1102 DRB1_1103 DRB1_1104 DRB1_1114 DRB1_1201 DRB1_1301 DRB1_1302 DRB1_1304 DRB1_1401 DRB1_1402 DRB1_1404 DRB1_1406 DRB1_1454 DRB1_1501 DRB1_1502 DRB1_1602 DPA10202-DPB10101 DPA10301-DPB10101 DPA10301-DPB11801 DPA10401-DPB10101 DQA10102-DQB10501 DQA10103-DQB10501 DQA10103-DQB10601 DQA10103-DQB10609
NFPISPIETVPVKLKPGMDGPKVKQ

SEQ ID NO: 4688 - protein, 14 aa, Human immunodeficiency virus 1
  source 1..14: note = HLAs: DRB1_0301
NIVTDSQYALGIIQ

SEQ ID NO: 4689 - protein, 15 aa, Human immunodeficiency virus 1
  source 1..15: note = HLAs: DRB1_0101 DRB1_0301 DRB1_1001 DQA10102-DQB10501 DQA10102-DQB10602 DQA10102-DQB10609 DQA10102-DQB10611 DQA10103-DQB10609 DQA10201-DQB10303
NIVTDSQYALGIIQA

SEQ ID NO: 4690 - protein, 16 aa, Human immunodeficiency virus 1
  source 1..16: note = HLAs: DRB1_0301 DRB1_1001 DPA10301-DPB10101 DPA10401-DPB10101 DQA10102-DQB10501 DQA10102-DQB10503 DQA10102-DQB10601 DQA10102-DQB10602 DQA10102-DQB10609 DQA10102-DQB10611 DQA10103-DQB10501 DQA10103-DQB10601 DQA10103-DQB10602 DQA10103-DQB10609 DQA10201-DQB10301 DQA10201-DQB10303 DQA10301-DQB10301 DQA10301-DQB10304 DQA10302-DQB10301 DQA10302-DQB10304 DQA10303-DQB10301 DQA10303-DQB10304 DQA10401-DQB10301 DQA10401-DQB10319 DQA10501-DQB10301 DQA10501-DQB10319 DQA10503-DQB10301 DQA10505-DQB10301 DQA10505-DQB10302 DQA10505-DQB10309 DQA10505-DQB10319 DQA10506-DQB10303 DQA10508-DQB10301 DQA10509-DQB10301 DQA10601-DQB10301
NIVTDSQYALGIIQAQ

SEQ ID NO: 4691 - protein, 17 aa, Human immunodeficiency virus 1
  source 1..17: note = HLAs: DRB1_0101 DRB1_0301 DRB1_1001 DPA10301-DPB10101 DPA10301-DPB11801 DPA10401-DPB10101 DQA10102-DQB10501 DQA10102-DQB10503 DQA10102-DQB10601 DQA10102-DQB10602 DQA10102-DQB10609 DQA10102-DQB10611 DQA10103-DQB10501 DQA10103-DQB10601 DQA10103-DQB10602 DQA10103-DQB10609 DQA10201-DQB10301 DQA10201-DQB10303 DQA10301-DQB10301 DQA10302-DQB10301 DQA10303-DQB10301 DQA10401-DQB10301 DQA10401-DQB10319 DQA10501-DQB10301 DQA10501-DQB10319 DQA10503-DQB10301 DQA10505-DQB10301 DQA10505-DQB10309 DQA10505-DQB10319 DQA10506-DQB10303 DQA10508-DQB10301 DQA10509-DQB10301 DQA10601-DQB10301
NIVTDSQYALGIIQAQP

SEQ ID NO: 4692 - protein, 18 aa, Human immunodeficiency virus 1
  source 1..18: note = HLAs: DRB1_1001 DQA10102-DQB10501 DQA10102-DQB10503 DQA10102-DQB10601 DQA10102-DQB10602 DQA10102-DQB10609 DQA10102-DQB10611 DQA10201-DQB10301 DQA10301-DQB10301 DQA10302-DQB10301 DQA10303-DQB10301 DQA10401-DQB10301 DQA10401-DQB10319 DQA10501-DQB10301 DQA10501-DQB10319 DQA10503-DQB10301 DQA10505-DQB10301 DQA10505-DQB10302 DQA10505-DQB10309 DQA10505-DQB10319 DQA10508-DQB10301 DQA10509-DQB10301
NIVTDSQYALGIIQAQPD

SEQ ID NO: 4693 - protein, 19 aa, Human immunodeficiency virus 1
  source 1..19: note = HLAs: DRB1_0101 DRB1_0405 DRB1_0408 DRB1_0410 DRB1_1001 DPA10103-DPB11501 DPA10104-DPB11501 DPA10301-DPB10101 DPA10301-DPB10201 DPA10301-DPB10202 DPA10301-DPB110601 DPA10301-DPB11801 DPA10301-DPB16501 DPA10401-DPB10101 DQA10102-DQB10501 DQA10102-DQB10503 DQA10102-DQB10601 DQA10102-DQB10602 DQA10102-DQB10609 DQA10102-DQB10610 DQA10102-DQB10611 DQA10103-DQB10501 DQA10103-DQB10601 DQA10103-DQB10602 DQA10103-DQB10609 DQA10201-DQB10301 DQA10201-DQB10302 DQA10201-DQB10303 DQA10301-DQB10301 DQA10301-DQB10304 DQA10302-DQB10301 DQA10302-DQB10304 DQA10303-DQB10301 DQA10303-DQB10304 DQA10401-DQB10301 DQA10401-DQB10319 DQA10501-DQB10301 DQA10501-DQB10319 DQA10503-DQB10301 DQA10505-DQB10301 DQA10505-DQB10302 DQA10505-DQB10309 DQA10505-DQB10319 DQA10506-DQB10303 DQA10508-DQB10301 DQA10509-DQB10301 DQA10601-DQB10301
NIVTDSQYALGIIQAQPDK

SEQ ID NO: 4694 - protein, 20 aa, Human immunodeficiency virus 1
  source 1..20: note = HLAs: DRB1_0101 DRB1_0401 DRB1_0404 DRB1_0405 DRB1_0408 DRB1_0410 DRB1_0901 DRB1_1001 DPA10103-DPB10101 DPA10103-DPB11501 DPA10103-DPB15001 DPA10104-DPB10101 DPA10104-DPB11501 DPA10105-DPB10101 DPA10105-DPB15001 DPA10202-DPB10101 DPA10301-DPB10101 DPA10301-DPB10201 DPA10301-DPB10202 DPA10301-DPB10401 DPA10301-DPB110601 DPA10301-DPB11801 DPA10301-DPB12301 DPA10301-DPB13901 DPA10301-DPB14001 DPA10301-DPB16501 DPA10401-DPB10101 DPA10401-DPB10301 DPA10401-DPB10501 DQA10101-DQB10601 DQA10102-DQB10501 DQA10102-DQB10503 DQA10102-DQB10601 DQA10102-DQB10602 DQA10102-DQB10604 DQA10102-DQB10609 DQA10102-DQB10610 DQA10102-DQB10611 DQA10103-DQB10501 DQA10103-DQB10503 DQA10103-DQB10601 DQA10103-DQB10602 DQA10103-DQB10609 DQA10201-DQB10301 DQA10201-DQB10302 DQA10201-DQB10303 DQA10301-DQB10301 DQA10301-DQB10304 DQA10302-DQB10301 DQA10302-DQB10304 DQA10303-DQB10301 DQA10303-DQB10304 DQA10401-DQB10301 DQA10401-DQB10319 DQA10501-DQB10301 DQA10501-DQB10319 DQA10503-DQB10301 DQA10505-DQB10301; note = HLAs: DQA10505-DQB10302 DQA10505-DQB10309 DQA10505-DQB10319 DQA10505-DQB10402 DQA10506-DQB10303 DQA10508-DQB10301 DQA10509-DQB10301 DQA10601-DQB10301
NIVTDSQYALGIIQAQPDKS

SEQ ID NO: 4695 - protein, 21 aa, Human immunodeficiency virus 1
  source 1..21: note = HLAs: DRB1_0101 DRB1_0401 DRB1_0404 DRB1_0405 DRB1_0408 DRB1_0410 DRB1_1001 DPA10301-DPB10101 DPA10301-DPB110601 DPA10301-DPB11801 DPA10301-DPB16501 DPA10401-DPB10101 DQA10102-DQB10501 DQA10102-DQB10503 DQA10102-DQB10601 DQA10102-DQB10602 DQA10102-DQB10609 DQA10102-DQB10611 DQA10103-DQB10501 DQA10103-DQB10601 DQA10103-DQB10609 DQA10201-DQB10301 DQA10201-DQB10303 DQA10301-DQB10301 DQA10302-DQB10301 DQA10303-DQB10301 DQA10401-DQB10301 DQA10401-DQB10319 DQA10501-DQB10301 DQA10501-DQB10319 DQA10503-DQB10301 DQA10505-DQB10301 DQA10505-DQB10309 DQA10505-DQB10319 DQA10506-DQB10303 DQA10508-DQB10301 DQA10509-DQB10301 DQA10601-DQB10301
NIVTDSQYALGIIQAQPDKSE

SEQ ID NO: 4696 - protein, 22 aa, Human immunodeficiency virus 1
  source 1..22: note = HLAs: DRB1_0101 DRB1_0401 DRB1_0404 DRB1_0405 DRB1_0408 DRB1_0410 DRB1_1001 DPA10301-DPB10101 DPA10301-DPB110601 DPA10301-DPB11801 DPA10301-DPB16501 DPA10401-DPB10101 DQA10102-DQB10501 DQA10102-DQB10503 DQA10102-DQB10601 DQA10102-DQB10602 DQA10102-DQB10609 DQA10102-DQB10611 DQA10103-DQB10501 DQA10103-DQB10601 DQA10103-DQB10609 DQA10201-DQB10301 DQA10201-DQB10303 DQA10301-DQB10301 DQA10302-DQB10301 DQA10303-DQB10301 DQA10401-DQB10301 DQA10401-DQB10319 DQA10501-DQB10301 DQA10501-DQB10319 DQA10503-DQB10301 DQA10505-DQB10301 DQA10505-DQB10309 DQA10505-DQB10319 DQA10506-DQB10303 DQA10508-DQB10301 DQA10509-DQB10301 DQA10601-DQB10301
NIVTDSQYALGIIQAQPDKSES

SEQ ID NO: 4697 - protein, 23 aa, Human immunodeficiency virus 1
  source 1..23: note = HLAs: DRB1_0101 DRB1_0401 DRB1_0404 DRB1_0405 DRB1_0408 DRB1_0410 DRB1_1001 DPA10301-DPB10101 DPA10301-DPB110601 DPA10301-DPB11801 DPA10301-DPB16501 DPA10401-DPB10101 DQA10102-DQB10501 DQA10102-DQB10503 DQA10102-DQB10601 DQA10102-DQB10602 DQA10102-DQB10609 DQA10102-DQB10611 DQA10103-DQB10501 DQA10103-DQB10601 DQA10103-DQB10602 DQA10103-DQB10609 DQA10201-DQB10301 DQA10201-DQB10303 DQA10301-DQB10301 DQA10302-DQB10301 DQA10303-DQB10301 DQA10401-DQB10301 DQA10401-DQB10319 DQA10501-DQB10301 DQA10501-DQB10319 DQA10503-DQB10301 DQA10505-DQB10301 DQA10505-DQB10309 DQA10505-DQB10319 DQA10506-DQB10303 DQA10508-DQB10301 DQA10509-DQB10301 DQA10601-DQB10301
NIVTDSQYALGIIQAQPDKSESE

SEQ ID NO: 4698 - protein, 24 aa, Human immunodeficiency virus 1
  source 1..24: note = HLAs: DRB1_0101 DRB1_0401 DRB1_0404 DRB1_0405 DRB1_0408 DRB1_0410 DRB1_1001 DPA10301-DPB10101 DPA10301-DPB110601 DPA10301-DPB11801 DPA10301-DPB16501 DPA10401-DPB10101 DQA10102-DQB10501 DQA10102-DQB10503 DQA10102-DQB10601 DQA10102-DQB10602 DQA10102-DQB10609 DQA10102-DQB10611 DQA10103-DQB10501 DQA10103-DQB10601 DQA10103-DQB10602 DQA10103-DQB10609 DQA10201-DQB10301 DQA10201-DQB10303 DQA10301-DQB10301 DQA10302-DQB10301 DQA10303-DQB10301 DQA10401-DQB10301 DQA10401-DQB10319 DQA10501-DQB10301 DQA10501-DQB10319 DQA10503-DQB10301 DQA10505-DQB10301 DQA10505-DQB10309 DQA10505-DQB10319 DQA10506-DQB10303 DQA10508-DQB10301 DQA10509-DQB10301 DQA10601-DQB10301
NIVTDSQYALGIIQAQPDKSESEL

SEQ ID NO: 4699 - protein, 25 aa, Human immunodeficiency virus 1
  source 1..25: note = HLAs: DRB1_0101 DRB1_0401 DRB1_0404 DRB1_0405 DRB1_0408 DRB1_0410 DRB1_1001 DPA10301-DPB10101 DPA10301-DPB110601 DPA10301-DPB11801 DPA10301-DPB16501 DPA10401-DPB10101 DQA10102-DQB10501 DQA10102-DQB10503 DQA10102-DQB10601 DQA10102-DQB10602 DQA10102-DQB10609 DQA10102-DQB10611 DQA10103-DQB10501 DQA10103-DQB10601 DQA10103-DQB10602 DQA10103-DQB10609 DQA10201-DQB10301 DQA10201-DQB10303 DQA10301-DQB10301 DQA10302-DQB10301 DQA10303-DQB10301 DQA10401-DQB10301 DQA10401-DQB10319 DQA10501-DQB10301 DQA10501-DQB10319 DQA10503-DQB10301 DQA10505-DQB10301 DQA10505-DQB10309 DQA10505-DQB10319 DQA10506-DQB10303 DQA10508-DQB10301 DQA10509-DQB10301 DQA10601-DQB10301
NIVTDSQYALGIIQAQPDKSESELV

SEQ ID NO: 4700 - protein, 14 aa, Human immunodeficiency virus 1
  source 1..14: note = HLAs: DRB1_1102 DRB1_1103 DRB1_1104 DRB1_1301 DRB1_1406
NKELKKIIGQVRDQ

SEQ ID NO: 4701 - protein, 15 aa, Human immunodeficiency virus 1
  source 1..15: note = HLAs: DRB1_0101 DRB1_0102 DRB1_0410 DRB1_0801 DRB1_0804 DRB1_0806 DRB1_1001 DRB1_1101 DRB1_1102 DRB1_1103 DRB1_1104 DRB1_1202 DRB1_1301 DRB1_1304 DRB1_1305 DRB1_1406 DRB1_1501 DRB1_1503 DRB1_1601 DRB1_1602
NKELKKIIGQVRDQA

SEQ ID NO: 4702 - protein, 16 aa, Human immunodeficiency virus 1
  source 1..16: note = HLAs: DRB1_0804 DRB1_0806 DRB1_1102 DRB1_1103 DRB1_1104 DRB1_1301 DRB1_1304 DRB1_1406 DRB1_1601 DQA10102-DQB10501 DQA10102-DQB10609
NKELKKIIGQVRDQAE

SEQ ID NO: 4703 - protein, 17 aa, Human immunodeficiency virus 1
  source 1..17: note = HLAs: DRB1_0101 DRB1_0804 DRB1_0806 DRB1_1101 DRB1_1102 DRB1_1103 DRB1_1104 DRB1_1301 DRB1_1304 DRB1_1305 DRB1_1406 DRB1_1601 DQA10102-DQB10501 DQA10102-DQB10609
NKELKKIIGQVRDQAEH

SEQ ID NO: 4704 - protein, 18 aa, Human immunodeficiency virus 1
  source 1..18: note = HLAs: DRB1_1102 DRB1_1103 DRB1_1104 DRB1_1301 DRB1_1406 DQA10102-DQB10609
NKELKKIIGQVRDQAEHL

SEQ ID NO: 4705 - protein, 19 aa, Human immunodeficiency virus 1
  source 1..19: note = HLAs: DRB1_0410 DRB1_0804 DRB1_0806 DRB1_1101 DRB1_1102 DRB1_1103 DRB1_1104 DRB1_1301 DRB1_1304 DRB1_1305 DRB1_1406 DQA10102-DQB10501 DQA10102-DQB10604 DQA10102-DQB10609
NKELKKIIGQVRDQAEHLK

SEQ ID NO: 4706 - protein, 13 aa, Human immunodeficiency virus 1
  source 1..13: note = HLAs: DRB1_0101 DRB1_0102 DRB1_0401 DRB1_0404 DRB1_0405 DRB1_0408 DRB1_0410 DRB1_0701 DRB1_0802 DRB1_0804 DRB1_0806 DRB1_0809 DRB1_0813 DRB1_0901 DRB1_1001 DRB1_1102 DRB1_1104 DRB1_1114 DRB1_1301 DRB1_1302 DRB1_1304 DRB1_1406 DRB1_1501 DRB1_1502 DRB1_1503 DRB1_1601 DRB1_1602 DPA10103-DPB10101 DPA10103-DPB10301 DPA10103-DPB10601 DPA10103-DPB10901 DPA10103-DPB112401 DPA10103-DPB11401 DPA10103-DPB11501 DPA10103-DPB12001 DPA10103-DPB12901 DPA10103-DPB15001 DPA10103-DPB15501 DPA10104-DPB10101 DPA10104-DPB10301 DPA10104-DPB11501 DPA10105-DPB10101 DPA10105-DPB10301 DPA10105-DPB15001 DPA10202-DPB10101 DPA10202-DPB15501 DPA10301-DPB10101 DPA10301-DPB10201 DPA10301-DPB10202 DPA10301-DPB10301 DPA10301-DPB110601 DPA10301-DPB15501 DPA10301-DPB16501 DPA10401-DPB10101 DPA10401-DPB10301 DPA10401-DPB10501 DPA10401-DPB11301 DPA10401-DPB113301 DPA10401-DPB11401 DQA10102-DQB10501 DQA10102-DQB10503 DQA10103-DQB10501 DQA10103-DQB10609 DQA10505-DQB10402
NKIVRMYSPVSIL

SEQ ID NO: 4707 - protein, 14 aa, Human immunodeficiency virus 1
  source 1..14: note = HLAs: DRB1_0101 DRB1_0102 DRB1_0401 DRB1_0402 DRB1_0404 DRB1_0405 DRB1_0408 DRB1_0410 DRB1_0701 DRB1_0801 DRB1_0802 DRB1_0803 DRB1_0804 DRB1_0806 DRB1_0809 DRB1_0813 DRB1_0901 DRB1_1001 DRB1_1101 DRB1_1102 DRB1_1103 DRB1_1104 DRB1_1114 DRB1_1301 DRB1_1302 DRB1_1304 DRB1_1305 DRB1_1402 DRB1_1404 DRB1_1406 DRB1_1501 DRB1_1502 DRB1_1503 DRB1_1601 DRB1_1602 DPA10103-DPB10101 DPA10103-DPB10301 DPA10103-DPB10601 DPA10103-DPB10901 DPA10103-DPB11001 DPA10103-DPB11101 DPA10103-DPB112401 DPA10103-DPB11301 DPA10103-DPB113101 DPA10103-DPB113301 DPA10103-DPB11401 DPA10103-DPB11501 DPA10103-DPB11601 DPA10103-DPB11701 DPA10103-DPB11901 DPA10103-DPB12001 DPA10103-DPB12101 DPA10103-DPB12901 DPA10103-DPB13001 DPA10103-DPB13101 DPA10103-DPB15001 DPA10103-DPB15501 DPA10104-DPB10101 DPA10104-DPB10301 DPA10104-DPB11001 DPA10104-DPB11301 DPA10104-DPB11501 DPA10105-DPB10101 DPA10105-DPB10301 DPA10105-DPB15001 DPA10201-DPB11401 DPA10202-DPB10101 DPA10202-DPB10301 DPA10202-DPB10901 DPA10202-DPB110601; note = HLAs: DPA10202-DPB11101 DPA10202-DPB11301 DPA10202-DPB113101 DPA10202-DPB11401 DPA10202-DPB11701 DPA10202-DPB11901 DPA10202-DPB12101 DPA10202-DPB12901 DPA10202-DPB13001 DPA10202-DPB13101 DPA10202-DPB14501 DPA10202-DPB15501 DPA10202-DPB18501 DPA10301-DPB10101 DPA10301-DPB10201 DPA10301-DPB10202 DPA10301-DPB10301 DPA10301-DPB10401 DPA10301-DPB10901 DPA10301-DPB110601 DPA10301-DPB11101 DPA10301-DPB11301 DPA10301-DPB11701 DPA10301-DPB11801 DPA10301-DPB12301 DPA10301-DPB13901 DPA10301-DPB14001 DPA10301-DPB15501 DPA10301-DPB16501 DPA10401-DPB10101 DPA10401-DPB10201 DPA10401-DPB10202 DPA10401-DPB10301 DPA10401-DPB10501 DPA10401-DPB11301 DPA10401-DPB113301 DPA10401-DPB11401 DQA10102-DQB10501 DQA10102-DQB10503 DQA10102-DQB10601 DQA10102-DQB10609 DQA10103-DQB10501 DQA10103-DQB10503 DQA10103-DQB10601 DQA10103-DQB10609 DQA10201-DQB10301 DQA10505-DQB10402
NKIVRMYSPVSILD

SEQ ID NO: 4708 - protein, 15 aa, Human immunodeficiency virus 1
  source 1..15: note = HLAs: DRB1_0101 DRB1_0102 DRB1_0103 DRB1_0401 DRB1_0402 DRB1_0403 DRB1_0404 DRB1_0405 DRB1_0406 DRB1_0407 DRB1_0408 DRB1_0410 DRB1_0411 DRB1_0701 DRB1_0801 DRB1_0802 DRB1_0803 DRB1_0804 DRB1_0806 DRB1_0809 DRB1_0813 DRB1_0901 DRB1_1001 DRB1_1101 DRB1_1102 DRB1_1103 DRB1_1104 DRB1_1114 DRB1_1201 DRB1_1202 DRB1_1301 DRB1_1302 DRB1_1303 DRB1_1304 DRB1_1305 DRB1_1312 DRB1_1401 DRB1_1402 DRB1_1403 DRB1_1404 DRB1_1405 DRB1_1406 DRB1_1407 DRB1_1454 DRB1_1501 DRB1_1502 DRB1_1503 DRB1_1601 DRB1_1602 DPA10103-DPB10101 DPA10103-DPB10201 DPA10103-DPB10202 DPA10103-DPB10301 DPA10103-DPB10401 DPA10103-DPB10501 DPA10103-DPB10601 DPA10103-DPB10901 DPA10103-DPB11001 DPA10103-DPB11101 DPA10103-DPB112401 DPA10103-DPB112601 DPA10103-DPB11301 DPA10103-DPB113101 DPA10103-DPB113301 DPA10103-DPB11401 DPA10103-DPB11501 DPA10103-DPB11601 DPA10103-DPB11701 DPA10103-DPB11801 DPA10103-DPB11901 DPA10103-DPB12001 DPA10103-DPB12101 DPA10103-DPB12301 DPA10103-DPB12901 DPA10103-DPB13001 DPA10103-DPB13101; note = HLAs: DPA10103-DPB13401 DPA10103-DPB13901 DPA10103-DPB14001 DPA10103-DPB14101 DPA10103-DPB14801 DPA10103-DPB15001 DPA10103-DPB15501 DPA10103-DPB15901 DPA10104-DPB10101 DPA10104-DPB10301 DPA10104-DPB11001 DPA10104-DPB11301 DPA10104-DPB11501 DPA10105-DPB10101 DPA10105-DPB10301 DPA10105-DPB10401 DPA10105-DPB11801 DPA10105-DPB15001 DPA10106-DPB10101 DPA10106-DPB11101 DPA10201-DPB10101 DPA10201-DPB10201 DPA10201-DPB10301 DPA10201-DPB10601 DPA10201-DPB10901 DPA10201-DPB11001 DPA10201-DPB110601 DPA10201-DPB11101 DPA10201-DPB11301 DPA10201-DPB113101 DPA10201-DPB113301 DPA10201-DPB11401 DPA10201-DPB11501 DPA10201-DPB11601 DPA10201-DPB11701 DPA10201-DPB11901 DPA10201-DPB12601 DPA10201-DPB13001 DPA10201-DPB13401 DPA10201-DPB14501 DPA10201-DPB15501 DPA10201-DPB19101 DPA10202-DPB10101 DPA10202-DPB10201 DPA10202-DPB10202 DPA10202-DPB10301 DPA10202-DPB10401 DPA10202-DPB10501 DPA10202-DPB10901 DPA10202-DPB110601 DPA10202-DPB11101 DPA10202-DPB11301 DPA10202-DPB113101 DPA10202-DPB11401; note = HLAs: DPA10202-DPB11701 DPA10202-DPB11801 DPA10202-DPB11901 DPA10202-DPB12101 DPA10202-DPB12901 DPA10202-DPB13001 DPA10202-DPB13101 DPA10202-DPB13801 DPA10202-DPB14501 DPA10202-DPB15501 DPA10202-DPB16501 DPA10202-DPB18501 DPA10301-DPB10101 DPA10301-DPB10201 DPA10301-DPB10202 DPA10301-DPB10301 DPA10301-DPB10401 DPA10301-DPB10402 DPA10301-DPB10901 DPA10301-DPB110501 DPA10301-DPB110601 DPA10301-DPB11101 DPA10301-DPB11301 DPA10301-DPB11701 DPA10301-DPB11801 DPA10301-DPB12301 DPA10301-DPB13901 DPA10301-DPB14001 DPA10301-DPB14901 DPA10301-DPB15501 DPA10301-DPB16501 DPA10301-DPB17501 DPA10301-DPB18001 DPA10401-DPB10101 DPA10401-DPB10201 DPA10401-DPB10202 DPA10401-DPB10301 DPA10401-DPB10402 DPA10401-DPB10501 DPA10401-DPB110501 DPA10401-DPB11301 DPA10401-DPB113301 DPA10401-DPB11401 DPA10401-DPB14901 DQA10102-DQB10501 DQA10102-DQB10503 DQA10102-DQB10601 DQA10102-DQB10604 DQA10102-DQB10609 DQA10103-DQB10501 DQA10103-DQB10503 DQA10103-DQB10601 DQA10103-DQB10602 DQA10103-DQB10604 DQA10103-DQB10608; note = HLAs: DQA10103-DQB10609 DQA10201-DQB10301 DQA10201-DQB10303 DQA10501-DQB10501 DQA10505-DQB10302 DQA10505-DQB10402 DQA10505-DQB10501 DQA10506-DQB10303
NKIVRMYSPVSILDI

SEQ ID NO: 4709 - protein, 14 aa, Human immunodeficiency virus 1
  source 1..14: note = HLAs: DPA10301-DPB10101 DPA10401-DPB10101 DQA10102-DQB10501
NKRTQDFWEVQLGI

SEQ ID NO: 4710 - protein, 15 aa, Human immunodeficiency virus 1
  source 1..15: note = HLAs: DPA10103-DPB10101 DPA10103-DPB11501 DPA10103-DPB13101 DPA10103-DPB15001 DPA10104-DPB10101 DPA10104-DPB11501 DPA10105-DPB10101 DPA10105-DPB15001 DPA10202-DPB10101 DPA10301-DPB10101 DPA10301-DPB10201 DPA10301-DPB10202 DPA10301-DPB10401 DPA10301-DPB110601 DPA10301-DPB11801 DPA10301-DPB12301 DPA10301-DPB13901 DPA10301-DPB14001 DPA10301-DPB16501 DPA10401-DPB10101 DQA10101-DQB10501 DQA10102-DQB10501 DQA10102-DQB10503 DQA10104-DQB10501 DQA10105-DQB10501
NKRTQDFWEVQLGIP

SEQ ID NO: 4711 - protein, 16 aa, Human immunodeficiency virus 1
  source 1..16: note = HLAs: DPA10103-DPB10101 DPA10103-DPB11501 DPA10103-DPB13101 DPA10104-DPB10101 DPA10104-DPB11501 DPA10105-DPB10101 DPA10202-DPB10101 DPA10301-DPB10101 DPA10301-DPB10201 DPA10301-DPB10202 DPA10301-DPB10401 DPA10301-DPB110601 DPA10301-DPB11801 DPA10301-DPB12301 DPA10301-DPB13901 DPA10301-DPB14001 DPA10301-DPB16501 DPA10401-DPB10101 DQA10101-DQB10501 DQA10102-DQB10501 DQA10102-DQB10503 DQA10104-DQB10501 DQA10105-DQB10501
NKRTQDFWEVQLGIPH

SEQ ID NO: 4712 - protein, 17 aa, Human immunodeficiency virus 1
  source 1..17: note = HLAs: DRB1_1001 DPA10103-DPB10101 DPA10103-DPB11501 DPA10103-DPB13101 DPA10103-DPB15001 DPA10104-DPB10101 DPA10104-DPB11501 DPA10105-DPB10101 DPA10105-DPB15001 DPA10202-DPB10101 DPA10301-DPB10101 DPA10301-DPB10201 DPA10301-DPB10202 DPA10301-DPB10401 DPA10301-DPB110601 DPA10301-DPB11801 DPA10301-DPB12301 DPA10301-DPB13901 DPA10301-DPB14001 DPA10301-DPB16501 DPA10401-DPB10101 DQA10102-DQB10501 DQA10102-DQB10503
NKRTQDFWEVQLGIPHP

SEQ ID NO: 4713 - protein, 18 aa, Human immunodeficiency virus 1
  source 1..18: note = HLAs: DRB1_1001 DPA10301-DPB10101 DPA10301-DPB16501 DPA10401-DPB10101 DQA10102-DQB10501 DQA10102-DQB10503 DQA10102-DQB10601 DQA10103-DQB10601 DQA10201-DQB10301 DQA10301-DQB10301 DQA10302-DQB10301 DQA10303-DQB10301 DQA10401-DQB10301 DQA10401-DQB10319 DQA10501-DQB10301 DQA10501-DQB10319 DQA10503-DQB10301 DQA10505-DQB10301 DQA10505-DQB10309 DQA10505-DQB10319 DQA10508-DQB10301 DQA10509-DQB10301 DQA10601-DQB10301
NKRTQDFWEVQLGIPHPA

SEQ ID NO: 4714 - protein, 19 aa, Human immunodeficiency virus 1
  source 1..19: note = HLAs: DRB1_0101 DRB1_1001 DPA10103-DPB10101 DPA10103-DPB11501 DPA10103-DPB13101 DPA10103-DPB15001 DPA10104-DPB10101 DPA10104-DPB11501 DPA10105-DPB10101 DPA10105-DPB15001 DPA10202-DPB10101 DPA10301-DPB10101 DPA10301-DPB10201 DPA10301-DPB10202 DPA10301-DPB10401 DPA10301-DPB110601 DPA10301-DPB11801 DPA10301-DPB12301 DPA10301-DPB13901 DPA10301-DPB14001 DPA10301-DPB16501 DPA10401-DPB10101 DQA10102-DQB10501 DQA10102-DQB10503 DQA10102-DQB10601 DQA10103-DQB10501 DQA10103-DQB10601 DQA10201-DQB10301 DQA10201-DQB10303 DQA10301-DQB10301 DQA10302-DQB10301 DQA10303-DQB10301 DQA10401-DQB10301 DQA10401-DQB10319 DQA10501-DQB10301 DQA10501-DQB10319 DQA10503-DQB10301 DQA10505-DQB10301 DQA10505-DQB10309 DQA10505-DQB10319 DQA10505-DQB10402 DQA10506-DQB10303 DQA10508-DQB10301 DQA10509-DQB10301 DQA10601-DQB10301
NKRTQDFWEVQLGIPHPAG

SEQ ID NO: 4715 - protein, 20 aa, Human immunodeficiency virus 1
  source 1..20: note = HLAs: DRB1_0101 DRB1_0102 DRB1_0901 DRB1_1001 DPA10103-DPB10101 DPA10103-DPB11501 DPA10103-DPB11601 DPA10103-DPB13101 DPA10103-DPB15001 DPA10104-DPB10101 DPA10104-DPB11501 DPA10105-DPB10101 DPA10105-DPB15001 DPA10106-DPB10101 DPA10201-DPB10101 DPA10202-DPB10101 DPA10202-DPB110601 DPA10202-DPB11901 DPA10202-DPB13101 DPA10301-DPB10101 DPA10301-DPB10201 DPA10301-DPB10202 DPA10301-DPB10401 DPA10301-DPB110601 DPA10301-DPB11801 DPA10301-DPB12301 DPA10301-DPB13901 DPA10301-DPB14001 DPA10301-DPB16501 DPA10401-DPB10101 DPA10401-DPB10201 DPA10401-DPB10202 DPA10401-DPB10501 DQA10101-DQB10601 DQA10102-DQB10501 DQA10102-DQB10503 DQA10102-DQB10601 DQA10102-DQB10602 DQA10102-DQB10609 DQA10102-DQB10611 DQA10103-DQB10501 DQA10103-DQB10503 DQA10103-DQB10601 DQA10103-DQB10602 DQA10103-DQB10609 DQA10201-DQB10301 DQA10201-DQB10303 DQA10301-DQB10301 DQA10302-DQB10301 DQA10303-DQB10301 DQA10401-DQB10301 DQA10401-DQB10319 DQA10501-DQB10301 DQA10501-DQB10319 DQA10503-DQB10301 DQA10505-DQB10301; note = HLAs: DQA10505-DQB10309 DQA10505-DQB10319 DQA10505-DQB10402 DQA10506-DQB10303 DQA10508-DQB10301 DQA10509-DQB10301 DQA10601-DQB10301
NKRTQDFWEVQLGIPHPAGL

SEQ ID NO: 4716 - protein, 21 aa, Human immunodeficiency virus 1
  source 1..21: note = HLAs: DRB1_0101 DRB1_0102 DRB1_0901 DRB1_1001 DPA10103-DPB10101 DPA10103-DPB11501 DPA10103-DPB13101 DPA10103-DPB15001 DPA10104-DPB10101 DPA10104-DPB11501 DPA10105-DPB10101 DPA10105-DPB15001 DPA10202-DPB10101 DPA10301-DPB10101 DPA10301-DPB10201 DPA10301-DPB10202 DPA10301-DPB10401 DPA10301-DPB110601 DPA10301-DPB11801 DPA10301-DPB12301 DPA10301-DPB13901 DPA10301-DPB14001 DPA10301-DPB16501 DPA10401-DPB10101 DQA10102-DQB10501 DQA10102-DQB10503 DQA10102-DQB10601 DQA10103-DQB10501 DQA10103-DQB10601 DQA10201-DQB10301 DQA10201-DQB10303 DQA10301-DQB10301 DQA10302-DQB10301 DQA10303-DQB10301 DQA10401-DQB10301 DQA10401-DQB10319 DQA10501-DQB10301 DQA10501-DQB10319 DQA10503-DQB10301 DQA10505-DQB10301 DQA10505-DQB10309 DQA10505-DQB10319 DQA10505-DQB10402 DQA10506-DQB10303 DQA10508-DQB10301 DQA10509-DQB10301 DQA10601-DQB10301
NKRTQDFWEVQLGIPHPAGLK

SEQ ID NO: 4717 - protein, 22 aa, Human immunodeficiency virus 1
  source 1..22: note = HLAs: DRB1_0101 DRB1_0102 DRB1_0901 DRB1_1001 DPA10103-DPB10101 DPA10103-DPB11501 DPA10103-DPB13101 DPA10103-DPB15001 DPA10104-DPB10101 DPA10104-DPB11501 DPA10105-DPB10101 DPA10105-DPB15001 DPA10202-DPB10101 DPA10301-DPB10101 DPA10301-DPB10201 DPA10301-DPB10202 DPA10301-DPB10401 DPA10301-DPB110601 DPA10301-DPB11801 DPA10301-DPB12301 DPA10301-DPB13901 DPA10301-DPB14001 DPA10301-DPB16501 DPA10401-DPB10101 DQA10102-DQB10501 DQA10102-DQB10503 DQA10102-DQB10601 DQA10103-DQB10501 DQA10103-DQB10601 DQA10103-DQB10602 DQA10201-DQB10301 DQA10201-DQB10303 DQA10301-DQB10301 DQA10302-DQB10301 DQA10303-DQB10301 DQA10401-DQB10301 DQA10401-DQB10319 DQA10501-DQB10301 DQA10501-DQB10319 DQA10503-DQB10301 DQA10505-DQB10301 DQA10505-DQB10309 DQA10505-DQB10319 DQA10505-DQB10402 DQA10506-DQB10303 DQA10508-DQB10301 DQA10509-DQB10301 DQA10601-DQB10301
NKRTQDFWEVQLGIPHPAGLKK

SEQ ID NO: 4718 - protein, 23 aa, Human immunodeficiency virus 1
  source 1..23: note = HLAs: DRB1_0101 DRB1_0102 DRB1_0901 DRB1_1001 DPA10103-DPB10101 DPA10103-DPB11501 DPA10103-DPB13101 DPA10103-DPB15001 DPA10104-DPB10101 DPA10104-DPB11501 DPA10105-DPB10101 DPA10105-DPB15001 DPA10202-DPB10101 DPA10301-DPB10101 DPA10301-DPB10201 DPA10301-DPB10202 DPA10301-DPB10401 DPA10301-DPB110601 DPA10301-DPB11801 DPA10301-DPB12301 DPA10301-DPB13901 DPA10301-DPB14001 DPA10301-DPB16501 DPA10401-DPB10101 DQA10102-DQB10501 DQA10102-DQB10503 DQA10102-DQB10601 DQA10103-DQB10501 DQA10103-DQB10601 DQA10103-DQB10602 DQA10201-DQB10301 DQA10201-DQB10303 DQA10301-DQB10301 DQA10302-DQB10301 DQA10303-DQB10301 DQA10401-DQB10301 DQA10401-DQB10319 DQA10501-DQB10301 DQA10501-DQB10319 DQA10503-DQB10301 DQA10505-DQB10301 DQA10505-DQB10309 DQA10505-DQB10319 DQA10505-DQB10402 DQA10506-DQB10303 DQA10508-DQB10301 DQA10509-DQB10301 DQA10601-DQB10301
NKRTQDFWEVQLGIPHPAGLKKK

SEQ ID NO: 4719 - protein, 24 aa, Human immunodeficiency virus 1
  source 1..24: note = HLAs: DRB1_0101 DRB1_0102 DRB1_0901 DRB1_1001 DPA10103-DPB10101 DPA10103-DPB11501 DPA10103-DPB13101 DPA10103-DPB15001 DPA10104-DPB10101 DPA10104-DPB11501 DPA10105-DPB10101 DPA10105-DPB15001 DPA10202-DPB10101 DPA10301-DPB10101 DPA10301-DPB10201 DPA10301-DPB10202 DPA10301-DPB10401 DPA10301-DPB110601 DPA10301-DPB11801 DPA10301-DPB12301 DPA10301-DPB13901 DPA10301-DPB14001 DPA10301-DPB16501 DPA10401-DPB10101 DQA10102-DQB10501 DQA10102-DQB10503 DQA10102-DQB10601 DQA10103-DQB10501 DQA10103-DQB10601 DQA10103-DQB10602 DQA10201-DQB10301 DQA10201-DQB10303 DQA10301-DQB10301 DQA10302-DQB10301 DQA10303-DQB10301 DQA10401-DQB10301 DQA10401-DQB10319 DQA10501-DQB10301 DQA10501-DQB10319 DQA10503-DQB10301 DQA10505-DQB10301 DQA10505-DQB10309 DQA10505-DQB10319 DQA10505-DQB10402 DQA10506-DQB10303 DQA10508-DQB10301 DQA10509-DQB10301 DQA10601-DQB10301
NKRTQDFWEVQLGIPHPAGLKKKK

SEQ ID NO: 4720 - protein, 25 aa, Human immunodeficiency virus 1
  source 1..25: note = HLAs: DRB1_0101 DRB1_0102 DRB1_0901 DRB1_1001 DPA10103-DPB10101 DPA10103-DPB11501 DPA10103-DPB13101 DPA10103-DPB15001 DPA10104-DPB10101 DPA10104-DPB11501 DPA10105-DPB10101 DPA10105-DPB15001 DPA10202-DPB10101 DPA10301-DPB10101 DPA10301-DPB10201 DPA10301-DPB10202 DPA10301-DPB10401 DPA10301-DPB110601 DPA10301-DPB11801 DPA10301-DPB12301 DPA10301-DPB13901 DPA10301-DPB14001 DPA10301-DPB16501 DPA10401-DPB10101 DQA10102-DQB10501 DQA10102-DQB10503 DQA10102-DQB10601 DQA10103-DQB10501 DQA10103-DQB10601 DQA10103-DQB10602 DQA10201-DQB10301 DQA10201-DQB10303 DQA10301-DQB10301 DQA10302-DQB10301 DQA10303-DQB10301 DQA10401-DQB10301 DQA10401-DQB10319 DQA10501-DQB10301 DQA10501-DQB10319 DQA10503-DQB10301 DQA10505-DQB10301 DQA10505-DQB10309 DQA10505-DQB10319 DQA10505-DQB10402 DQA10506-DQB10303 DQA10508-DQB10301 DQA10509-DQB10301 DQA10601-DQB10301
NKRTQDFWEVQLGIPHPAGLKKKKS

SEQ ID NO: 4721 - protein, 19 aa, Human immunodeficiency virus 1
  source 1..19: note = HLAs: DRB1_0101 DRB1_0901 DQA10201-DQB10301
NLPGKWKPKMIGGIGGFIK

SEQ ID NO: 4722 - protein, 20 aa, Human immunodeficiency virus 1
  source 1..20: note = HLAs: DRB1_0101 DRB1_0901 DRB1_1001 DQA10102-DQB10501 DQA10102-DQB10601 DQA10103-DQB10601 DQA10201-DQB10301 DQA10501-DQB10301 DQA10501-DQB10319 DQA10503-DQB10301 DQA10505-DQB10301 DQA10505-DQB10309 DQA10505-DQB10319 DQA10508-DQB10301 DQA10509-DQB10301
NLPGKWKPKMIGGIGGFIKV

SEQ ID NO: 4723 - protein, 21 aa, Human immunodeficiency virus 1
  source 1..21: note = HLAs: DRB1_0101 DRB1_0901 DQA10201-DQB10301 DQA10501-DQB10301 DQA10501-DQB10319 DQA10503-DQB10301 DQA10505-DQB10301 DQA10505-DQB10309 DQA10505-DQB10319 DQA10508-DQB10301 DQA10509-DQB10301
NLPGKWKPKMIGGIGGFIKVR

SEQ ID NO: 4724 - protein, 22 aa, Human immunodeficiency virus 1
  source 1..22: note = HLAs: DRB1_0101 DRB1_0806 DRB1_0901 DRB1_1102 DRB1_1103 DRB1_1104 DRB1_1301 DRB1_1304 DRB1_1501 DQA10102-DQB10501 DQA10201-DQB10301 DQA10501-DQB10301 DQA10501-DQB10319 DQA10503-DQB10301 DQA10505-DQB10301 DQA10505-DQB10309 DQA10505-DQB10319 DQA10508-DQB10301 DQA10509-DQB10301
NLPGKWKPKMIGGIGGFIKVRQ

SEQ ID NO: 4725 - protein, 23 aa, Human immunodeficiency virus 1
  source 1..23: note = HLAs: DRB1_0101 DRB1_0806 DRB1_0901 DRB1_1001 DRB1_1102 DRB1_1103 DRB1_1104 DRB1_1301 DRB1_1304 DRB1_1406 DRB1_1501 DQA10102-DQB10501 DQA10102-DQB10601 DQA10103-DQB10601 DQA10201-DQB10301 DQA10501-DQB10301 DQA10501-DQB10319 DQA10503-DQB10301 DQA10505-DQB10301 DQA10505-DQB10309 DQA10505-DQB10319 DQA10508-DQB10301 DQA10509-DQB10301
NLPGKWKPKMIGGIGGFIKVRQY

SEQ ID NO: 4726 - protein, 15 aa, Human immunodeficiency virus 1
  source 1..15: note = HLAs: DRB1_0101 DRB1_0401 DRB1_0404 DRB1_0405 DRB1_0408 DRB1_0410 DRB1_1001 DQA10102-DQB10501
NNETPGIRYQYNVLP

SEQ ID NO: 4727 - protein, 16 aa, Human immunodeficiency virus 1
  source 1..16: note = HLAs: DRB1_0101 DRB1_0401 DRB1_0404 DRB1_0405 DRB1_0408 DRB1_0410 DRB1_1001 DRB1_1501 DQA10102-DQB10501
NNETPGIRYQYNVLPQ

SEQ ID NO: 4728 - protein, 17 aa, Human immunodeficiency virus 1
  source 1..17: note = HLAs: DRB1_0101 DRB1_0102 DRB1_0401 DRB1_0404 DRB1_0405 DRB1_0408 DRB1_0410 DRB1_0813 DRB1_1001 DRB1_1114 DRB1_1302 DRB1_1501 DRB1_1602 DQA10102-DQB10501
NNETPGIRYQYNVLPQG

SEQ ID NO: 4729 - protein, 18 aa, Human immunodeficiency virus 1
  source 1..18: note = HLAs: DRB1_0401 DRB1_0404 DRB1_0408 DRB1_1001 DQA10102-DQB10501
NNETPGIRYQYNVLPQGW

SEQ ID NO: 4730 - protein, 19 aa, Human immunodeficiency virus 1
  source 1..19: note = HLAs: DRB1_0101 DRB1_0102 DRB1_0401 DRB1_0404 DRB1_0405 DRB1_0408 DRB1_0410 DRB1_0802 DRB1_0809 DRB1_0813 DRB1_1001 DRB1_1114 DRB1_1302 DRB1_1406 DRB1_1501 DRB1_1602 DPA10301-DPB10101 DPA10301-DPB10201 DPA10301-DPB10202 DPA10301-DPB110601 DPA10401-DPB10101 DQA10102-DQB10501 DQA10102-DQB10503 DQA10103-DQB10501
NNETPGIRYQYNVLPQGWK

SEQ ID NO: 4731 - protein, 20 aa, Human immunodeficiency virus 1
  source 1..20: note = HLAs: DRB1_0101 DRB1_0102 DRB1_0401 DRB1_0404 DRB1_0405 DRB1_0408 DRB1_0410 DRB1_0801 DRB1_0802 DRB1_0804 DRB1_0806 DRB1_0809 DRB1_0813 DRB1_1001 DRB1_1101 DRB1_1102 DRB1_1104 DRB1_1114 DRB1_1301 DRB1_1302 DRB1_1304 DRB1_1305 DRB1_1402 DRB1_1403 DRB1_1406 DRB1_1501 DRB1_1502 DRB1_1503 DRB1_1601 DRB1_1602 DPA10103-DPB10101 DPA10103-DPB11501 DPA10103-DPB15001 DPA10104-DPB10101 DPA10104-DPB11501 DPA10105-DPB10101 DPA10105-DPB15001 DPA10202-DPB10101 DPA10202-DPB110601 DPA10202-DPB11901 DPA10202-DPB13101 DPA10301-DPB10101 DPA10301-DPB10201 DPA10301-DPB10202 DPA10301-DPB110601 DPA10301-DPB11801 DPA10301-DPB14001 DPA10301-DPB16501 DPA10401-DPB10101 DPA10401-DPB10201 DPA10401-DPB10202 DPA10401-DPB10501 DQA10102-DQB10501 DQA10102-DQB10503 DQA10103-DQB10501
NNETPGIRYQYNVLPQGWKG

SEQ ID NO: 4732 - protein, 21 aa, Human immunodeficiency virus 1
  source 1..21: note = HLAs: DRB1_0101 DRB1_0102 DRB1_0401 DRB1_0404 DRB1_0405 DRB1_0408 DRB1_0410 DRB1_0801 DRB1_0802 DRB1_0809 DRB1_0813 DRB1_1001 DRB1_1101 DRB1_1102 DRB1_1114 DRB1_1301 DRB1_1302 DRB1_1305 DRB1_1406 DRB1_1501 DRB1_1602 DPA10301-DPB10101 DPA10301-DPB10202 DPA10301-DPB110601 DPA10401-DPB10101 DQA10102-DQB10501 DQA10102-DQB10503 DQA10103-DQB10501
NNETPGIRYQYNVLPQGWKGS

SEQ ID NO: 4733 - protein, 22 aa, Human immunodeficiency virus 1
  source 1..22: note = HLAs: DRB1_0101 DRB1_0102 DRB1_0401 DRB1_0404 DRB1_0405 DRB1_0408 DRB1_0410 DRB1_0801 DRB1_0802 DRB1_0809 DRB1_0813 DRB1_1001 DRB1_1101 DRB1_1114 DRB1_1302 DRB1_1305 DRB1_1402 DRB1_1406 DRB1_1501 DRB1_1601 DRB1_1602 DPA10301-DPB10101 DPA10301-DPB10201 DPA10301-DPB10202 DPA10301-DPB110601 DPA10401-DPB10101 DQA10102-DQB10501 DQA10102-DQB10503 DQA10103-DQB10501
NNETPGIRYQYNVLPQGWKGSP

SEQ ID NO: 4734 - protein, 23 aa, Human immunodeficiency virus 1
  source 1..23: note = HLAs: DRB1_0101 DRB1_0102 DRB1_0401 DRB1_0404 DRB1_0405 DRB1_0408 DRB1_0410 DRB1_0801 DRB1_0802 DRB1_0806 DRB1_0809 DRB1_0813 DRB1_1001 DRB1_1101 DRB1_1102 DRB1_1104 DRB1_1114 DRB1_1301 DRB1_1302 DRB1_1305 DRB1_1402 DRB1_1406 DRB1_1501 DRB1_1601 DRB1_1602 DPA10301-DPB10101 DPA10301-DPB10201 DPA10301-DPB10202 DPA10301-DPB110601 DPA10301-DPB11801 DPA10401-DPB10101 DQA10102-DQB10501 DQA10102-DQB10503 DQA10103-DQB10501
NNETPGIRYQYNVLPQGWKGSPA

SEQ ID NO: 4735 - protein, 24 aa, Human immunodeficiency virus 1
  source 1..24: note = HLAs: DRB1_0101 DRB1_0102 DRB1_0401 DRB1_0404 DRB1_0405 DRB1_0408 DRB1_0410 DRB1_0801 DRB1_0802 DRB1_0806 DRB1_0809 DRB1_0813 DRB1_1001 DRB1_1101 DRB1_1102 DRB1_1104 DRB1_1114 DRB1_1301 DRB1_1302 DRB1_1304 DRB1_1305 DRB1_1402 DRB1_1406 DRB1_1501 DRB1_1601 DRB1_1602 DPA10301-DPB10101 DPA10301-DPB10201 DPA10301-DPB10202 DPA10301-DPB110601 DPA10301-DPB11801 DPA10401-DPB10101 DQA10102-DQB10501 DQA10102-DQB10503 DQA10103-DQB10501
NNETPGIRYQYNVLPQGWKGSPAI

SEQ ID NO: 4736 - protein, 25 aa, Human immunodeficiency virus 1
  source 1..25: note = HLAs: DRB1_0101 DRB1_0102 DRB1_0401 DRB1_0404 DRB1_0405 DRB1_0408 DRB1_0410 DRB1_0801 DRB1_0802 DRB1_0804 DRB1_0806 DRB1_0809 DRB1_0813 DRB1_1001 DRB1_1101 DRB1_1102 DRB1_1104 DRB1_1114 DRB1_1301 DRB1_1302 DRB1_1304 DRB1_1305 DRB1_1402 DRB1_1406 DRB1_1501 DRB1_1502 DRB1_1601 DRB1_1602 DPA10301-DPB10101 DPA10301-DPB10201 DPA10301-DPB10202 DPA10301-DPB110601 DPA10301-DPB11801 DPA10401-DPB10101 DQA10102-DQB10501 DQA10102-DQB10503 DQA10103-DQB10501
NNETPGIRYQYNVLPQGWKGSPAIF

SEQ ID NO: 4737 - protein, 15 aa, Human immunodeficiency virus 1
  source 1..15: note = HLAs: DRB1_1102 DRB1_1103 DRB1_1104 DRB1_1301 DRB1_1304
NPPIPVGEIYKRWII

SEQ ID NO: 4738 - protein, 16 aa, Human immunodeficiency virus 1
  source 1..16: note = HLAs: DRB1_1304 DPA10103-DPB11501 DPA10104-DPB11501 DPA10301-DPB10201 DPA10301-DPB10202
NPPIPVGEIYKRWIIL

SEQ ID NO: 4739 - protein, 17 aa, Human immunodeficiency virus 1
  source 1..17: note = HLAs: DRB1_1304 DPA10103-DPB11501 DPA10104-DPB11501 DPA10301-DPB10201 DPA10301-DPB10202
NPPIPVGEIYKRWIILG

SEQ ID NO: 4740 - protein, 18 aa, Human immunodeficiency virus 1
  source 1..18: note = HLAs: DPA10103-DPB11501 DPA10104-DPB11501 DPA10301-DPB10201 DPA10301-DPB10202
NPPIPVGEIYKRWIILGL

SEQ ID NO: 4741 - protein, 19 aa, Human immunodeficiency virus 1
  source 1..19: note = HLAs: DRB1_1001 DPA10103-DPB10101 DPA10103-DPB10201 DPA10103-DPB10202 DPA10103-DPB10501 DPA10103-DPB11501 DPA10103-DPB11601 DPA10103-DPB11901 DPA10103-DPB13101 DPA10103-DPB14801 DPA10103-DPB15001 DPA10104-DPB10101 DPA10104-DPB11501 DPA10105-DPB10101 DPA10105-DPB15001 DPA10201-DPB110601 DPA10201-DPB11901 DPA10202-DPB10101 DPA10202-DPB110601 DPA10202-DPB11901 DPA10301-DPB10101 DPA10301-DPB10201 DPA10301-DPB10202 DPA10301-DPB10401 DPA10301-DPB110601 DPA10301-DPB11801 DPA10301-DPB12301 DPA10301-DPB13901 DPA10301-DPB14001 DPA10301-DPB16501 DPA10401-DPB10101 DPA10401-DPB10201 DPA10401-DPB10202 DPA10401-DPB10501 DQA10102-DQB10501
NPPIPVGEIYKRWIILGLN

SEQ ID NO: 4742 - protein, 20 aa, Human immunodeficiency virus 1
  source 1..20: note = HLAs: DRB1_0801 DRB1_0804 DRB1_0806 DRB1_1001 DRB1_1104 DRB1_1304 DRB1_1406 DRB1_1501 DRB1_1503 DRB1_1601 DPA10103-DPB10101 DPA10103-DPB10201 DPA10103-DPB10202 DPA10103-DPB10301 DPA10103-DPB10501 DPA10103-DPB10601 DPA10103-DPB11101 DPA10103-DPB112401 DPA10103-DPB113101 DPA10103-DPB11401 DPA10103-DPB11501 DPA10103-DPB11601 DPA10103-DPB11701 DPA10103-DPB11801 DPA10103-DPB11901 DPA10103-DPB12001 DPA10103-DPB12101 DPA10103-DPB12901 DPA10103-DPB13001 DPA10103-DPB13101 DPA10103-DPB13401 DPA10103-DPB14001 DPA10103-DPB14101 DPA10103-DPB14801 DPA10103-DPB15001 DPA10103-DPB15501 DPA10104-DPB10101 DPA10104-DPB10301 DPA10104-DPB11501 DPA10105-DPB10101 DPA10105-DPB10301 DPA10105-DPB11801 DPA10105-DPB15001 DPA10106-DPB10101 DPA10201-DPB10101 DPA10201-DPB10501 DPA10201-DPB110601 DPA10201-DPB11501 DPA10201-DPB11601 DPA10201-DPB11901 DPA10202-DPB10101 DPA10202-DPB10202 DPA10202-DPB10501 DPA10202-DPB110601 DPA10202-DPB11101 DPA10202-DPB11901 DPA10202-DPB12101 DPA10202-DPB13001 DPA10202-DPB13101; note = HLAs: DPA10202-DPB13801 DPA10202-DPB15501 DPA10202-DPB16501 DPA10301-DPB10101 DPA10301-DPB10201 DPA10301-DPB10202 DPA10301-DPB10301 DPA10301-DPB10401 DPA10301-DPB10402 DPA10301-DPB110501 DPA10301-DPB110601 DPA10301-DPB11101 DPA10301-DPB11701 DPA10301-DPB11801 DPA10301-DPB12301 DPA10301-DPB13901 DPA10301-DPB14001 DPA10301-DPB14901 DPA10301-DPB15501 DPA10301-DPB16501 DPA10301-DPB17501 DPA10301-DPB18001 DPA10401-DPB10101 DPA10401-DPB10201 DPA10401-DPB10202 DPA10401-DPB10301 DPA10401-DPB10501 DPA10401-DPB11301 DPA10401-DPB113301 DPA10401-DPB11401 DQA10102-DQB10501 DQA10103-DQB10501
NPPIPVGEIYKRWIILGLNK

SEQ ID NO: 4743 - protein, 21 aa, Human immunodeficiency virus 1
  source 1..21: note = HLAs: DRB1_0101 DRB1_1001 DRB1_1104 DRB1_1304 DRB1_1501 DRB1_1602 DPA10103-DPB10101 DPA10103-DPB10201 DPA10103-DPB10202 DPA10103-DPB10501 DPA10103-DPB10601 DPA10103-DPB11101 DPA10103-DPB11501 DPA10103-DPB11601 DPA10103-DPB11901 DPA10103-DPB12001 DPA10103-DPB13101 DPA10103-DPB13401 DPA10103-DPB14001 DPA10103-DPB14101 DPA10103-DPB14801 DPA10103-DPB15001 DPA10103-DPB15501 DPA10104-DPB10101 DPA10104-DPB11501 DPA10105-DPB10101 DPA10105-DPB15001 DPA10106-DPB10101 DPA10201-DPB10101 DPA10201-DPB110601 DPA10201-DPB11501 DPA10201-DPB11601 DPA10201-DPB11901 DPA10202-DPB10101 DPA10202-DPB10202 DPA10202-DPB10501 DPA10202-DPB110601 DPA10202-DPB11901 DPA10202-DPB13801 DPA10301-DPB10101 DPA10301-DPB10201 DPA10301-DPB10202 DPA10301-DPB10401 DPA10301-DPB10402 DPA10301-DPB110501 DPA10301-DPB110601 DPA10301-DPB11101 DPA10301-DPB11701 DPA10301-DPB11801 DPA10301-DPB12301 DPA10301-DPB13901 DPA10301-DPB14001 DPA10301-DPB14901 DPA10301-DPB15501 DPA10301-DPB16501 DPA10301-DPB17501 DPA10301-DPB18001; note = HLAs: DPA10401-DPB10101 DPA10401-DPB10201 DPA10401-DPB10202 DPA10401-DPB10301 DPA10401-DPB10501 DPA10401-DPB11301 DPA10401-DPB113301 DQA10102-DQB10501 DQA10103-DQB10501
NPPIPVGEIYKRWIILGLNKI

SEQ ID NO: 4744 - protein, 22 aa, Human immunodeficiency virus 1
  source 1..22: note = HLAs: DRB1_0101 DRB1_0408 DRB1_0701 DRB1_0806 DRB1_0813 DRB1_1001 DRB1_1102 DRB1_1104 DRB1_1114 DRB1_1301 DRB1_1302 DRB1_1304 DRB1_1402 DRB1_1406 DRB1_1501 DRB1_1502 DRB1_1601 DRB1_1602 DPA10103-DPB10101 DPA10103-DPB10201 DPA10103-DPB10202 DPA10103-DPB10501 DPA10103-DPB10601 DPA10103-DPB11101 DPA10103-DPB11501 DPA10103-DPB11601 DPA10103-DPB11801 DPA10103-DPB11901 DPA10103-DPB12001 DPA10103-DPB12101 DPA10103-DPB13001 DPA10103-DPB13101 DPA10103-DPB13401 DPA10103-DPB14001 DPA10103-DPB14101 DPA10103-DPB14801 DPA10103-DPB15001 DPA10103-DPB15501 DPA10104-DPB10101 DPA10104-DPB11501 DPA10105-DPB10101 DPA10105-DPB11801 DPA10105-DPB15001 DPA10106-DPB10101 DPA10201-DPB10101 DPA10201-DPB110601 DPA10201-DPB11501 DPA10201-DPB11601 DPA10201-DPB11901 DPA10202-DPB10101 DPA10202-DPB10201 DPA10202-DPB10202 DPA10202-DPB10501 DPA10202-DPB110601 DPA10202-DPB11901 DPA10202-DPB13101 DPA10202-DPB13801 DPA10202-DPB15501 DPA10202-DPB16501 DPA10301-DPB10101 DPA10301-DPB10201 DPA10301-DPB10202 DPA10301-DPB10401; note = HLAs: DPA10301-DPB10402 DPA10301-DPB110501 DPA10301-DPB110601 DPA10301-DPB11101 DPA10301-DPB11701 DPA10301-DPB11801 DPA10301-DPB12301 DPA10301-DPB13901 DPA10301-DPB14001 DPA10301-DPB14901 DPA10301-DPB15501 DPA10301-DPB16501 DPA10301-DPB17501 DPA10301-DPB18001 DPA10401-DPB10101 DPA10401-DPB10201 DPA10401-DPB10202 DPA10401-DPB10301 DPA10401-DPB10501 DPA10401-DPB11301 DPA10401-DPB113301 DPA10401-DPB11401 DQA10102-DQB10501 DQA10103-DQB10501
NPPIPVGEIYKRWIILGLNKIV

SEQ ID NO: 4745 - protein, 23 aa, Human immunodeficiency virus 1
  source 1..23: note = HLAs: DRB1_0101 DRB1_0102 DRB1_0404 DRB1_0405 DRB1_0408 DRB1_0410 DRB1_0701 DRB1_0801 DRB1_0802 DRB1_0804 DRB1_0806 DRB1_0809 DRB1_0813 DRB1_0901 DRB1_1001 DRB1_1101 DRB1_1102 DRB1_1103 DRB1_1104 DRB1_1114 DRB1_1201 DRB1_1202 DRB1_1301 DRB1_1302 DRB1_1304 DRB1_1305 DRB1_1312 DRB1_1401 DRB1_1402 DRB1_1403 DRB1_1404 DRB1_1405 DRB1_1406 DRB1_1454 DRB1_1501 DRB1_1502 DRB1_1503 DRB1_1601 DRB1_1602 DPA10103-DPB10101 DPA10103-DPB10201 DPA10103-DPB10202 DPA10103-DPB10301 DPA10103-DPB10501 DPA10103-DPB10601 DPA10103-DPB11101 DPA10103-DPB112401 DPA10103-DPB113101 DPA10103-DPB11401 DPA10103-DPB11501 DPA10103-DPB11601 DPA10103-DPB11701 DPA10103-DPB11801 DPA10103-DPB11901 DPA10103-DPB12001 DPA10103-DPB12101 DPA10103-DPB13001 DPA10103-DPB13101 DPA10103-DPB13401 DPA10103-DPB14001 DPA10103-DPB14101 DPA10103-DPB14801 DPA10103-DPB15001 DPA10103-DPB15501 DPA10104-DPB10101 DPA10104-DPB10301 DPA10104-DPB11501 DPA10105-DPB10101 DPA10105-DPB10301 DPA10105-DPB11801 DPA10105-DPB15001 DPA10106-DPB10101; note = HLAs: DPA10201-DPB10101 DPA10201-DPB10501 DPA10201-DPB110601 DPA10201-DPB11501 DPA10201-DPB11601 DPA10201-DPB11901 DPA10202-DPB10101 DPA10202-DPB10201 DPA10202-DPB10202 DPA10202-DPB10501 DPA10202-DPB110601 DPA10202-DPB11101 DPA10202-DPB11801 DPA10202-DPB11901 DPA10202-DPB13101 DPA10202-DPB13801 DPA10202-DPB15501 DPA10202-DPB16501 DPA10301-DPB10101 DPA10301-DPB10201 DPA10301-DPB10202 DPA10301-DPB10401 DPA10301-DPB10402 DPA10301-DPB110501 DPA10301-DPB110601 DPA10301-DPB11101 DPA10301-DPB11301 DPA10301-DPB11701 DPA10301-DPB11801 DPA10301-DPB12301 DPA10301-DPB13901 DPA10301-DPB14001 DPA10301-DPB14901 DPA10301-DPB15501 DPA10301-DPB16501 DPA10301-DPB17501 DPA10301-DPB18001 DPA10401-DPB10101 DPA10401-DPB10201 DPA10401-DPB10202 DPA10401-DPB10301 DPA10401-DPB10402 DPA10401-DPB10501 DPA10401-DPB110501 DPA10401-DPB11301 DPA10401-DPB113301 DPA10401-DPB11401 DPA10401-DPB14901 DQA10102-DQB10501 DQA10103-DQB10501
NPPIPVGEIYKRWIILGLNKIVR

SEQ ID NO: 4746 - protein, 24 aa, Human immunodeficiency virus 1
  source 1..24: note = HLAs: DRB1_0101 DRB1_0102 DRB1_0404 DRB1_0405 DRB1_0408 DRB1_0410 DRB1_0701 DRB1_0801 DRB1_0802 DRB1_0803 DRB1_0804 DRB1_0806 DRB1_0809 DRB1_0813 DRB1_0901 DRB1_1001 DRB1_1101 DRB1_1102 DRB1_1103 DRB1_1104 DRB1_1114 DRB1_1201 DRB1_1202 DRB1_1301 DRB1_1302 DRB1_1303 DRB1_1304 DRB1_1305 DRB1_1312 DRB1_1401 DRB1_1402 DRB1_1403 DRB1_1404 DRB1_1405 DRB1_1406 DRB1_1407 DRB1_1418 DRB1_1454 DRB1_1501 DRB1_1502 DRB1_1503 DRB1_1601 DRB1_1602 DPA10103-DPB10101 DPA10103-DPB10201 DPA10103-DPB10202 DPA10103-DPB10301 DPA10103-DPB10401 DPA10103-DPB10501 DPA10103-DPB10601 DPA10103-DPB11101 DPA10103-DPB112401 DPA10103-DPB112601 DPA10103-DPB11301 DPA10103-DPB113101 DPA10103-DPB113301 DPA10103-DPB11401 DPA10103-DPB11501 DPA10103-DPB11601 DPA10103-DPB11701 DPA10103-DPB11801 DPA10103-DPB11901 DPA10103-DPB12001 DPA10103-DPB12101 DPA10103-DPB12301 DPA10103-DPB13001 DPA10103-DPB13101 DPA10103-DPB13401 DPA10103-DPB13901 DPA10103-DPB14001 DPA10103-DPB14101 DPA10103-DPB14801 DPA10103-DPB15001 DPA10103-DPB15501; note = HLAs: DPA10104-DPB10101 DPA10104-DPB10301 DPA10104-DPB11301 DPA10104-DPB11501 DPA10105-DPB10101 DPA10105-DPB10301 DPA10105-DPB10401 DPA10105-DPB11801 DPA10105-DPB15001 DPA10106-DPB10101 DPA10201-DPB10101 DPA10201-DPB10202 DPA10201-DPB10501 DPA10201-DPB110601 DPA10201-DPB11501 DPA10201-DPB11601 DPA10201-DPB11901 DPA10202-DPB10101 DPA10202-DPB10201 DPA10202-DPB10202 DPA10202-DPB10401 DPA10202-DPB10501 DPA10202-DPB110601 DPA10202-DPB11101 DPA10202-DPB11301 DPA10202-DPB11801 DPA10202-DPB11901 DPA10202-DPB12101 DPA10202-DPB13001 DPA10202-DPB13101 DPA10202-DPB13801 DPA10202-DPB15501 DPA10202-DPB16501 DPA10301-DPB10101 DPA10301-DPB10201 DPA10301-DPB10202 DPA10301-DPB10401 DPA10301-DPB10402 DPA10301-DPB10901 DPA10301-DPB110501 DPA10301-DPB110601 DPA10301-DPB11101 DPA10301-DPB11301 DPA10301-DPB11701 DPA10301-DPB11801 DPA10301-DPB12301 DPA10301-DPB13901 DPA10301-DPB14001 DPA10301-DPB14901 DPA10301-DPB15501 DPA10301-DPB16501 DPA10301-DPB17501 DPA10301-DPB18001 DPA10401-DPB10101 DPA10401-DPB10201; note = HLAs: DPA10401-DPB10202 DPA10401-DPB10301 DPA10401-DPB10402 DPA10401-DPB10501 DPA10401-DPB110501 DPA10401-DPB11301 DPA10401-DPB113301 DPA10401-DPB11401 DPA10401-DPB14901 DQA10102-DQB10501 DQA10102-DQB10503 DQA10103-DQB10501 DQA10103-DQB10609
NPPIPVGEIYKRWIILGLNKIVRM

SEQ ID NO: 4747 - protein, 25 aa, Human immunodeficiency virus 1
  source 1..25: note = HLAs: DRB1_0101 DRB1_0102 DRB1_0401 DRB1_0404 DRB1_0405 DRB1_0408 DRB1_0410 DRB1_0701 DRB1_0801 DRB1_0802 DRB1_0803 DRB1_0804 DRB1_0806 DRB1_0809 DRB1_0813 DRB1_0901 DRB1_1001 DRB1_1101 DRB1_1102 DRB1_1103 DRB1_1104 DRB1_1114 DRB1_1201 DRB1_1202 DRB1_1301 DRB1_1302 DRB1_1303 DRB1_1304 DRB1_1305 DRB1_1312 DRB1_1401 DRB1_1402 DRB1_1403 DRB1_1404 DRB1_1405 DRB1_1406 DRB1_1407 DRB1_1418 DRB1_1454 DRB1_1501 DRB1_1502 DRB1_1503 DRB1_1601 DRB1_1602 DPA10103-DPB10101 DPA10103-DPB10201 DPA10103-DPB10202 DPA10103-DPB10301 DPA10103-DPB10401 DPA10103-DPB10501 DPA10103-DPB10601 DPA10103-DPB11101 DPA10103-DPB112401 DPA10103-DPB112601 DPA10103-DPB11301 DPA10103-DPB113101 DPA10103-DPB113301 DPA10103-DPB11401 DPA10103-DPB11501 DPA10103-DPB11601 DPA10103-DPB11701 DPA10103-DPB11801 DPA10103-DPB11901 DPA10103-DPB12001 DPA10103-DPB12101 DPA10103-DPB12301 DPA10103-DPB13001 DPA10103-DPB13101 DPA10103-DPB13401 DPA10103-DPB13901 DPA10103-DPB14001 DPA10103-DPB14101 DPA10103-DPB14801 DPA10103-DPB15001; note = HLAs: DPA10103-DPB15501 DPA10104-DPB10101 DPA10104-DPB10301 DPA10104-DPB11301 DPA10104-DPB11501 DPA10105-DPB10101 DPA10105-DPB10301 DPA10105-DPB10401 DPA10105-DPB11801 DPA10105-DPB15001 DPA10106-DPB10101 DPA10201-DPB10101 DPA10201-DPB10202 DPA10201-DPB10501 DPA10201-DPB110601 DPA10201-DPB11501 DPA10201-DPB11601 DPA10201-DPB11901 DPA10201-DPB15501 DPA10202-DPB10101 DPA10202-DPB10201 DPA10202-DPB10202 DPA10202-DPB10401 DPA10202-DPB10501 DPA10202-DPB110601 DPA10202-DPB11101 DPA10202-DPB11301 DPA10202-DPB113101 DPA10202-DPB11701 DPA10202-DPB11801 DPA10202-DPB11901 DPA10202-DPB12101 DPA10202-DPB13001 DPA10202-DPB13101 DPA10202-DPB13801 DPA10202-DPB15501 DPA10202-DPB16501 DPA10301-DPB10101 DPA10301-DPB10201 DPA10301-DPB10202 DPA10301-DPB10401 DPA10301-DPB10402 DPA10301-DPB10901 DPA10301-DPB110501 DPA10301-DPB110601 DPA10301-DPB11101 DPA10301-DPB11301 DPA10301-DPB11701 DPA10301-DPB11801 DPA10301-DPB12301 DPA10301-DPB13901 DPA10301-DPB14001 DPA10301-DPB14901 DPA10301-DPB15501; note = HLAs: DPA10301-DPB16501 DPA10301-DPB17501 DPA10301-DPB18001 DPA10401-DPB10101 DPA10401-DPB10201 DPA10401-DPB10202 DPA10401-DPB10301 DPA10401-DPB10402 DPA10401-DPB10501 DPA10401-DPB110501 DPA10401-DPB11301 DPA10401-DPB113301 DPA10401-DPB11401 DPA10401-DPB14901 DQA10102-DQB10501 DQA10102-DQB10503 DQA10103-DQB10501 DQA10103-DQB10609
NPPIPVGEIYKRWIILGLNKIVRMY

SEQ ID NO: 4748 - protein, 15 aa, Human immunodeficiency virus 1
  source 1..15: note = HLAs: DQA10201-DQB10301
NPQSQGVVESMNKEL

SEQ ID NO: 4749 - protein, 19 aa, Human immunodeficiency virus 1
  source 1..19: note = HLAs: DRB1_1104
NPQSQGVVESMNKELKKII

SEQ ID NO: 4750 - protein, 20 aa, Human immunodeficiency virus 1
  source 1..20: note = HLAs: DRB1_0806 DRB1_1101 DRB1_1102 DRB1_1103 DRB1_1104 DRB1_1114 DRB1_1301 DRB1_1302 DRB1_1304 DRB1_1305 DRB1_1406
NPQSQGVVESMNKELKKIIG

SEQ ID NO: 4751 - protein, 21 aa, Human immunodeficiency virus 1
  source 1..21: note = HLAs: DRB1_0806 DRB1_1102 DRB1_1103 DRB1_1104 DRB1_1301 DRB1_1304 DRB1_1406
NPQSQGVVESMNKELKKIIGQ

SEQ ID NO: 4752 - protein, 22 aa, Human immunodeficiency virus 1
  source 1..22: note = HLAs: DRB1_0806 DRB1_1101 DRB1_1102 DRB1_1103 DRB1_1104 DRB1_1301 DRB1_1304 DRB1_1305 DRB1_1406
NPQSQGVVESMNKELKKIIGQV

SEQ ID NO: 4753 - protein, 23 aa, Human immunodeficiency virus 1
  source 1..23: note = HLAs: DRB1_0804 DRB1_0806 DRB1_1101 DRB1_1102 DRB1_1103 DRB1_1104 DRB1_1301 DRB1_1304 DRB1_1305 DRB1_1406
NPQSQGVVESMNKELKKIIGQVR

SEQ ID NO: 4754 - protein, 15 aa, Human immunodeficiency virus 1
  source 1..15: note = HLAs: DRB1_0804 DRB1_0806 DRB1_1101 DRB1_1102 DRB1_1103 DRB1_1104 DRB1_1301 DRB1_1304 DRB1_1305 DRB1_1406
NPYNTPVFAIKKKDS

SEQ ID NO: 4755 - protein, 16 aa, Human immunodeficiency virus 1
  source 1..16: note = HLAs: DRB1_0806 DRB1_1101 DRB1_1103 DRB1_1104 DRB1_1305
NPYNTPVFAIKKKDST

SEQ ID NO: 4756 - protein, 17 aa, Human immunodeficiency virus 1
  source 1..17: note = HLAs: DRB1_0804 DRB1_0806 DRB1_1101 DRB1_1102 DRB1_1103 DRB1_1104 DRB1_1301 DRB1_1305 DRB1_1406
NPYNTPVFAIKKKDSTK

SEQ ID NO: 4757 - protein, 18 aa, Human immunodeficiency virus 1
  source 1..18: note = HLAs: DRB1_1101 DRB1_1103 DRB1_1104 DRB1_1305
NPYNTPVFAIKKKDSTKW

SEQ ID NO: 4758 - protein, 19 aa, Human immunodeficiency virus 1
  source 1..19: note = HLAs: DRB1_0804 DRB1_0806 DRB1_1101 DRB1_1102 DRB1_1103 DRB1_1104 DRB1_1301 DRB1_1304 DRB1_1305 DRB1_1406
NPYNTPVFAIKKKDSTKWR

SEQ ID NO: 4759 - protein, 20 aa, Human immunodeficiency virus 1
  source 1..20: note = HLAs: DRB1_0801 DRB1_0802 DRB1_0804 DRB1_0806 DRB1_0809 DRB1_1101 DRB1_1102 DRB1_1103 DRB1_1104 DRB1_1301 DRB1_1304 DRB1_1305 DRB1_1406
NPYNTPVFAIKKKDSTKWRK

SEQ ID NO: 4760 - protein, 21 aa, Human immunodeficiency virus 1
  source 1..21: note = HLAs: DRB1_0801 DRB1_0804 DRB1_0806 DRB1_1101 DRB1_1102 DRB1_1103 DRB1_1104 DRB1_1301 DRB1_1304 DRB1_1305 DRB1_1406
NPYNTPVFAIKKKDSTKWRKL

SEQ ID NO: 4761 - protein, 22 aa, Human immunodeficiency virus 1
  source 1..22: note = HLAs: DRB1_0801 DRB1_0804 DRB1_0806 DRB1_1101 DRB1_1102 DRB1_1103 DRB1_1104 DRB1_1301 DRB1_1304 DRB1_1305 DRB1_1406
NPYNTPVFAIKKKDSTKWRKLV

SEQ ID NO: 4762 - protein, 23 aa, Human immunodeficiency virus 1
  source 1..23: note = HLAs: DRB1_0801 DRB1_0804 DRB1_0806 DRB1_1101 DRB1_1102 DRB1_1103 DRB1_1104 DRB1_1301 DRB1_1304 DRB1_1305 DRB1_1406
NPYNTPVFAIKKKDSTKWRKLVD

SEQ ID NO: 4763 - protein, 24 aa, Human immunodeficiency virus 1
  source 1..24: note = HLAs: DRB1_0801 DRB1_0804 DRB1_0806 DRB1_1101 DRB1_1102 DRB1_1103 DRB1_1104 DRB1_1301 DRB1_1304 DRB1_1305 DRB1_1406 DPA10103-DPB11501 DPA10103-DPB15001 DPA10104-DPB11501 DPA10105-DPB15001
NPYNTPVFAIKKKDSTKWRKLVDF

SEQ ID NO: 4764 - protein, 25 aa, Human immunodeficiency virus 1
  source 1..25: note = HLAs: DRB1_0801 DRB1_0804 DRB1_0806 DRB1_1101 DRB1_1102 DRB1_1103 DRB1_1104 DRB1_1301 DRB1_1304 DRB1_1305 DRB1_1406 DPA10103-DPB11501 DPA10103-DPB15001 DPA10104-DPB11501 DPA10105-DPB15001 DPA10202-DPB13101 DPA10301-DPB10201 DPA10301-DPB110601 DPA10401-DPB10101
NPYNTPVFAIKKKDSTKWRKLVDFR

SEQ ID NO: 4765 - protein, 14 aa, Human immunodeficiency virus 1
  source 1..14: note = HLAs: DRB1_0101 DQA10201-DQB10301
NTMLNTVGGHQAAM

SEQ ID NO: 4766 - protein, 15 aa, Human immunodeficiency virus 1
  source 1..15: note = HLAs: DRB1_0101 DRB1_0102 DRB1_0901 DRB1_1001 DQA10102-DQB10601 DQA10103-DQB10601 DQA10201-DQB10301 DQA10201-DQB10303 DQA10301-DQB10301 DQA10302-DQB10301 DQA10303-DQB10301 DQA10501-DQB10301 DQA10501-DQB10319 DQA10503-DQB10301 DQA10505-DQB10301 DQA10505-DQB10309 DQA10505-DQB10319 DQA10505-DQB10402 DQA10506-DQB10303 DQA10508-DQB10301 DQA10509-DQB10301
NTMLNTVGGHQAAMQ

SEQ ID NO: 4767 - protein, 16 aa, Human immunodeficiency virus 1
  source 1..16: note = HLAs: DRB1_0101 DQA10102-DQB10501 DQA10102-DQB10601 DQA10103-DQB10601 DQA10201-DQB10301 DQA10201-DQB10303 DQA10301-DQB10301 DQA10302-DQB10301 DQA10303-DQB10301 DQA10501-DQB10301 DQA10501-DQB10319 DQA10503-DQB10301 DQA10505-DQB10301 DQA10505-DQB10309 DQA10505-DQB10319 DQA10505-DQB10402 DQA10506-DQB10303 DQA10508-DQB10301 DQA10509-DQB10301
NTMLNTVGGHQAAMQM

SEQ ID NO: 4768 - protein, 17 aa, Human immunodeficiency virus 1
  source 1..17: note = HLAs: DRB1_0101 DRB1_1001 DQA10102-DQB10501 DQA10102-DQB10601 DQA10103-DQB10601 DQA10103-DQB10609 DQA10201-DQB10301 DQA10201-DQB10303 DQA10501-DQB10301 DQA10501-DQB10319 DQA10503-DQB10301 DQA10505-DQB10301 DQA10505-DQB10309 DQA10505-DQB10319 DQA10505-DQB10402 DQA10506-DQB10303 DQA10508-DQB10301 DQA10509-DQB10301
NTMLNTVGGHQAAMQML

SEQ ID NO: 4769 - protein, 18 aa, Human immunodeficiency virus 1
  source 1..18: note = HLAs: DQA10102-DQB10601 DQA10103-DQB10601 DQA10201-DQB10301
NTMLNTVGGHQAAMQMLK

SEQ ID NO: 4770 - protein, 19 aa, Human immunodeficiency virus 1
  source 1..19: note = HLAs: DRB1_0101 DQA10102-DQB10501 DQA10102-DQB10601 DQA10102-DQB10602 DQA10102-DQB10609 DQA10102-DQB10611 DQA10103-DQB10601 DQA10103-DQB10609 DQA10201-DQB10301 DQA10201-DQB10303 DQA10506-DQB10303
NTMLNTVGGHQAAMQMLKD

SEQ ID NO: 4771 - protein, 20 aa, Human immunodeficiency virus 1
  source 1..20: note = HLAs: DRB1_0101 DRB1_1001 DPA10401-DPB10101 DQA10102-DQB10501 DQA10102-DQB10503 DQA10102-DQB10601 DQA10102-DQB10602 DQA10102-DQB10609 DQA10102-DQB10611 DQA10103-DQB10501 DQA10103-DQB10601 DQA10103-DQB10602 DQA10103-DQB10609 DQA10201-DQB10301 DQA10201-DQB10303 DQA10505-DQB10402 DQA10506-DQB10303
NTMLNTVGGHQAAMQMLKDT

SEQ ID NO: 4772 - protein, 21 aa, Human immunodeficiency virus 1
  source 1..21: note = HLAs: DRB1_0101 DRB1_1001 DQA10102-DQB10501 DQA10102-DQB10601 DQA10102-DQB10609 DQA10103-DQB10601 DQA10103-DQB10609 DQA10201-DQB10301
NTMLNTVGGHQAAMQMLKDTI

SEQ ID NO: 4773 - protein, 22 aa, Human immunodeficiency virus 1
  source 1..22: note = HLAs: DRB1_0101 DRB1_1001 DPA10401-DPB10101 DQA10102-DQB10501 DQA10102-DQB10601 DQA10102-DQB10609 DQA10103-DQB10601 DQA10103-DQB10609 DQA10201-DQB10301
NTMLNTVGGHQAAMQMLKDTIN

SEQ ID NO: 4774 - protein, 13 aa, Human immunodeficiency virus 1
  source 1..13: note = HLAs: DPA10103-DPB11501 DPA10104-DPB11501 DPA10301-DPB10201 DPA10301-DPB14001
NTPPLVKLWYQLE

SEQ ID NO: 4775 - protein, 13 aa, Human immunodeficiency virus 1
  source 1..13: note = HLAs: DRB1_1104
NTPVFAIKKKDST

SEQ ID NO: 4776 - protein, 14 aa, Human immunodeficiency virus 1
  source 1..14: note = HLAs: DRB1_0804 DRB1_0806 DRB1_1101 DRB1_1103 DRB1_1104 DRB1_1305
NTPVFAIKKKDSTK

SEQ ID NO: 4777 - protein, 15 aa, Human immunodeficiency virus 1
  source 1..15: note = HLAs: DRB1_0801 DRB1_0802 DRB1_0804 DRB1_0806 DRB1_0809 DRB1_1101 DRB1_1102 DRB1_1103 DRB1_1104 DRB1_1301 DRB1_1304 DRB1_1305 DRB1_1406
NTPVFAIKKKDSTKW

SEQ ID NO: 4778 - protein, 16 aa, Human immunodeficiency virus 1
  source 1..16: note = HLAs: DRB1_0804 DRB1_0806 DRB1_1101 DRB1_1102 DRB1_1103 DRB1_1104 DRB1_1301 DRB1_1304 DRB1_1305 DRB1_1406
NTPVFAIKKKDSTKWR

SEQ ID NO: 4779 - protein, 17 aa, Human immunodeficiency virus 1
  source 1..17: note = HLAs: DRB1_0804 DRB1_0806 DRB1_1101 DRB1_1102 DRB1_1103 DRB1_1104 DRB1_1301 DRB1_1304 DRB1_1305 DRB1_1406
NTPVFAIKKKDSTKWRK

SEQ ID NO: 4780 - protein, 18 aa, Human immunodeficiency virus 1
  source 1..18: note = HLAs: DRB1_1103 DRB1_1104
NTPVFAIKKKDSTKWRKL

SEQ ID NO: 4781 - protein, 19 aa, Human immunodeficiency virus 1
  source 1..19: note = HLAs: DRB1_0804 DRB1_0806 DRB1_1101 DRB1_1102 DRB1_1103 DRB1_1104 DRB1_1301 DRB1_1304 DRB1_1305 DRB1_1406
NTPVFAIKKKDSTKWRKLV

SEQ ID NO: 4782 - protein, 20 aa, Human immunodeficiency virus 1
  source 1..20: note = HLAs: DRB1_0801 DRB1_0802 DRB1_0804 DRB1_0806 DRB1_0809 DRB1_1101 DRB1_1102 DRB1_1103 DRB1_1104 DRB1_1301 DRB1_1304 DRB1_1305 DRB1_1406
NTPVFAIKKKDSTKWRKLVD

SEQ ID NO: 4783 - protein, 21 aa, Human immunodeficiency virus 1
  source 1..21: note = HLAs: DRB1_0801 DRB1_0804 DRB1_0806 DRB1_1101 DRB1_1102 DRB1_1103 DRB1_1104 DRB1_1301 DRB1_1304 DRB1_1305 DRB1_1406
NTPVFAIKKKDSTKWRKLVDF

SEQ ID NO: 4784 - protein, 22 aa, Human immunodeficiency virus 1
  source 1..22: note = HLAs: DRB1_0801 DRB1_0804 DRB1_0806 DRB1_1101 DRB1_1102 DRB1_1103 DRB1_1104 DRB1_1301 DRB1_1304 DRB1_1305 DRB1_1406
NTPVFAIKKKDSTKWRKLVDFR

SEQ ID NO: 4785 - protein, 23 aa, Human immunodeficiency virus 1
  source 1..23: note = HLAs: DRB1_0801 DRB1_0804 DRB1_0806 DRB1_1101 DRB1_1102 DRB1_1103 DRB1_1104 DRB1_1301 DRB1_1304 DRB1_1305 DRB1_1406 DPA10202-DPB13101
NTPVFAIKKKDSTKWRKLVDFRE

SEQ ID NO: 4786 - protein, 24 aa, Human immunodeficiency virus 1
  source 1..24: note = HLAs: DRB1_0405 DRB1_0410 DRB1_0801 DRB1_0804 DRB1_0806 DRB1_1101 DRB1_1102 DRB1_1103 DRB1_1104 DRB1_1301 DRB1_1304 DRB1_1305 DRB1_1406 DPA10103-DPB10101 DPA10103-DPB10201 DPA10103-DPB10202 DPA10103-DPB11501 DPA10103-DPB11601 DPA10103-DPB11901 DPA10103-DPB13101 DPA10103-DPB13401 DPA10103-DPB14101 DPA10103-DPB14801 DPA10103-DPB15001 DPA10104-DPB10101 DPA10104-DPB11501 DPA10105-DPB10101 DPA10105-DPB15001 DPA10201-DPB110601 DPA10201-DPB11601 DPA10201-DPB11901 DPA10202-DPB10101 DPA10202-DPB10501 DPA10202-DPB110601 DPA10202-DPB11901 DPA10202-DPB13101 DPA10202-DPB13801 DPA10202-DPB16501 DPA10301-DPB10101 DPA10301-DPB10201 DPA10301-DPB10202 DPA10301-DPB10401 DPA10301-DPB110601 DPA10301-DPB11801 DPA10301-DPB12301 DPA10301-DPB13901 DPA10301-DPB14001 DPA10301-DPB16501 DPA10401-DPB10101 DPA10401-DPB10201 DPA10401-DPB10202 DPA10401-DPB10501
NTPVFAIKKKDSTKWRKLVDFREL

SEQ ID NO: 4787 - protein, 25 aa, Human immunodeficiency virus 1
  source 1..25: note = HLAs: DRB1_0405 DRB1_0410 DRB1_0801 DRB1_0804 DRB1_0806 DRB1_1001 DRB1_1101 DRB1_1102 DRB1_1103 DRB1_1104 DRB1_1301 DRB1_1304 DRB1_1305 DRB1_1406 DPA10103-DPB10101 DPA10103-DPB10201 DPA10103-DPB10202 DPA10103-DPB10501 DPA10103-DPB11501 DPA10103-DPB11601 DPA10103-DPB11901 DPA10103-DPB13101 DPA10103-DPB13401 DPA10103-DPB14001 DPA10103-DPB14101 DPA10103-DPB14801 DPA10103-DPB15001 DPA10104-DPB10101 DPA10104-DPB11501 DPA10105-DPB10101 DPA10105-DPB15001 DPA10201-DPB110601 DPA10201-DPB11501 DPA10201-DPB11601 DPA10201-DPB11901 DPA10202-DPB10101 DPA10202-DPB10501 DPA10202-DPB110601 DPA10202-DPB11901 DPA10202-DPB13101 DPA10202-DPB13801 DPA10202-DPB16501 DPA10301-DPB10101 DPA10301-DPB10201 DPA10301-DPB10202 DPA10301-DPB10401 DPA10301-DPB110601 DPA10301-DPB11801 DPA10301-DPB12301 DPA10301-DPB13901 DPA10301-DPB14001 DPA10301-DPB16501 DPA10401-DPB10101 DPA10401-DPB10201 DPA10401-DPB10202 DPA10401-DPB10501
NTPVFAIKKKDSTKWRKLVDFRELN

SEQ ID NO: 4788 - protein, 14 aa, Human immunodeficiency virus 1
  source 1..14: note = HLAs: DQA10102-DQB10601 DQA10103-DQB10601 DQA10201-DQB10301
NTVGGHQAAMQMLK

SEQ ID NO: 4789 - protein, 15 aa, Human immunodeficiency virus 1
  source 1..15: note = HLAs: DQA10102-DQB10601 DQA10102-DQB10602 DQA10102-DQB10609 DQA10103-DQB10601 DQA10103-DQB10609 DQA10201-DQB10301 DQA10501-DQB10301 DQA10501-DQB10319 DQA10503-DQB10301 DQA10505-DQB10301 DQA10505-DQB10309 DQA10505-DQB10319 DQA10505-DQB10402 DQA10506-DQB10303 DQA10508-DQB10301 DQA10509-DQB10301
NTVGGHQAAMQMLKD

SEQ ID NO: 4790 - protein, 16 aa, Human immunodeficiency virus 1
  source 1..16: note = HLAs: DQA10102-DQB10601 DQA10102-DQB10602 DQA10102-DQB10609 DQA10102-DQB10611 DQA10103-DQB10601 DQA10201-DQB10301
NTVGGHQAAMQMLKDT

SEQ ID NO: 4791 - protein, 17 aa, Human immunodeficiency virus 1
  source 1..17: note = HLAs: DQA10102-DQB10601 DQA10102-DQB10602 DQA10102-DQB10609 DQA10102-DQB10611 DQA10103-DQB10601 DQA10201-DQB10301
NTVGGHQAAMQMLKDTI

SEQ ID NO: 4792 - protein, 19 aa, Human immunodeficiency virus 1
  source 1..19: note = HLAs: DQA10102-DQB10501 DQA10102-DQB10601 DQA10102-DQB10609 DQA10103-DQB10601
NTVGGHQAAMQMLKDTINE

SEQ ID NO: 4793 - protein, 20 aa, Human immunodeficiency virus 1
  source 1..20: note = HLAs: DRB1_1001 DPA10301-DPB10101 DPA10401-DPB10101 DQA10102-DQB10501 DQA10102-DQB10503 DQA10102-DQB10601 DQA10102-DQB10602 DQA10102-DQB10609 DQA10103-DQB10501 DQA10103-DQB10601 DQA10103-DQB10609 DQA10201-DQB10301
NTVGGHQAAMQMLKDTINEE

SEQ ID NO: 4794 - protein, 21 aa, Human immunodeficiency virus 1
  source 1..21: note = HLAs: DRB1_1001 DPA10301-DPB10101 DPA10401-DPB10101 DQA10102-DQB10501 DQA10102-DQB10601 DQA10102-DQB10609 DQA10103-DQB10601 DQA10103-DQB10609
NTVGGHQAAMQMLKDTINEEA

SEQ ID NO: 4795 - protein, 22 aa, Human immunodeficiency virus 1
  source 1..22: note = HLAs: DRB1_1001 DPA10301-DPB10101 DPA10401-DPB10101 DQA10102-DQB10501 DQA10102-DQB10601 DQA10102-DQB10609 DQA10103-DQB10501 DQA10103-DQB10601 DQA10103-DQB10609
NTVGGHQAAMQMLKDTINEEAA

SEQ ID NO: 4796 - protein, 23 aa, Human immunodeficiency virus 1
  source 1..23: note = HLAs: DRB1_1001 DPA10301-DPB10101 DPA10401-DPB10101 DQA10102-DQB10501 DQA10102-DQB10601 DQA10102-DQB10609 DQA10103-DQB10501 DQA10103-DQB10601 DQA10103-DQB10609
NTVGGHQAAMQMLKDTINEEAAE

SEQ ID NO: 4797 - protein, 24 aa, Human immunodeficiency virus 1
  source 1..24: note = HLAs: DRB1_1001 DPA10301-DPB10101 DPA10401-DPB10101 DQA10102-DQB10501 DQA10102-DQB10503 DQA10102-DQB10601 DQA10102-DQB10609 DQA10103-DQB10501 DQA10103-DQB10601 DQA10103-DQB10609
NTVGGHQAAMQMLKDTINEEAAEW

SEQ ID NO: 4798 - protein, 25 aa, Human immunodeficiency virus 1
  source 1..25: note = HLAs: DRB1_1001 DPA10301-DPB10101 DPA10401-DPB10101 DQA10102-DQB10501 DQA10102-DQB10503 DQA10102-DQB10601 DQA10102-DQB10609 DQA10103-DQB10501 DQA10103-DQB10601 DQA10103-DQB10609
NTVGGHQAAMQMLKDTINEEAAEWD

SEQ ID NO: 4799 - protein, 15 aa, Human immunodeficiency virus 1
  source 1..15: note = HLAs: DRB1_0101 DRB1_0901 DRB1_1001 DQA10103-DQB10601 DQA10201-DQB10301 DQA10501-DQB10301 DQA10501-DQB10319 DQA10503-DQB10301 DQA10505-DQB10301 DQA10505-DQB10309 DQA10505-DQB10319 DQA10505-DQB10402 DQA10508-DQB10301 DQA10509-DQB10301
NVLPQGWKGSPAIFQ

SEQ ID NO: 4800 - protein, 16 aa, Human immunodeficiency virus 1
  source 1..16: note = HLAs: DRB1_0901 DRB1_1001 DQA10103-DQB10601 DQA10201-DQB10301 DQA10501-DQB10301 DQA10501-DQB10319 DQA10503-DQB10301 DQA10505-DQB10301 DQA10505-DQB10309 DQA10505-DQB10319 DQA10505-DQB10402 DQA10508-DQB10301 DQA10509-DQB10301
NVLPQGWKGSPAIFQS

SEQ ID NO: 4801 - protein, 17 aa, Human immunodeficiency virus 1
  source 1..17: note = HLAs: DRB1_0901 DRB1_1001 DQA10102-DQB10601 DQA10103-DQB10601 DQA10201-DQB10301 DQA10501-DQB10301 DQA10501-DQB10319 DQA10503-DQB10301 DQA10505-DQB10301 DQA10505-DQB10309 DQA10505-DQB10319 DQA10505-DQB10402 DQA10508-DQB10301 DQA10509-DQB10301
NVLPQGWKGSPAIFQSS

SEQ ID NO: 4802 - protein, 18 aa, Human immunodeficiency virus 1
  source 1..18: note = HLAs: DQA10201-DQB10301
NVLPQGWKGSPAIFQSSM

SEQ ID NO: 4803 - protein, 13 aa, Human immunodeficiency virus 1
  source 1..13: note = HLAs: DRB1_1001
NWRAMASDFNLPP

SEQ ID NO: 4804 - protein, 14 aa, Human immunodeficiency virus 1
  source 1..14: note = HLAs: DRB1_0401 DRB1_0408 DRB1_1001 DPA10301-DPB10101 DPA10401-DPB10101 DQA10102-DQB10501 DQA10102-DQB10503 DQA10102-DQB10609
NWRAMASDFNLPPV

SEQ ID NO: 4805 - protein, 15 aa, Human immunodeficiency virus 1
  source 1..15: note = HLAs: DRB1_0101 DRB1_0301 DRB1_0401 DRB1_0404 DRB1_0405 DRB1_0408 DRB1_0410 DRB1_1001 DPA10103-DPB11501 DPA10104-DPB11501 DPA10301-DPB10101 DPA10301-DPB10201 DPA10301-DPB10202 DPA10301-DPB11801 DPA10301-DPB14001 DPA10401-DPB10101 DPA10401-DPB10201 DPA10401-DPB10202 DQA10102-DQB10501 DQA10102-DQB10503 DQA10102-DQB10604 DQA10102-DQB10609 DQA10103-DQB10501 DQA10103-DQB10609
NWRAMASDFNLPPVV

SEQ ID NO: 4806 - protein, 16 aa, Human immunodeficiency virus 1
  source 1..16: note = HLAs: DRB1_0401 DRB1_0405 DRB1_0408 DRB1_1001 DPA10301-DPB10101 DPA10301-DPB10201 DPA10301-DPB10202 DPA10301-DPB110601 DPA10301-DPB11801 DPA10401-DPB10101 DQA10101-DQB10501 DQA10102-DQB10501 DQA10102-DQB10502 DQA10102-DQB10503 DQA10102-DQB10604 DQA10102-DQB10609 DQA10103-DQB10501 DQA10103-DQB10609 DQA10104-DQB10501 DQA10105-DQB10501
NWRAMASDFNLPPVVA

SEQ ID NO: 4807 - protein, 17 aa, Human immunodeficiency virus 1
  source 1..17: note = HLAs: DRB1_0101 DRB1_0401 DRB1_0405 DRB1_0408 DRB1_1001 DPA10103-DPB11501 DPA10104-DPB11501 DPA10301-DPB10101 DPA10301-DPB10201 DPA10301-DPB10202 DPA10401-DPB10101 DQA10102-DQB10501 DQA10102-DQB10503 DQA10102-DQB10609 DQA10103-DQB10501 DQA10103-DQB10609
NWRAMASDFNLPPVVAK

SEQ ID NO: 4808 - protein, 18 aa, Human immunodeficiency virus 1
  source 1..18: note = HLAs: DRB1_1001 DPA10301-DPB10101 DQA10102-DQB10501 DQA10102-DQB10503 DQA10102-DQB10609
NWRAMASDFNLPPVVAKE

SEQ ID NO: 4809 - protein, 19 aa, Human immunodeficiency virus 1
  source 1..19: note = HLAs: DRB1_0401 DRB1_0408 DRB1_1001 DPA10301-DPB10101 DPA10301-DPB10201 DPA10301-DPB10202 DPA10401-DPB10101 DQA10102-DQB10501 DQA10102-DQB10503 DQA10102-DQB10609 DQA10103-DQB10501 DQA10103-DQB10609
NWRAMASDFNLPPVVAKEI

SEQ ID NO: 4810 - protein, 20 aa, Human immunodeficiency virus 1
  source 1..20: note = HLAs: DRB1_0101 DRB1_0401 DRB1_0405 DRB1_0408 DRB1_0410 DRB1_1001 DPA10103-DPB10101 DPA10103-DPB11501 DPA10103-DPB15001 DPA10104-DPB10101 DPA10104-DPB11501 DPA10105-DPB10101 DPA10105-DPB15001 DPA10202-DPB10101 DPA10301-DPB10101 DPA10301-DPB10201 DPA10301-DPB10202 DPA10301-DPB10401 DPA10301-DPB110601 DPA10301-DPB11801 DPA10301-DPB12301 DPA10301-DPB13901 DPA10301-DPB14001 DPA10301-DPB16501 DPA10401-DPB10101 DPA10401-DPB10201 DPA10401-DPB10202 DPA10401-DPB10501 DPA10401-DPB11401 DQA10102-DQB10501 DQA10102-DQB10503 DQA10102-DQB10601 DQA10102-DQB10609 DQA10103-DQB10501 DQA10103-DQB10601 DQA10103-DQB10609
NWRAMASDFNLPPVVAKEIV

SEQ ID NO: 4811 - protein, 21 aa, Human immunodeficiency virus 1
  source 1..21: note = HLAs: DRB1_0101 DRB1_1001 DPA10301-DPB10101 DPA10301-DPB10201 DPA10401-DPB10101 DQA10102-DQB10501 DQA10102-DQB10503 DQA10102-DQB10609 DQA10103-DQB10501 DQA10103-DQB10609
NWRAMASDFNLPPVVAKEIVA

SEQ ID NO: 4812 - protein, 15 aa, Human immunodeficiency virus 1
  source 1..15: note = HLAs: DRB1_0101 DRB1_0102 DRB1_0103 DRB1_0701 DRB1_0804 DRB1_0806 DRB1_0813 DRB1_1001 DRB1_1102 DRB1_1103 DRB1_1104 DRB1_1114 DRB1_1301 DRB1_1302 DRB1_1304 DRB1_1406 DRB1_1501 DPA10103-DPB10101 DPA10103-DPB11501 DPA10103-DPB15001 DPA10104-DPB10101 DPA10104-DPB11501 DPA10105-DPB10101 DPA10105-DPB15001 DPA10202-DPB10101 DPA10202-DPB110601 DPA10202-DPB11901 DPA10301-DPB10101 DPA10301-DPB10201 DPA10301-DPB10202 DPA10301-DPB10401 DPA10301-DPB110601 DPA10301-DPB11801 DPA10301-DPB12301 DPA10301-DPB13901 DPA10301-DPB14001 DPA10301-DPB16501 DPA10401-DPB10101 DPA10401-DPB10201 DPA10401-DPB10202 DPA10401-DPB11401
PAGLKKKKSVTVLDV

SEQ ID NO: 4813 - protein, 16 aa, Human immunodeficiency virus 1
  source 1..16: note = HLAs: DRB1_1102 DRB1_1103 DRB1_1301 DRB1_1304 DPA10103-DPB10101 DPA10103-DPB11501 DPA10103-DPB15001 DPA10104-DPB10101 DPA10104-DPB11501 DPA10105-DPB10101 DPA10105-DPB15001 DPA10202-DPB10101 DPA10202-DPB110601 DPA10202-DPB11901 DPA10301-DPB10101 DPA10301-DPB10201 DPA10301-DPB10202 DPA10301-DPB110601 DPA10301-DPB11801 DPA10301-DPB16501 DPA10401-DPB10101 DPA10401-DPB11401
PAGLKKKKSVTVLDVG

SEQ ID NO: 4814 - protein, 17 aa, Human immunodeficiency virus 1
  source 1..17: note = HLAs: DRB1_1102 DRB1_1103 DRB1_1301 DRB1_1304 DPA10103-DPB11501 DPA10103-DPB15001 DPA10104-DPB11501 DPA10105-DPB15001 DPA10202-DPB10101 DPA10202-DPB110601 DPA10202-DPB11901 DPA10301-DPB10101 DPA10301-DPB10201 DPA10301-DPB10202 DPA10301-DPB110601 DPA10301-DPB11801 DPA10301-DPB16501 DPA10401-DPB10101
PAGLKKKKSVTVLDVGD

SEQ ID NO: 4815 - protein, 18 aa, Human immunodeficiency virus 1
  source 1..18: note = HLAs: DPA10301-DPB10101 DPA10401-DPB10101
PAGLKKKKSVTVLDVGDA

SEQ ID NO: 4816 - protein, 19 aa, Human immunodeficiency virus 1
  source 1..19: note = HLAs: DRB1_1001 DRB1_1102 DRB1_1301 DPA10103-DPB10101 DPA10103-DPB11501 DPA10103-DPB15001 DPA10104-DPB10101 DPA10104-DPB11501 DPA10105-DPB10101 DPA10105-DPB15001 DPA10202-DPB10101 DPA10301-DPB10101 DPA10301-DPB10201 DPA10301-DPB10202 DPA10301-DPB110601 DPA10301-DPB11801 DPA10301-DPB14001 DPA10301-DPB16501 DPA10401-DPB10101 DPA10401-DPB11401 DQA10102-DQB10501 DQA10102-DQB10609
PAGLKKKKSVTVLDVGDAY

SEQ ID NO: 4817 - protein, 20 aa, Human immunodeficiency virus 1
  source 1..20: note = HLAs: DRB1_0101 DRB1_0404 DRB1_0410 DRB1_0701 DRB1_0801 DRB1_0804 DRB1_0806 DRB1_0813 DRB1_1001 DRB1_1102 DRB1_1103 DRB1_1114 DRB1_1301 DRB1_1302 DRB1_1304 DRB1_1406 DPA10103-DPB10101 DPA10103-DPB11501 DPA10103-DPB11901 DPA10103-DPB13101 DPA10103-DPB15001 DPA10104-DPB10101 DPA10104-DPB11501 DPA10105-DPB10101 DPA10105-DPB15001 DPA10202-DPB10101 DPA10202-DPB10501 DPA10202-DPB110601 DPA10202-DPB11101 DPA10202-DPB11401 DPA10202-DPB11901 DPA10202-DPB13801 DPA10202-DPB15501 DPA10301-DPB10101 DPA10301-DPB10201 DPA10301-DPB10202 DPA10301-DPB10401 DPA10301-DPB110601 DPA10301-DPB11101 DPA10301-DPB11801 DPA10301-DPB12301 DPA10301-DPB13901 DPA10301-DPB14001 DPA10301-DPB15501 DPA10301-DPB16501 DPA10401-DPB10101 DPA10401-DPB10201 DPA10401-DPB10202 DPA10401-DPB10301 DPA10401-DPB10501 DPA10401-DPB11401 DQA10102-DQB10501 DQA10102-DQB10503 DQA10102-DQB10604 DQA10102-DQB10609 DQA10103-DQB10501 DQA10103-DQB10609
PAGLKKKKSVTVLDVGDAYF

SEQ ID NO: 4818 - protein, 21 aa, Human immunodeficiency virus 1
  source 1..21: note = HLAs: DRB1_0101 DRB1_0404 DRB1_0410 DRB1_1001 DRB1_1102 DRB1_1301 DRB1_1304 DPA10103-DPB10101 DPA10103-DPB11501 DPA10103-DPB15001 DPA10104-DPB10101 DPA10104-DPB11501 DPA10105-DPB10101 DPA10105-DPB15001 DPA10202-DPB10101 DPA10301-DPB10101 DPA10301-DPB10201 DPA10301-DPB10202 DPA10301-DPB110601 DPA10301-DPB11801 DPA10301-DPB14001 DPA10301-DPB16501 DPA10401-DPB10101 DPA10401-DPB10202 DPA10401-DPB10501 DQA10102-DQB10501 DQA10102-DQB10604 DQA10102-DQB10609
PAGLKKKKSVTVLDVGDAYFS

SEQ ID NO: 4819 - protein, 22 aa, Human immunodeficiency virus 1
  source 1..22: note = HLAs: DRB1_0101 DRB1_0404 DRB1_0410 DRB1_0806 DRB1_1001 DRB1_1102 DRB1_1301 DRB1_1304 DRB1_1406 DPA10103-DPB10101 DPA10103-DPB11501 DPA10103-DPB15001 DPA10104-DPB10101 DPA10104-DPB11501 DPA10105-DPB10101 DPA10105-DPB15001 DPA10202-DPB10101 DPA10202-DPB110601 DPA10202-DPB11901 DPA10301-DPB10101 DPA10301-DPB10201 DPA10301-DPB10202 DPA10301-DPB10401 DPA10301-DPB110601 DPA10301-DPB11801 DPA10301-DPB12301 DPA10301-DPB13901 DPA10301-DPB14001 DPA10301-DPB16501 DPA10401-DPB10101 DPA10401-DPB10201 DPA10401-DPB10202 DPA10401-DPB10501 DQA10102-DQB10501 DQA10102-DQB10503 DQA10102-DQB10604 DQA10102-DQB10609 DQA10103-DQB10501 DQA10103-DQB10609
PAGLKKKKSVTVLDVGDAYFSV

SEQ ID NO: 4820 - protein, 23 aa, Human immunodeficiency virus 1
  source 1..23: note = HLAs: DRB1_0101 DRB1_0404 DRB1_0410 DRB1_0806 DRB1_1001 DRB1_1102 DRB1_1114 DRB1_1301 DRB1_1302 DRB1_1304 DRB1_1406 DPA10103-DPB10101 DPA10103-DPB11501 DPA10103-DPB15001 DPA10104-DPB10101 DPA10104-DPB11501 DPA10105-DPB10101 DPA10105-DPB15001 DPA10202-DPB10101 DPA10202-DPB110601 DPA10202-DPB11901 DPA10301-DPB10101 DPA10301-DPB10201 DPA10301-DPB10202 DPA10301-DPB10401 DPA10301-DPB110601 DPA10301-DPB11801 DPA10301-DPB12301 DPA10301-DPB13901 DPA10301-DPB14001 DPA10301-DPB16501 DPA10401-DPB10101 DPA10401-DPB10201 DPA10401-DPB10202 DPA10401-DPB10501 DQA10102-DQB10501 DQA10102-DQB10503 DQA10102-DQB10604 DQA10102-DQB10609 DQA10103-DQB10501 DQA10103-DQB10609
PAGLKKKKSVTVLDVGDAYFSVP

SEQ ID NO: 4821 - protein, 24 aa, Human immunodeficiency virus 1
  source 1..24: note = HLAs: DRB1_0101 DRB1_0404 DRB1_0410 DRB1_0806 DRB1_1001 DRB1_1102 DRB1_1114 DRB1_1301 DRB1_1302 DRB1_1304 DRB1_1406 DPA10103-DPB10101 DPA10103-DPB11501 DPA10103-DPB11901 DPA10103-DPB13101 DPA10103-DPB15001 DPA10104-DPB10101 DPA10104-DPB11501 DPA10105-DPB10101 DPA10105-DPB15001 DPA10202-DPB10101 DPA10202-DPB110601 DPA10202-DPB11901 DPA10301-DPB10101 DPA10301-DPB10201 DPA10301-DPB10202 DPA10301-DPB10401 DPA10301-DPB110601 DPA10301-DPB11801 DPA10301-DPB12301 DPA10301-DPB13901 DPA10301-DPB14001 DPA10301-DPB16501 DPA10401-DPB10101 DPA10401-DPB10201 DPA10401-DPB10202 DPA10401-DPB10501 DQA10102-DQB10501 DQA10102-DQB10503 DQA10102-DQB10604 DQA10102-DQB10609 DQA10103-DQB10501 DQA10103-DQB10609
PAGLKKKKSVTVLDVGDAYFSVPL

SEQ ID NO: 4822 - protein, 25 aa, Human immunodeficiency virus 1
  source 1..25: note = HLAs: DRB1_0101 DRB1_0404 DRB1_0410 DRB1_0806 DRB1_1001 DRB1_1102 DRB1_1114 DRB1_1301 DRB1_1302 DRB1_1304 DRB1_1406 DPA10103-DPB10101 DPA10103-DPB11501 DPA10103-DPB11901 DPA10103-DPB13101 DPA10103-DPB15001 DPA10104-DPB10101 DPA10104-DPB11501 DPA10105-DPB10101 DPA10105-DPB15001 DPA10202-DPB10101 DPA10202-DPB110601 DPA10202-DPB11901 DPA10301-DPB10101 DPA10301-DPB10201 DPA10301-DPB10202 DPA10301-DPB10401 DPA10301-DPB110601 DPA10301-DPB11801 DPA10301-DPB12301 DPA10301-DPB13901 DPA10301-DPB14001 DPA10301-DPB16501 DPA10401-DPB10101 DPA10401-DPB10201 DPA10401-DPB10202 DPA10401-DPB10501 DQA10101-DQB10501 DQA10102-DQB10501 DQA10102-DQB10503 DQA10102-DQB10604 DQA10102-DQB10609 DQA10103-DQB10501 DQA10103-DQB10609 DQA10104-DQB10501 DQA10105-DQB10501
PAGLKKKKSVTVLDVGDAYFSVPLD

SEQ ID NO: 4823 - protein, 22 aa, Human immunodeficiency virus 1
  source 1..22: note = HLAs: DRB1_0101
PAHKGIGGNEQVDKLVSSGIRK

SEQ ID NO: 4824 - protein, 23 aa, Human immunodeficiency virus 1
  source 1..23: note = HLAs: DRB1_0101 DRB1_0102 DRB1_0701 DRB1_0901 DRB1_1001 DRB1_1102 DRB1_1114 DRB1_1301 DRB1_1302 DRB1_1304 DRB1_1406 DPA10202-DPB10101 DPA10301-DPB10101 DPA10301-DPB10201 DPA10301-DPB10202 DPA10301-DPB10401 DPA10301-DPB11801 DPA10301-DPB12301 DPA10301-DPB13901 DPA10301-DPB14001 DPA10401-DPB10101 DPA10401-DPB10201 DPA10401-DPB10202 DQA10102-DQB10501 DQA10103-DQB10601 DQA10103-DQB10609
PAHKGIGGNEQVDKLVSSGIRKV

SEQ ID NO: 4825 - protein, 24 aa, Human immunodeficiency virus 1
  source 1..24: note = HLAs: DRB1_0101 DRB1_0102 DRB1_0701 DRB1_0806 DRB1_0901 DRB1_1001 DRB1_1102 DRB1_1103 DRB1_1104 DRB1_1114 DRB1_1301 DRB1_1302 DRB1_1304 DRB1_1401 DRB1_1406 DRB1_1454 DRB1_1501 DRB1_1602 DPA10103-DPB10201 DPA10103-DPB10202 DPA10103-DPB11501 DPA10103-DPB14801 DPA10104-DPB11501 DPA10202-DPB10101 DPA10202-DPB10201 DPA10202-DPB10202 DPA10202-DPB110601 DPA10202-DPB11901 DPA10301-DPB10101 DPA10301-DPB10201 DPA10301-DPB10202 DPA10301-DPB10401 DPA10301-DPB10402 DPA10301-DPB110501 DPA10301-DPB110601 DPA10301-DPB11801 DPA10301-DPB12301 DPA10301-DPB13901 DPA10301-DPB14001 DPA10301-DPB14901 DPA10301-DPB16501 DPA10301-DPB18001 DPA10401-DPB10101 DPA10401-DPB10201 DPA10401-DPB10202 DQA10102-DQB10501 DQA10102-DQB10601 DQA10103-DQB10501 DQA10103-DQB10601 DQA10103-DQB10602 DQA10103-DQB10609
PAHKGIGGNEQVDKLVSSGIRKVL

SEQ ID NO: 4826 - protein, 25 aa, Human immunodeficiency virus 1
  source 1..25: note = HLAs: DRB1_0101 DRB1_0102 DRB1_0404 DRB1_0410 DRB1_0701 DRB1_0801 DRB1_0804 DRB1_0806 DRB1_0813 DRB1_0901 DRB1_1001 DRB1_1102 DRB1_1103 DRB1_1104 DRB1_1114 DRB1_1201 DRB1_1301 DRB1_1302 DRB1_1303 DRB1_1304 DRB1_1401 DRB1_1402 DRB1_1404 DRB1_1405 DRB1_1406 DRB1_1454 DRB1_1501 DRB1_1602 DPA10103-DPB10101 DPA10103-DPB10201 DPA10103-DPB10202 DPA10103-DPB11501 DPA10103-DPB11601 DPA10103-DPB11801 DPA10103-DPB11901 DPA10103-DPB13401 DPA10103-DPB14801 DPA10103-DPB15001 DPA10104-DPB10101 DPA10104-DPB11501 DPA10105-DPB10101 DPA10105-DPB11801 DPA10105-DPB15001 DPA10201-DPB11501 DPA10202-DPB10101 DPA10202-DPB10201 DPA10202-DPB10202 DPA10202-DPB10501 DPA10202-DPB110601 DPA10202-DPB11801 DPA10202-DPB11901 DPA10202-DPB13101 DPA10202-DPB13801 DPA10202-DPB16501 DPA10301-DPB10101 DPA10301-DPB10201 DPA10301-DPB10202 DPA10301-DPB10401 DPA10301-DPB10402 DPA10301-DPB110501 DPA10301-DPB110601 DPA10301-DPB11801 DPA10301-DPB12301 DPA10301-DPB13901 DPA10301-DPB14001 DPA10301-DPB14901 DPA10301-DPB15501; note = HLAs: DPA10301-DPB16501 DPA10301-DPB17501 DPA10301-DPB18001 DPA10401-DPB10101 DPA10401-DPB10201 DPA10401-DPB10202 DPA10401-DPB10501 DQA10102-DQB10501 DQA10102-DQB10601 DQA10102-DQB10609 DQA10103-DQB10501 DQA10103-DQB10601 DQA10103-DQB10602 DQA10103-DQB10609 DQA10201-DQB10301 DQA10505-DQB10402
PAHKGIGGNEQVDKLVSSGIRKVLF

SEQ ID NO: 4827 - protein, 14 aa, Human immunodeficiency virus 1
  source 1..14: note = HLAs: DRB1_0101 DRB1_0701 DRB1_0901 DRB1_1001 DRB1_1114 DRB1_1302 DPA10301-DPB10201 DPA10301-DPB10202 DQA10102-DQB10501 DQA10201-DQB10301 DQA10501-DQB10301 DQA10501-DQB10319 DQA10503-DQB10301 DQA10505-DQB10301 DQA10505-DQB10309 DQA10505-DQB10319 DQA10508-DQB10301 DQA10509-DQB10301
PAKLLWKGEGAVVI

SEQ ID NO: 4828 - protein, 15 aa, Human immunodeficiency virus 1
  source 1..15: note = HLAs: DRB1_0101 DRB1_0102 DRB1_0103 DRB1_0701 DRB1_0806 DRB1_0813 DRB1_0901 DRB1_1001 DRB1_1102 DRB1_1103 DRB1_1104 DRB1_1114 DRB1_1301 DRB1_1302 DRB1_1304 DRB1_1406 DRB1_1501 DRB1_1502 DRB1_1602 DPA10103-DPB11501 DPA10104-DPB11501 DPA10301-DPB10101 DPA10301-DPB10201 DPA10301-DPB10202 DPA10401-DPB10101 DPA10401-DPB10201 DPA10401-DPB10202 DQA10102-DQB10501 DQA10103-DQB10501 DQA10201-DQB10301 DQA10501-DQB10301 DQA10501-DQB10319 DQA10503-DQB10301 DQA10505-DQB10301 DQA10505-DQB10309 DQA10505-DQB10319 DQA10505-DQB10402 DQA10508-DQB10301 DQA10509-DQB10301
PAKLLWKGEGAVVIQ

SEQ ID NO: 4829 - protein, 16 aa, Human immunodeficiency virus 1
  source 1..16: note = HLAs: DRB1_0101 DRB1_0102 DRB1_0701 DRB1_0901 DRB1_1001 DRB1_1114 DRB1_1302 DRB1_1602 DPA10301-DPB10101 DPA10301-DPB10201 DPA10301-DPB10202 DPA10401-DPB10101 DPA10401-DPB10201 DPA10401-DPB10202 DQA10102-DQB10501 DQA10102-DQB10601 DQA10102-DQB10609 DQA10103-DQB10501 DQA10201-DQB10301 DQA10301-DQB10301 DQA10302-DQB10301 DQA10303-DQB10301 DQA10401-DQB10301 DQA10401-DQB10319 DQA10501-DQB10301 DQA10501-DQB10319 DQA10503-DQB10301 DQA10505-DQB10301 DQA10505-DQB10309 DQA10505-DQB10319 DQA10508-DQB10301 DQA10509-DQB10301 DQA10601-DQB10301
PAKLLWKGEGAVVIQD

SEQ ID NO: 4830 - protein, 17 aa, Human immunodeficiency virus 1
  source 1..17: note = HLAs: DRB1_0101 DRB1_0102 DRB1_0701 DRB1_0901 DRB1_1001 DRB1_1114 DRB1_1302 DRB1_1602 DPA10301-DPB10101 DPA10301-DPB10201 DPA10301-DPB10202 DPA10401-DPB10101 DQA10102-DQB10501 DQA10102-DQB10601 DQA10102-DQB10609 DQA10103-DQB10501 DQA10103-DQB10601 DQA10201-DQB10301 DQA10401-DQB10301 DQA10401-DQB10319 DQA10501-DQB10301 DQA10501-DQB10319 DQA10503-DQB10301 DQA10505-DQB10301 DQA10505-DQB10309 DQA10505-DQB10319 DQA10508-DQB10301 DQA10509-DQB10301
PAKLLWKGEGAVVIQDN

SEQ ID NO: 4831 - protein, 18 aa, Human immunodeficiency virus 1
  source 1..18: note = HLAs: DRB1_0101 DRB1_0901 DRB1_1001 DQA10102-DQB10501 DQA10201-DQB10301 DQA10401-DQB10301 DQA10401-DQB10319
PAKLLWKGEGAVVIQDNS

SEQ ID NO: 4832 - protein, 19 aa, Human immunodeficiency virus 1
  source 1..19: note = HLAs: DPA10103-DPB10101 DPA10103-DPB10201 DPA10103-DPB10202 DPA10103-DPB10401 DPA10103-DPB112601 DPA10103-DPB11501 DPA10103-DPB11601 DPA10103-DPB12301 DPA10103-DPB13101 DPA10103-DPB13401 DPA10103-DPB13901 DPA10103-DPB14001 DPA10103-DPB14801 DPA10103-DPB15001 DPA10104-DPB10101 DPA10104-DPB11501 DPA10105-DPB10101 DPA10105-DPB10401 DPA10105-DPB15001 DPA10106-DPB10101 DPA10201-DPB10101 DPA10201-DPB11501 DPA10202-DPB10101 DPA10202-DPB13101 DPA10301-DPB10101 DPA10301-DPB10201 DPA10301-DPB10202 DPA10301-DPB10401 DPA10301-DPB10402 DPA10301-DPB110501 DPA10301-DPB110601 DPA10301-DPB11801 DPA10301-DPB12301 DPA10301-DPB13901 DPA10301-DPB14001 DPA10301-DPB14901 DPA10301-DPB16501 DPA10301-DPB18001 DPA10401-DPB10101 DPA10401-DPB10201 DPA10401-DPB10202
PDKKHQKEPPFLWMGYELH

SEQ ID NO: 4833 - protein, 20 aa, Human immunodeficiency virus 1
  source 1..20: note = HLAs: DRB1_0101 DRB1_1001 DRB1_1501 DPA10103-DPB10101 DPA10103-DPB10201 DPA10103-DPB10202 DPA10103-DPB10401 DPA10103-DPB10501 DPA10103-DPB112601 DPA10103-DPB11501 DPA10103-DPB11601 DPA10103-DPB11801 DPA10103-DPB11901 DPA10103-DPB12301 DPA10103-DPB13101 DPA10103-DPB13401 DPA10103-DPB13901 DPA10103-DPB14001 DPA10103-DPB14101 DPA10103-DPB14801 DPA10103-DPB15001 DPA10103-DPB15901 DPA10104-DPB10101 DPA10104-DPB11501 DPA10105-DPB10101 DPA10105-DPB10401 DPA10105-DPB11801 DPA10105-DPB15001 DPA10106-DPB10101 DPA10201-DPB10101 DPA10201-DPB110601 DPA10201-DPB11501 DPA10201-DPB11601 DPA10201-DPB11901 DPA10202-DPB10101 DPA10202-DPB10201 DPA10202-DPB10202 DPA10202-DPB10401 DPA10202-DPB110601 DPA10202-DPB11901 DPA10202-DPB13101 DPA10202-DPB16501 DPA10301-DPB10101 DPA10301-DPB10201 DPA10301-DPB10202 DPA10301-DPB10401 DPA10301-DPB10402 DPA10301-DPB110501 DPA10301-DPB110601 DPA10301-DPB11801 DPA10301-DPB12301 DPA10301-DPB13901 DPA10301-DPB14001 DPA10301-DPB14901 DPA10301-DPB15501 DPA10301-DPB16501; note = HLAs: DPA10301-DPB17501 DPA10301-DPB18001 DPA10401-DPB10101 DPA10401-DPB10201 DPA10401-DPB10202 DPA10401-DPB10501 DQA10102-DQB10501
PDKKHQKEPPFLWMGYELHP

SEQ ID NO: 4834 - protein, 21 aa, Human immunodeficiency virus 1
  source 1..21: note = HLAs: DRB1_1001 DPA10103-DPB10101 DPA10103-DPB10201 DPA10103-DPB10202 DPA10103-DPB10401 DPA10103-DPB112601 DPA10103-DPB11501 DPA10103-DPB11601 DPA10103-DPB11901 DPA10103-DPB12301 DPA10103-DPB13101 DPA10103-DPB13401 DPA10103-DPB13901 DPA10103-DPB14001 DPA10103-DPB14101 DPA10103-DPB14801 DPA10103-DPB15001 DPA10103-DPB15901 DPA10104-DPB10101 DPA10104-DPB11501 DPA10105-DPB10101 DPA10105-DPB10401 DPA10105-DPB15001 DPA10106-DPB10101 DPA10201-DPB10101 DPA10201-DPB11501 DPA10201-DPB11601 DPA10202-DPB10101 DPA10202-DPB10202 DPA10202-DPB110601 DPA10202-DPB11901 DPA10202-DPB13101 DPA10202-DPB16501 DPA10301-DPB10101 DPA10301-DPB10201 DPA10301-DPB10202 DPA10301-DPB10401 DPA10301-DPB10402 DPA10301-DPB110501 DPA10301-DPB110601 DPA10301-DPB11801 DPA10301-DPB12301 DPA10301-DPB13901 DPA10301-DPB14001 DPA10301-DPB14901 DPA10301-DPB15501 DPA10301-DPB16501 DPA10301-DPB17501 DPA10301-DPB18001 DPA10401-DPB10101 DPA10401-DPB10201 DPA10401-DPB10202 DPA10401-DPB10501 DQA10101-DQB10501 DQA10102-DQB10501; note = HLAs: DQA10102-DQB10502 DQA10104-DQB10501 DQA10105-DQB10501
PDKKHQKEPPFLWMGYELHPD

SEQ ID NO: 4835 - protein, 22 aa, Human immunodeficiency virus 1
  source 1..22: note = HLAs: DRB1_1001 DPA10103-DPB10101 DPA10103-DPB10201 DPA10103-DPB10202 DPA10103-DPB10401 DPA10103-DPB112601 DPA10103-DPB11501 DPA10103-DPB11601 DPA10103-DPB11801 DPA10103-DPB11901 DPA10103-DPB12301 DPA10103-DPB13101 DPA10103-DPB13401 DPA10103-DPB13901 DPA10103-DPB14001 DPA10103-DPB14101 DPA10103-DPB14801 DPA10103-DPB15001 DPA10103-DPB15901 DPA10104-DPB10101 DPA10104-DPB11501 DPA10105-DPB10101 DPA10105-DPB10401 DPA10105-DPB11801 DPA10105-DPB15001 DPA10106-DPB10101 DPA10201-DPB10101 DPA10201-DPB10202 DPA10201-DPB110601 DPA10201-DPB11501 DPA10201-DPB11601 DPA10201-DPB11901 DPA10202-DPB10101 DPA10202-DPB10201 DPA10202-DPB10202 DPA10202-DPB10401 DPA10202-DPB110601 DPA10202-DPB11901 DPA10202-DPB13101 DPA10202-DPB16501 DPA10301-DPB10101 DPA10301-DPB10201 DPA10301-DPB10202 DPA10301-DPB10401 DPA10301-DPB10402 DPA10301-DPB110501 DPA10301-DPB110601 DPA10301-DPB11801 DPA10301-DPB12301 DPA10301-DPB13901 DPA10301-DPB14001 DPA10301-DPB14901 DPA10301-DPB15501 DPA10301-DPB16501 DPA10301-DPB17501; note = HLAs: DPA10301-DPB18001 DPA10401-DPB10101 DPA10401-DPB10201 DPA10401-DPB10202 DPA10401-DPB10402 DPA10401-DPB10501 DPA10401-DPB110501 DPA10401-DPB14901 DQA10101-DQB10501 DQA10102-DQB10501 DQA10102-DQB10502 DQA10102-DQB10503 DQA10103-DQB10501 DQA10104-DQB10501 DQA10105-DQB10501
PDKKHQKEPPFLWMGYELHPDK

SEQ ID NO: 4836 - protein, 23 aa, Human immunodeficiency virus 1
  source 1..23: note = HLAs: DRB1_0101 DRB1_1001 DPA10103-DPB10101 DPA10103-DPB10201 DPA10103-DPB10202 DPA10103-DPB10401 DPA10103-DPB10501 DPA10103-DPB112601 DPA10103-DPB11501 DPA10103-DPB11601 DPA10103-DPB11801 DPA10103-DPB11901 DPA10103-DPB12301 DPA10103-DPB13101 DPA10103-DPB13401 DPA10103-DPB13901 DPA10103-DPB14001 DPA10103-DPB14101 DPA10103-DPB14801 DPA10103-DPB15001 DPA10103-DPB15901 DPA10104-DPB10101 DPA10104-DPB11501 DPA10105-DPB10101 DPA10105-DPB10401 DPA10105-DPB11801 DPA10105-DPB15001 DPA10106-DPB10101 DPA10201-DPB10101 DPA10201-DPB10202 DPA10201-DPB110601 DPA10201-DPB11501 DPA10201-DPB11601 DPA10201-DPB11901 DPA10201-DPB13401 DPA10202-DPB10101 DPA10202-DPB10201 DPA10202-DPB10202 DPA10202-DPB10401 DPA10202-DPB110601 DPA10202-DPB11901 DPA10202-DPB13101 DPA10202-DPB16501 DPA10301-DPB10101 DPA10301-DPB10201 DPA10301-DPB10202 DPA10301-DPB10401 DPA10301-DPB10402 DPA10301-DPB110501 DPA10301-DPB110601 DPA10301-DPB11301 DPA10301-DPB11801 DPA10301-DPB12301 DPA10301-DPB13901 DPA10301-DPB14001; note = HLAs: DPA10301-DPB14901 DPA10301-DPB15501 DPA10301-DPB16501 DPA10301-DPB17501 DPA10301-DPB18001 DPA10401-DPB10101 DPA10401-DPB10201 DPA10401-DPB10202 DPA10401-DPB10402 DPA10401-DPB10501 DPA10401-DPB110501 DPA10401-DPB14901 DQA10101-DQB10501 DQA10102-DQB10501 DQA10102-DQB10502 DQA10102-DQB10503 DQA10103-DQB10501 DQA10104-DQB10501 DQA10105-DQB10501
PDKKHQKEPPFLWMGYELHPDKW

SEQ ID NO: 4837 - protein, 24 aa, Human immunodeficiency virus 1
  source 1..24: note = HLAs: DRB1_0101 DRB1_1001 DRB1_1501 DPA10103-DPB10101 DPA10103-DPB10201 DPA10103-DPB10202 DPA10103-DPB10401 DPA10103-DPB10501 DPA10103-DPB112601 DPA10103-DPB11501 DPA10103-DPB11601 DPA10103-DPB11801 DPA10103-DPB11901 DPA10103-DPB12301 DPA10103-DPB13101 DPA10103-DPB13401 DPA10103-DPB13901 DPA10103-DPB14001 DPA10103-DPB14101 DPA10103-DPB14801 DPA10103-DPB15001 DPA10103-DPB15901 DPA10104-DPB10101 DPA10104-DPB11501 DPA10105-DPB10101 DPA10105-DPB10401 DPA10105-DPB11801 DPA10105-DPB15001 DPA10106-DPB10101 DPA10201-DPB10101 DPA10201-DPB10202 DPA10201-DPB110601 DPA10201-DPB11501 DPA10201-DPB11601 DPA10201-DPB11901 DPA10201-DPB13401 DPA10202-DPB10101 DPA10202-DPB10201 DPA10202-DPB10202 DPA10202-DPB10401 DPA10202-DPB10501 DPA10202-DPB110601 DPA10202-DPB11901 DPA10202-DPB13101 DPA10202-DPB13801 DPA10202-DPB15501 DPA10202-DPB16501 DPA10301-DPB10101 DPA10301-DPB10201 DPA10301-DPB10202 DPA10301-DPB10401 DPA10301-DPB10402 DPA10301-DPB110501 DPA10301-DPB110601 DPA10301-DPB11301 DPA10301-DPB11801; note = HLAs: DPA10301-DPB12301 DPA10301-DPB13901 DPA10301-DPB14001 DPA10301-DPB14901 DPA10301-DPB15501 DPA10301-DPB16501 DPA10301-DPB17501 DPA10301-DPB18001 DPA10401-DPB10101 DPA10401-DPB10201 DPA10401-DPB10202 DPA10401-DPB10402 DPA10401-DPB10501 DPA10401-DPB110501 DPA10401-DPB14901 DQA10101-DQB10501 DQA10102-DQB10501 DQA10102-DQB10502 DQA10102-DQB10503 DQA10103-DQB10501 DQA10104-DQB10501 DQA10105-DQB10501
PDKKHQKEPPFLWMGYELHPDKWT

SEQ ID NO: 4838 - protein, 25 aa, Human immunodeficiency virus 1
  source 1..25: note = HLAs: DRB1_0101 DRB1_0405 DRB1_1001 DRB1_1501 DPA10103-DPB10101 DPA10103-DPB10201 DPA10103-DPB10202 DPA10103-DPB10401 DPA10103-DPB10501 DPA10103-DPB112601 DPA10103-DPB11501 DPA10103-DPB11601 DPA10103-DPB11801 DPA10103-DPB11901 DPA10103-DPB12301 DPA10103-DPB13101 DPA10103-DPB13401 DPA10103-DPB13901 DPA10103-DPB14001 DPA10103-DPB14101 DPA10103-DPB14801 DPA10103-DPB15001 DPA10103-DPB15901 DPA10104-DPB10101 DPA10104-DPB11501 DPA10105-DPB10101 DPA10105-DPB10401 DPA10105-DPB11801 DPA10105-DPB15001 DPA10106-DPB10101 DPA10201-DPB10101 DPA10201-DPB10202 DPA10201-DPB110601 DPA10201-DPB11501 DPA10201-DPB11601 DPA10201-DPB11901 DPA10201-DPB13401 DPA10202-DPB10101 DPA10202-DPB10201 DPA10202-DPB10202 DPA10202-DPB10401 DPA10202-DPB10501 DPA10202-DPB110601 DPA10202-DPB11901 DPA10202-DPB13101 DPA10202-DPB13801 DPA10202-DPB15501 DPA10202-DPB16501 DPA10301-DPB10101 DPA10301-DPB10201 DPA10301-DPB10202 DPA10301-DPB10401 DPA10301-DPB10402 DPA10301-DPB110501 DPA10301-DPB110601 DPA10301-DPB11301; note = HLAs: DPA10301-DPB11801 DPA10301-DPB12301 DPA10301-DPB13901 DPA10301-DPB14001 DPA10301-DPB14901 DPA10301-DPB15501 DPA10301-DPB16501 DPA10301-DPB17501 DPA10301-DPB18001 DPA10401-DPB10101 DPA10401-DPB10201 DPA10401-DPB10202 DPA10401-DPB10402 DPA10401-DPB10501 DPA10401-DPB110501 DPA10401-DPB14901 DQA10101-DQB10501 DQA10102-DQB10501 DQA10102-DQB10502 DQA10102-DQB10503 DQA10103-DQB10501 DQA10104-DQB10501 DQA10105-DQB10501
PDKKHQKEPPFLWMGYELHPDKWTV

SEQ ID NO: 4839 - protein, 15 aa, Human immunodeficiency virus 1
  source 1..15: note = HLAs: DRB1_0701 DPA10401-DPB10101 DQA10103-DQB10601
PENPYNTPVFAIKKK

SEQ ID NO: 4840 - protein, 16 aa, Human immunodeficiency virus 1
  source 1..16: note = HLAs: DPA10401-DPB10101
PENPYNTPVFAIKKKD

SEQ ID NO: 4841 - protein, 17 aa, Human immunodeficiency virus 1
  source 1..17: note = HLAs: DRB1_1103 DRB1_1104
PENPYNTPVFAIKKKDS

SEQ ID NO: 4842 - protein, 19 aa, Human immunodeficiency virus 1
  source 1..19: note = HLAs: DRB1_0804 DRB1_0806 DRB1_1101 DRB1_1103 DRB1_1104 DRB1_1305
PENPYNTPVFAIKKKDSTK

SEQ ID NO: 4843 - protein, 20 aa, Human immunodeficiency virus 1
  source 1..20: note = HLAs: DRB1_0801 DRB1_0802 DRB1_0804 DRB1_0806 DRB1_0809 DRB1_1101 DRB1_1102 DRB1_1103 DRB1_1104 DRB1_1301 DRB1_1304 DRB1_1305 DRB1_1406 DPA10401-DPB10101 DQA10103-DQB10601
PENPYNTPVFAIKKKDSTKW

SEQ ID NO: 4844 - protein, 21 aa, Human immunodeficiency virus 1
  source 1..21: note = HLAs: DRB1_0801 DRB1_0804 DRB1_0806 DRB1_1101 DRB1_1102 DRB1_1103 DRB1_1104 DRB1_1301 DRB1_1304 DRB1_1305 DRB1_1406
PENPYNTPVFAIKKKDSTKWR

SEQ ID NO: 4845 - protein, 22 aa, Human immunodeficiency virus 1
  source 1..22: note = HLAs: DRB1_0801 DRB1_0804 DRB1_0806 DRB1_1101 DRB1_1102 DRB1_1103 DRB1_1104 DRB1_1301 DRB1_1304 DRB1_1305 DRB1_1406
PENPYNTPVFAIKKKDSTKWRK

SEQ ID NO: 4846 - protein, 23 aa, Human immunodeficiency virus 1
  source 1..23: note = HLAs: DRB1_0801 DRB1_0804 DRB1_0806 DRB1_1101 DRB1_1102 DRB1_1103 DRB1_1104 DRB1_1301 DRB1_1304 DRB1_1305 DRB1_1406
PENPYNTPVFAIKKKDSTKWRKL

SEQ ID NO: 4847 - protein, 24 aa, Human immunodeficiency virus 1
  source 1..24: note = HLAs: DRB1_0801 DRB1_0804 DRB1_0806 DRB1_1101 DRB1_1102 DRB1_1103 DRB1_1104 DRB1_1301 DRB1_1304 DRB1_1305 DRB1_1406 DPA10103-DPB11501 DPA10103-DPB15001 DPA10104-DPB11501 DPA10105-DPB15001 DPA10202-DPB13101 DPA10401-DPB10101
PENPYNTPVFAIKKKDSTKWRKLV

SEQ ID NO: 4848 - protein, 25 aa, Human immunodeficiency virus 1
  source 1..25: note = HLAs: DRB1_0801 DRB1_0804 DRB1_0806 DRB1_1101 DRB1_1102 DRB1_1103 DRB1_1104 DRB1_1301 DRB1_1304 DRB1_1305 DRB1_1406 DPA10103-DPB11501 DPA10103-DPB15001 DPA10104-DPB11501 DPA10105-DPB15001 DPA10202-DPB13101 DPA10401-DPB10101
PENPYNTPVFAIKKKDSTKWRKLVD

SEQ ID NO: 4849 - protein, 13 aa, Human immunodeficiency virus 1
  source 1..13: note = HLAs: DRB1_0101 DRB1_0102 DRB1_0404 DRB1_0408 DRB1_1001 DQA10102-DQB10501
PEVIPMFSALSEG

SEQ ID NO: 4850 - protein, 14 aa, Human immunodeficiency virus 1
  source 1..14: note = HLAs: DRB1_0101 DRB1_0102 DRB1_0401 DRB1_0404 DRB1_0405 DRB1_0408 DRB1_0410 DRB1_0802 DRB1_0804 DRB1_0809 DRB1_0901 DRB1_1001 DRB1_1501 DRB1_1602 DQA10102-DQB10501 DQA10102-DQB10503 DQA10102-DQB10601 DQA10103-DQB10501 DQA10103-DQB10601 DQA10103-DQB10609 DQA10201-DQB10301 DQA10201-DQB10302 DQA10201-DQB10303 DQA10501-DQB10301 DQA10501-DQB10319 DQA10503-DQB10301 DQA10505-DQB10301 DQA10505-DQB10302 DQA10505-DQB10309 DQA10505-DQB10319 DQA10505-DQB10402 DQA10506-DQB10303 DQA10508-DQB10301 DQA10509-DQB10301 DQA10601-DQB10301
PEVIPMFSALSEGA

SEQ ID NO: 4851 - protein, 15 aa, Human immunodeficiency virus 1
  source 1..15: note = HLAs: DRB1_0101 DRB1_0102 DRB1_0401 DRB1_0402 DRB1_0404 DRB1_0405 DRB1_0408 DRB1_0410 DRB1_0701 DRB1_0801 DRB1_0802 DRB1_0804 DRB1_0806 DRB1_0809 DRB1_0813 DRB1_0901 DRB1_1001 DRB1_1101 DRB1_1102 DRB1_1103 DRB1_1104 DRB1_1301 DRB1_1304 DRB1_1305 DRB1_1406 DRB1_1501 DRB1_1503 DRB1_1601 DRB1_1602 DPA10103-DPB11501 DPA10104-DPB11501 DPA10301-DPB10101 DPA10301-DPB11801 DPA10401-DPB10101 DQA10102-DQB10501 DQA10102-DQB10503 DQA10102-DQB10601 DQA10102-DQB10602 DQA10102-DQB10609 DQA10102-DQB10611 DQA10103-DQB10501 DQA10103-DQB10601 DQA10103-DQB10602 DQA10103-DQB10609 DQA10201-DQB10301 DQA10201-DQB10302 DQA10201-DQB10303 DQA10301-DQB10301 DQA10302-DQB10301 DQA10303-DQB10301 DQA10401-DQB10301 DQA10401-DQB10319 DQA10501-DQB10203 DQA10501-DQB10301 DQA10501-DQB10319 DQA10503-DQB10301 DQA10505-DQB10301 DQA10505-DQB10302 DQA10505-DQB10309 DQA10505-DQB10319 DQA10505-DQB10402 DQA10506-DQB10303 DQA10508-DQB10301 DQA10509-DQB10301 DQA10601-DQB10301
PEVIPMFSALSEGAT

SEQ ID NO: 4852 - protein, 16 aa, Human immunodeficiency virus 1
  source 1..16: note = HLAs: DRB1_0101 DRB1_0102 DRB1_0401 DRB1_0404 DRB1_0405 DRB1_0408 DRB1_0410 DRB1_0802 DRB1_0804 DRB1_0809 DRB1_0901 DRB1_1001 DRB1_1104 DRB1_1501 DRB1_1602 DPA10301-DPB10101 DPA10401-DPB10101 DQA10102-DQB10501 DQA10102-DQB10503 DQA10102-DQB10601 DQA10102-DQB10602 DQA10102-DQB10609 DQA10102-DQB10611 DQA10103-DQB10501 DQA10103-DQB10601 DQA10103-DQB10602 DQA10103-DQB10609 DQA10201-DQB10301 DQA10201-DQB10302 DQA10201-DQB10303 DQA10301-DQB10301 DQA10302-DQB10301 DQA10303-DQB10301 DQA10401-DQB10301 DQA10401-DQB10319 DQA10501-DQB10203 DQA10501-DQB10301 DQA10501-DQB10319 DQA10503-DQB10301 DQA10505-DQB10301 DQA10505-DQB10302 DQA10505-DQB10309 DQA10505-DQB10319 DQA10505-DQB10402 DQA10506-DQB10303 DQA10508-DQB10301 DQA10509-DQB10301 DQA10601-DQB10301
PEVIPMFSALSEGATP

SEQ ID NO: 4853 - protein, 17 aa, Human immunodeficiency virus 1
  source 1..17: note = HLAs: DRB1_0101 DRB1_0102 DRB1_0401 DRB1_0404 DRB1_0405 DRB1_0408 DRB1_0410 DRB1_0802 DRB1_0804 DRB1_0806 DRB1_0809 DRB1_0813 DRB1_0901 DRB1_1001 DRB1_1104 DRB1_1406 DRB1_1501 DRB1_1601 DRB1_1602 DPA10103-DPB11501 DPA10104-DPB11501 DPA10301-DPB10101 DPA10401-DPB10101 DQA10102-DQB10501 DQA10102-DQB10503 DQA10102-DQB10601 DQA10102-DQB10602 DQA10102-DQB10609 DQA10102-DQB10611 DQA10103-DQB10501 DQA10103-DQB10601 DQA10103-DQB10602 DQA10103-DQB10609 DQA10201-DQB10301 DQA10201-DQB10302 DQA10201-DQB10303 DQA10301-DQB10301 DQA10302-DQB10301 DQA10303-DQB10301 DQA10401-DQB10301 DQA10401-DQB10319 DQA10501-DQB10203 DQA10501-DQB10301 DQA10501-DQB10319 DQA10503-DQB10301 DQA10505-DQB10301 DQA10505-DQB10302 DQA10505-DQB10309 DQA10505-DQB10319 DQA10505-DQB10402 DQA10506-DQB10303 DQA10508-DQB10301 DQA10509-DQB10301 DQA10601-DQB10301
PEVIPMFSALSEGATPQ

SEQ ID NO: 4854 - protein, 18 aa, Human immunodeficiency virus 1
  source 1..18: note = HLAs: DRB1_0101 DRB1_0404 DRB1_0408 DRB1_1001 DQA10102-DQB10501 DQA10102-DQB10503 DQA10102-DQB10601 DQA10102-DQB10602 DQA10102-DQB10611 DQA10201-DQB10301 DQA10201-DQB10303 DQA10501-DQB10301 DQA10501-DQB10319 DQA10503-DQB10301 DQA10505-DQB10301 DQA10505-DQB10309 DQA10505-DQB10319 DQA10506-DQB10303 DQA10508-DQB10301 DQA10509-DQB10301
PEVIPMFSALSEGATPQD

SEQ ID NO: 4855 - protein, 19 aa, Human immunodeficiency virus 1
  source 1..19: note = HLAs: DRB1_0101 DRB1_0102 DRB1_0401 DRB1_0404 DRB1_0405 DRB1_0408 DRB1_0410 DRB1_0901 DRB1_1001 DRB1_1602 DPA10301-DPB10101 DQA10102-DQB10501 DQA10102-DQB10503 DQA10102-DQB10601 DQA10102-DQB10602 DQA10102-DQB10609 DQA10102-DQB10611 DQA10103-DQB10501 DQA10103-DQB10601 DQA10103-DQB10609 DQA10201-DQB10301 DQA10201-DQB10302 DQA10201-DQB10303 DQA10401-DQB10301 DQA10401-DQB10319 DQA10501-DQB10301 DQA10501-DQB10319 DQA10503-DQB10301 DQA10505-DQB10301 DQA10505-DQB10302 DQA10505-DQB10309 DQA10505-DQB10319 DQA10505-DQB10402 DQA10506-DQB10303 DQA10508-DQB10301 DQA10509-DQB10301 DQA10601-DQB10301
PEVIPMFSALSEGATPQDL

SEQ ID NO: 4856 - protein, 20 aa, Human immunodeficiency virus 1
  source 1..20: note = HLAs: DRB1_0101 DRB1_0102 DRB1_0401 DRB1_0404 DRB1_0405 DRB1_0408 DRB1_0410 DRB1_0802 DRB1_0804 DRB1_0809 DRB1_0813 DRB1_0901 DRB1_1001 DRB1_1501 DRB1_1601 DRB1_1602 DPA10301-DPB10101 DPA10401-DPB10101 DQA10102-DQB10501 DQA10102-DQB10503 DQA10102-DQB10601 DQA10102-DQB10602 DQA10102-DQB10609 DQA10102-DQB10611 DQA10103-DQB10501 DQA10103-DQB10601 DQA10103-DQB10602 DQA10103-DQB10609 DQA10201-DQB10301 DQA10201-DQB10302 DQA10201-DQB10303 DQA10301-DQB10301 DQA10302-DQB10301 DQA10303-DQB10301 DQA10401-DQB10301 DQA10401-DQB10319 DQA10501-DQB10301 DQA10501-DQB10319 DQA10503-DQB10301 DQA10505-DQB10301 DQA10505-DQB10302 DQA10505-DQB10309 DQA10505-DQB10319 DQA10505-DQB10402 DQA10506-DQB10303 DQA10508-DQB10301 DQA10509-DQB10301 DQA10601-DQB10301
PEVIPMFSALSEGATPQDLN

SEQ ID NO: 4857 - protein, 21 aa, Human immunodeficiency virus 1
  source 1..21: note = HLAs: DRB1_0101 DRB1_0102 DRB1_0401 DRB1_0404 DRB1_0405 DRB1_0408 DRB1_0410 DRB1_0901 DRB1_1001 DRB1_1602 DPA10301-DPB10101 DQA10102-DQB10501 DQA10102-DQB10601 DQA10102-DQB10609 DQA10103-DQB10501 DQA10103-DQB10601 DQA10103-DQB10609 DQA10201-DQB10301 DQA10201-DQB10303 DQA10501-DQB10301 DQA10501-DQB10319 DQA10503-DQB10301 DQA10505-DQB10301 DQA10505-DQB10309 DQA10505-DQB10319 DQA10506-DQB10303 DQA10508-DQB10301 DQA10509-DQB10301 DQA10601-DQB10301
PEVIPMFSALSEGATPQDLNT

SEQ ID NO: 4858 - protein, 22 aa, Human immunodeficiency virus 1
  source 1..22: note = HLAs: DRB1_0101 DRB1_0102 DRB1_0401 DRB1_0404 DRB1_0405 DRB1_0408 DRB1_0410 DRB1_0901 DRB1_1001 DRB1_1602 DPA10301-DPB10101 DQA10102-DQB10501 DQA10102-DQB10601 DQA10102-DQB10609 DQA10103-DQB10501 DQA10103-DQB10601 DQA10103-DQB10609 DQA10201-DQB10301 DQA10201-DQB10303 DQA10501-DQB10301 DQA10501-DQB10319 DQA10503-DQB10301 DQA10505-DQB10301 DQA10505-DQB10309 DQA10505-DQB10319 DQA10506-DQB10303 DQA10508-DQB10301 DQA10509-DQB10301 DQA10601-DQB10301
PEVIPMFSALSEGATPQDLNTM

SEQ ID NO: 4859 - protein, 23 aa, Human immunodeficiency virus 1
  source 1..23: note = HLAs: DRB1_0101 DRB1_0102 DRB1_0401 DRB1_0404 DRB1_0405 DRB1_0408 DRB1_0410 DRB1_0901 DRB1_1001 DRB1_1602 DPA10301-DPB10101 DQA10102-DQB10501 DQA10102-DQB10601 DQA10102-DQB10609 DQA10103-DQB10501 DQA10103-DQB10601 DQA10103-DQB10609 DQA10201-DQB10301 DQA10201-DQB10303 DQA10501-DQB10301 DQA10501-DQB10319 DQA10503-DQB10301 DQA10505-DQB10301 DQA10505-DQB10309 DQA10505-DQB10319 DQA10506-DQB10303 DQA10508-DQB10301 DQA10509-DQB10301 DQA10601-DQB10301
PEVIPMFSALSEGATPQDLNTML

SEQ ID NO: 4860 - protein, 24 aa, Human immunodeficiency virus 1
  source 1..24: note = HLAs: DRB1_0101 DRB1_0102 DRB1_0401 DRB1_0404 DRB1_0405 DRB1_0408 DRB1_0410 DRB1_0901 DRB1_1001 DRB1_1602 DPA10301-DPB10101 DQA10102-DQB10501 DQA10102-DQB10601 DQA10102-DQB10609 DQA10103-DQB10501 DQA10103-DQB10601 DQA10103-DQB10609 DQA10201-DQB10301 DQA10201-DQB10303 DQA10501-DQB10301 DQA10501-DQB10319 DQA10503-DQB10301 DQA10505-DQB10301 DQA10505-DQB10309 DQA10505-DQB10319 DQA10506-DQB10303 DQA10508-DQB10301 DQA10509-DQB10301 DQA10601-DQB10301
PEVIPMFSALSEGATPQDLNTMLN

SEQ ID NO: 4861 - protein, 25 aa, Human immunodeficiency virus 1
  source 1..25: note = HLAs: DRB1_0101 DRB1_0102 DRB1_0401 DRB1_0404 DRB1_0405 DRB1_0408 DRB1_0410 DRB1_0901 DRB1_1001 DRB1_1602 DPA10301-DPB10101 DQA10102-DQB10501 DQA10102-DQB10503 DQA10102-DQB10601 DQA10102-DQB10609 DQA10103-DQB10501 DQA10103-DQB10601 DQA10103-DQB10609 DQA10201-DQB10301 DQA10201-DQB10303 DQA10501-DQB10301 DQA10501-DQB10319 DQA10503-DQB10301 DQA10505-DQB10301 DQA10505-DQB10309 DQA10505-DQB10319 DQA10506-DQB10303 DQA10508-DQB10301 DQA10509-DQB10301 DQA10601-DQB10301
PEVIPMFSALSEGATPQDLNTMLNT

SEQ ID NO: 4862 - protein, 13 aa, Human immunodeficiency virus 1
  source 1..13: note = HLAs: DRB1_1001 DRB1_1602
PEWEFVNTPPLVK

SEQ ID NO: 4863 - protein, 14 aa, Human immunodeficiency virus 1
  source 1..14: note = HLAs: DRB1_0101 DRB1_0401 DRB1_0405 DRB1_0408 DRB1_0701 DRB1_0813 DRB1_0901 DRB1_1001 DRB1_1114 DRB1_1302 DRB1_1601 DRB1_1602 DPA10103-DPB10101 DPA10103-DPB11501 DPA10104-DPB10101 DPA10104-DPB11501 DPA10105-DPB10101 DPA10202-DPB10101 DPA10202-DPB13101 DPA10301-DPB10101 DPA10301-DPB10201 DPA10301-DPB10202 DPA10301-DPB10401 DPA10301-DPB110601 DPA10301-DPB11801 DPA10301-DPB12301 DPA10301-DPB13901 DPA10301-DPB14001 DPA10401-DPB10101 DQA10102-DQB10501
PEWEFVNTPPLVKL

SEQ ID NO: 4864 - protein, 15 aa, Human immunodeficiency virus 1
  source 1..15: note = HLAs: DRB1_0101 DRB1_0102 DRB1_0401 DRB1_0404 DRB1_0405 DRB1_0408 DRB1_0410 DRB1_0701 DRB1_0801 DRB1_0802 DRB1_0803 DRB1_0804 DRB1_0806 DRB1_0809 DRB1_0813 DRB1_0901 DRB1_1001 DRB1_1101 DRB1_1102 DRB1_1103 DRB1_1104 DRB1_1114 DRB1_1301 DRB1_1302 DRB1_1303 DRB1_1304 DRB1_1305 DRB1_1312 DRB1_1401 DRB1_1402 DRB1_1403 DRB1_1404 DRB1_1406 DRB1_1407 DRB1_1454 DRB1_1501 DRB1_1502 DRB1_1601 DRB1_1602 DPA10103-DPB10101 DPA10103-DPB10201 DPA10103-DPB11501 DPA10103-DPB13101 DPA10103-DPB13401 DPA10103-DPB14801 DPA10103-DPB15001 DPA10104-DPB10101 DPA10104-DPB11501 DPA10105-DPB10101 DPA10105-DPB15001 DPA10106-DPB10101 DPA10201-DPB10101 DPA10201-DPB11501 DPA10202-DPB10101 DPA10202-DPB10201 DPA10202-DPB10202 DPA10202-DPB10501 DPA10202-DPB110601 DPA10202-DPB11801 DPA10202-DPB11901 DPA10202-DPB13101 DPA10202-DPB13801 DPA10202-DPB15501 DPA10202-DPB16501 DPA10301-DPB10101 DPA10301-DPB10201 DPA10301-DPB10202 DPA10301-DPB10401 DPA10301-DPB10402 DPA10301-DPB110501 DPA10301-DPB110601 DPA10301-DPB11801; note = HLAs: DPA10301-DPB12301 DPA10301-DPB13901 DPA10301-DPB14001 DPA10301-DPB14901 DPA10301-DPB15501 DPA10301-DPB16501 DPA10301-DPB17501 DPA10301-DPB18001 DPA10401-DPB10101 DPA10401-DPB10201 DPA10401-DPB10202 DPA10401-DPB10501 DPA10401-DPB11401 DQA10102-DQB10501 DQA10103-DQB10501
PEWEFVNTPPLVKLW

SEQ ID NO: 4865 - protein, 16 aa, Human immunodeficiency virus 1
  source 1..16: note = HLAs: DRB1_0101 DRB1_0401 DRB1_0405 DRB1_0408 DRB1_0701 DRB1_0801 DRB1_0813 DRB1_0901 DRB1_1001 DRB1_1101 DRB1_1114 DRB1_1302 DRB1_1304 DRB1_1305 DRB1_1402 DRB1_1406 DRB1_1601 DRB1_1602 DPA10103-DPB10101 DPA10103-DPB11501 DPA10103-DPB13101 DPA10103-DPB13401 DPA10103-DPB15001 DPA10104-DPB10101 DPA10104-DPB11501 DPA10105-DPB10101 DPA10105-DPB15001 DPA10106-DPB10101 DPA10201-DPB10101 DPA10201-DPB11501 DPA10202-DPB10101 DPA10202-DPB10201 DPA10202-DPB10202 DPA10202-DPB10501 DPA10202-DPB110601 DPA10202-DPB11801 DPA10202-DPB11901 DPA10202-DPB13101 DPA10202-DPB13801 DPA10202-DPB15501 DPA10202-DPB16501 DPA10301-DPB10101 DPA10301-DPB10201 DPA10301-DPB10202 DPA10301-DPB10401 DPA10301-DPB10402 DPA10301-DPB110501 DPA10301-DPB110601 DPA10301-DPB11801 DPA10301-DPB12301 DPA10301-DPB13901 DPA10301-DPB14001 DPA10301-DPB14901 DPA10301-DPB15501 DPA10301-DPB16501 DPA10301-DPB17501 DPA10301-DPB18001 DPA10401-DPB10101 DPA10401-DPB10201 DPA10401-DPB10202 DPA10401-DPB10301 DPA10401-DPB10501 DPA10401-DPB11401; note = HLAs: DQA10102-DQB10501 DQA10102-DQB10609 DQA10103-DQB10501
PEWEFVNTPPLVKLWY

SEQ ID NO: 4866 - protein, 17 aa, Human immunodeficiency virus 1
  source 1..17: note = HLAs: DRB1_0101 DRB1_0401 DRB1_0405 DRB1_0408 DRB1_0410 DRB1_0701 DRB1_0801 DRB1_0813 DRB1_0901 DRB1_1001 DRB1_1101 DRB1_1102 DRB1_1103 DRB1_1104 DRB1_1114 DRB1_1301 DRB1_1302 DRB1_1303 DRB1_1304 DRB1_1305 DRB1_1312 DRB1_1402 DRB1_1406 DRB1_1601 DRB1_1602 DPA10103-DPB10101 DPA10103-DPB11501 DPA10103-DPB13101 DPA10103-DPB13401 DPA10103-DPB15001 DPA10104-DPB10101 DPA10104-DPB11501 DPA10105-DPB10101 DPA10105-DPB15001 DPA10106-DPB10101 DPA10201-DPB10101 DPA10201-DPB11501 DPA10202-DPB10101 DPA10202-DPB10201 DPA10202-DPB10202 DPA10202-DPB10501 DPA10202-DPB110601 DPA10202-DPB11801 DPA10202-DPB11901 DPA10202-DPB13101 DPA10202-DPB13801 DPA10202-DPB15501 DPA10202-DPB16501 DPA10301-DPB10101 DPA10301-DPB10201 DPA10301-DPB10202 DPA10301-DPB10401 DPA10301-DPB10402 DPA10301-DPB110501 DPA10301-DPB110601 DPA10301-DPB11801 DPA10301-DPB12301 DPA10301-DPB13901 DPA10301-DPB14001 DPA10301-DPB14901 DPA10301-DPB16501 DPA10301-DPB17501 DPA10301-DPB18001 DPA10401-DPB10101 DPA10401-DPB10201 DPA10401-DPB10202; note = HLAs: DPA10401-DPB10501 DPA10401-DPB11401 DQA10102-DQB10501
PEWEFVNTPPLVKLWYQ

SEQ ID NO: 4867 - protein, 18 aa, Human immunodeficiency virus 1
  source 1..18: note = HLAs: DRB1_1001 DPA10103-DPB11501 DPA10104-DPB11501 DPA10202-DPB10101 DPA10202-DPB13101 DPA10301-DPB10101 DPA10301-DPB10201 DPA10301-DPB10202 DPA10301-DPB10401 DPA10301-DPB11801 DPA10301-DPB12301 DPA10301-DPB13901 DPA10301-DPB14001 DPA10401-DPB10101 DQA10102-DQB10501
PEWEFVNTPPLVKLWYQL

SEQ ID NO: 4868 - protein, 19 aa, Human immunodeficiency virus 1
  source 1..19: note = HLAs: DRB1_0101 DRB1_0401 DRB1_0405 DRB1_0408 DRB1_0701 DRB1_0901 DRB1_1001 DRB1_1114 DRB1_1302 DRB1_1304 DRB1_1402 DRB1_1406 DRB1_1601 DRB1_1602 DPA10103-DPB10101 DPA10103-DPB10201 DPA10103-DPB10202 DPA10103-DPB11501 DPA10103-DPB11601 DPA10103-DPB13101 DPA10103-DPB13401 DPA10103-DPB14001 DPA10103-DPB14801 DPA10103-DPB15001 DPA10104-DPB10101 DPA10104-DPB11501 DPA10105-DPB10101 DPA10105-DPB15001 DPA10106-DPB10101 DPA10201-DPB10101 DPA10201-DPB11501 DPA10202-DPB10101 DPA10202-DPB10201 DPA10202-DPB10202 DPA10202-DPB10501 DPA10202-DPB110601 DPA10202-DPB11901 DPA10202-DPB13101 DPA10202-DPB13801 DPA10202-DPB15501 DPA10202-DPB16501 DPA10301-DPB10101 DPA10301-DPB10201 DPA10301-DPB10202 DPA10301-DPB10401 DPA10301-DPB10402 DPA10301-DPB110501 DPA10301-DPB110601 DPA10301-DPB11801 DPA10301-DPB12301 DPA10301-DPB13901 DPA10301-DPB14001 DPA10301-DPB14901 DPA10301-DPB15501 DPA10301-DPB16501 DPA10301-DPB17501 DPA10301-DPB18001 DPA10401-DPB10101 DPA10401-DPB10201 DPA10401-DPB10202 DPA10401-DPB10501; note = HLAs: DQA10102-DQB10501 DQA10103-DQB10501
PEWEFVNTPPLVKLWYQLE

SEQ ID NO: 4869 - protein, 13 aa, Human immunodeficiency virus 1
  source 1..13: note = HLAs: DPA10103-DPB10101 DPA10103-DPB10201 DPA10103-DPB10202 DPA10103-DPB11501 DPA10103-DPB13101 DPA10103-DPB13401 DPA10103-DPB14801 DPA10104-DPB10101 DPA10104-DPB11501 DPA10105-DPB10101 DPA10106-DPB10101 DPA10201-DPB10101 DPA10201-DPB11501 DPA10202-DPB10101 DPA10202-DPB13101 DPA10301-DPB10101 DPA10301-DPB10201 DPA10301-DPB10202 DPA10301-DPB10401 DPA10301-DPB110601 DPA10301-DPB11801 DPA10301-DPB12301 DPA10301-DPB13901 DPA10301-DPB14001 DPA10301-DPB16501 DPA10401-DPB10101 DPA10401-DPB10201 DPA10401-DPB10202 DQA10101-DQB10501 DQA10102-DQB10501 DQA10102-DQB10502 DQA10104-DQB10501 DQA10105-DQB10501
PFLWMGYELHPDK

SEQ ID NO: 4870 - protein, 14 aa, Human immunodeficiency virus 1
  source 1..14: note = HLAs: DRB1_1001 DPA10103-DPB10101 DPA10103-DPB10201 DPA10103-DPB10202 DPA10103-DPB10401 DPA10103-DPB112601 DPA10103-DPB11501 DPA10103-DPB11601 DPA10103-DPB11901 DPA10103-DPB12301 DPA10103-DPB13101 DPA10103-DPB13401 DPA10103-DPB13901 DPA10103-DPB14001 DPA10103-DPB14101 DPA10103-DPB14801 DPA10103-DPB15001 DPA10103-DPB15901 DPA10104-DPB10101 DPA10104-DPB11501 DPA10105-DPB10101 DPA10105-DPB10401 DPA10105-DPB15001 DPA10106-DPB10101 DPA10201-DPB10101 DPA10201-DPB11501 DPA10201-DPB11601 DPA10202-DPB10101 DPA10202-DPB10202 DPA10202-DPB110601 DPA10202-DPB11901 DPA10202-DPB13101 DPA10202-DPB16501 DPA10301-DPB10101 DPA10301-DPB10201 DPA10301-DPB10202 DPA10301-DPB10401 DPA10301-DPB10402 DPA10301-DPB110501 DPA10301-DPB110601 DPA10301-DPB11801 DPA10301-DPB12301 DPA10301-DPB13901 DPA10301-DPB14001 DPA10301-DPB14901 DPA10301-DPB15501 DPA10301-DPB16501 DPA10301-DPB17501 DPA10301-DPB18001 DPA10401-DPB10101 DPA10401-DPB10201 DPA10401-DPB10202 DQA10101-DQB10501 DQA10101-DQB10503 DQA10102-DQB10501; note = HLAs: DQA10102-DQB10502 DQA10102-DQB10503 DQA10103-DQB10501 DQA10104-DQB10501 DQA10104-DQB10503 DQA10105-DQB10501 DQA10107-DQB10503
PFLWMGYELHPDKW

SEQ ID NO: 4871 - protein, 15 aa, Human immunodeficiency virus 1
  source 1..15: note = HLAs: DRB1_0101 DRB1_0405 DRB1_0410 DRB1_1001 DRB1_1304 DPA10103-DPB10101 DPA10103-DPB10201 DPA10103-DPB10202 DPA10103-DPB10401 DPA10103-DPB112601 DPA10103-DPB11501 DPA10103-DPB11601 DPA10103-DPB11801 DPA10103-DPB11901 DPA10103-DPB12301 DPA10103-DPB13101 DPA10103-DPB13401 DPA10103-DPB13901 DPA10103-DPB14001 DPA10103-DPB14101 DPA10103-DPB14801 DPA10103-DPB15001 DPA10103-DPB15901 DPA10104-DPB10101 DPA10104-DPB11501 DPA10105-DPB10101 DPA10105-DPB10401 DPA10105-DPB11801 DPA10105-DPB15001 DPA10106-DPB10101 DPA10201-DPB10101 DPA10201-DPB110601 DPA10201-DPB11501 DPA10201-DPB11601 DPA10201-DPB11901 DPA10201-DPB13401 DPA10202-DPB10101 DPA10202-DPB10201 DPA10202-DPB10202 DPA10202-DPB110601 DPA10202-DPB11901 DPA10202-DPB13101 DPA10202-DPB16501 DPA10301-DPB10101 DPA10301-DPB10201 DPA10301-DPB10202 DPA10301-DPB10401 DPA10301-DPB10402 DPA10301-DPB110501 DPA10301-DPB110601 DPA10301-DPB11801 DPA10301-DPB12301 DPA10301-DPB13901 DPA10301-DPB14001 DPA10301-DPB14901 DPA10301-DPB15501 DPA10301-DPB16501; note = HLAs: DPA10301-DPB17501 DPA10301-DPB18001 DPA10401-DPB10101 DPA10401-DPB10201 DPA10401-DPB10202 DPA10401-DPB10402 DPA10401-DPB10501 DPA10401-DPB110501 DPA10401-DPB14901 DQA10101-DQB10501 DQA10101-DQB10503 DQA10102-DQB10501 DQA10102-DQB10502 DQA10102-DQB10503 DQA10103-DQB10501 DQA10104-DQB10501 DQA10104-DQB10503 DQA10105-DQB10501 DQA10107-DQB10503 DQA10505-DQB10402
PFLWMGYELHPDKWT

SEQ ID NO: 4872 - protein, 16 aa, Human immunodeficiency virus 1
  source 1..16: note = HLAs: DRB1_1001 DPA10103-DPB10101 DPA10103-DPB10201 DPA10103-DPB10202 DPA10103-DPB10401 DPA10103-DPB112601 DPA10103-DPB11501 DPA10103-DPB11601 DPA10103-DPB11801 DPA10103-DPB11901 DPA10103-DPB12301 DPA10103-DPB13101 DPA10103-DPB13401 DPA10103-DPB13901 DPA10103-DPB14001 DPA10103-DPB14101 DPA10103-DPB14801 DPA10103-DPB15001 DPA10103-DPB15901 DPA10104-DPB10101 DPA10104-DPB11501 DPA10105-DPB10101 DPA10105-DPB10401 DPA10105-DPB11801 DPA10105-DPB15001 DPA10106-DPB10101 DPA10201-DPB10101 DPA10201-DPB110601 DPA10201-DPB11501 DPA10201-DPB11601 DPA10201-DPB11901 DPA10202-DPB10101 DPA10202-DPB10202 DPA10202-DPB110601 DPA10202-DPB11901 DPA10202-DPB13101 DPA10202-DPB16501 DPA10301-DPB10101 DPA10301-DPB10201 DPA10301-DPB10202 DPA10301-DPB10401 DPA10301-DPB10402 DPA10301-DPB110501 DPA10301-DPB110601 DPA10301-DPB11801 DPA10301-DPB12301 DPA10301-DPB13901 DPA10301-DPB14001 DPA10301-DPB14901 DPA10301-DPB15501 DPA10301-DPB16501 DPA10301-DPB17501 DPA10301-DPB18001 DPA10401-DPB10101 DPA10401-DPB10201; note = HLAs: DPA10401-DPB10202 DPA10401-DPB10501 DQA10101-DQB10501 DQA10101-DQB10503 DQA10102-DQB10501 DQA10102-DQB10502 DQA10102-DQB10503 DQA10103-DQB10501 DQA10104-DQB10501 DQA10104-DQB10503 DQA10105-DQB10501 DQA10107-DQB10503 DQA10505-DQB10402
PFLWMGYELHPDKWTV

SEQ ID NO: 4873 - protein, 17 aa, Human immunodeficiency virus 1
  source 1..17: note = HLAs: DRB1_1001 DPA10103-DPB10101 DPA10103-DPB10201 DPA10103-DPB10202 DPA10103-DPB10401 DPA10103-DPB112601 DPA10103-DPB11501 DPA10103-DPB11601 DPA10103-DPB11901 DPA10103-DPB12301 DPA10103-DPB13101 DPA10103-DPB13401 DPA10103-DPB13901 DPA10103-DPB14001 DPA10103-DPB14101 DPA10103-DPB14801 DPA10103-DPB15001 DPA10103-DPB15901 DPA10104-DPB10101 DPA10104-DPB11501 DPA10105-DPB10101 DPA10105-DPB10401 DPA10105-DPB15001 DPA10106-DPB10101 DPA10201-DPB10101 DPA10201-DPB11501 DPA10201-DPB11601 DPA10202-DPB10101 DPA10202-DPB10202 DPA10202-DPB110601 DPA10202-DPB11901 DPA10202-DPB13101 DPA10202-DPB16501 DPA10301-DPB10101 DPA10301-DPB10201 DPA10301-DPB10202 DPA10301-DPB10401 DPA10301-DPB10402 DPA10301-DPB110501 DPA10301-DPB110601 DPA10301-DPB11801 DPA10301-DPB12301 DPA10301-DPB13901 DPA10301-DPB14001 DPA10301-DPB14901 DPA10301-DPB16501 DPA10301-DPB17501 DPA10301-DPB18001 DPA10401-DPB10101 DPA10401-DPB10201 DPA10401-DPB10202 DPA10401-DPB10501 DQA10101-DQB10501 DQA10101-DQB10503 DQA10102-DQB10501; note = HLAs: DQA10102-DQB10502 DQA10102-DQB10503 DQA10103-DQB10501 DQA10104-DQB10501 DQA10104-DQB10503 DQA10105-DQB10501 DQA10107-DQB10503
PFLWMGYELHPDKWTVQ

SEQ ID NO: 4874 - protein, 18 aa, Human immunodeficiency virus 1
  source 1..18: note = HLAs: DPA10103-DPB10101 DPA10103-DPB10201 DPA10103-DPB10202 DPA10103-DPB11501 DPA10103-DPB13101 DPA10103-DPB13401 DPA10103-DPB14801 DPA10104-DPB10101 DPA10104-DPB11501 DPA10105-DPB10101 DPA10106-DPB10101 DPA10201-DPB10101 DPA10202-DPB10101 DPA10301-DPB10101 DPA10301-DPB10201 DPA10301-DPB10202 DPA10301-DPB10401 DPA10301-DPB10402 DPA10301-DPB110501 DPA10301-DPB110601 DPA10301-DPB11801 DPA10301-DPB12301 DPA10301-DPB13901 DPA10301-DPB14001 DPA10301-DPB14901 DPA10301-DPB16501 DPA10301-DPB18001 DPA10401-DPB10101 DPA10401-DPB10201 DPA10401-DPB10202 DQA10101-DQB10501 DQA10102-DQB10501 DQA10102-DQB10502 DQA10102-DQB10503 DQA10104-DQB10501 DQA10105-DQB10501
PFLWMGYELHPDKWTVQP

SEQ ID NO: 4875 - protein, 19 aa, Human immunodeficiency virus 1
  source 1..19: note = HLAs: DRB1_1001 DPA10103-DPB10101 DPA10103-DPB10201 DPA10103-DPB10202 DPA10103-DPB10401 DPA10103-DPB112601 DPA10103-DPB11501 DPA10103-DPB11601 DPA10103-DPB11901 DPA10103-DPB12301 DPA10103-DPB13101 DPA10103-DPB13401 DPA10103-DPB13901 DPA10103-DPB14001 DPA10103-DPB14101 DPA10103-DPB14801 DPA10103-DPB15001 DPA10104-DPB10101 DPA10104-DPB11501 DPA10105-DPB10101 DPA10105-DPB10401 DPA10105-DPB15001 DPA10106-DPB10101 DPA10201-DPB10101 DPA10201-DPB11501 DPA10202-DPB10101 DPA10202-DPB110601 DPA10202-DPB11901 DPA10202-DPB13101 DPA10202-DPB16501 DPA10301-DPB10101 DPA10301-DPB10201 DPA10301-DPB10202 DPA10301-DPB10401 DPA10301-DPB10402 DPA10301-DPB110501 DPA10301-DPB110601 DPA10301-DPB11801 DPA10301-DPB12301 DPA10301-DPB13901 DPA10301-DPB14001 DPA10301-DPB14901 DPA10301-DPB16501 DPA10301-DPB18001 DPA10401-DPB10101 DPA10401-DPB10201 DPA10401-DPB10202 DPA10401-DPB10501 DQA10101-DQB10501 DQA10101-DQB10503 DQA10102-DQB10501 DQA10102-DQB10502 DQA10102-DQB10503 DQA10103-DQB10501 DQA10104-DQB10501; note = HLAs: DQA10104-DQB10503 DQA10105-DQB10501 DQA10107-DQB10503
PFLWMGYELHPDKWTVQPI

SEQ ID NO: 4876 - protein, 20 aa, Human immunodeficiency virus 1
  source 1..20: note = HLAs: DRB1_0101 DRB1_1001 DPA10103-DPB10101 DPA10103-DPB10201 DPA10103-DPB10202 DPA10103-DPB10401 DPA10103-DPB10501 DPA10103-DPB112601 DPA10103-DPB11501 DPA10103-DPB11601 DPA10103-DPB11901 DPA10103-DPB12301 DPA10103-DPB13101 DPA10103-DPB13401 DPA10103-DPB13901 DPA10103-DPB14001 DPA10103-DPB14101 DPA10103-DPB14801 DPA10103-DPB15001 DPA10103-DPB15901 DPA10104-DPB10101 DPA10104-DPB11501 DPA10105-DPB10101 DPA10105-DPB10401 DPA10105-DPB15001 DPA10106-DPB10101 DPA10201-DPB10101 DPA10201-DPB11501 DPA10201-DPB11601 DPA10202-DPB10101 DPA10202-DPB10202 DPA10202-DPB110601 DPA10202-DPB11901 DPA10202-DPB13101 DPA10202-DPB16501 DPA10301-DPB10101 DPA10301-DPB10201 DPA10301-DPB10202 DPA10301-DPB10401 DPA10301-DPB10402 DPA10301-DPB110501 DPA10301-DPB110601 DPA10301-DPB11801 DPA10301-DPB12301 DPA10301-DPB13901 DPA10301-DPB14001 DPA10301-DPB14901 DPA10301-DPB15501 DPA10301-DPB16501 DPA10301-DPB17501 DPA10301-DPB18001 DPA10401-DPB10101 DPA10401-DPB10201 DPA10401-DPB10202 DPA10401-DPB10501; note = HLAs: DQA10101-DQB10501 DQA10101-DQB10503 DQA10102-DQB10501 DQA10102-DQB10502 DQA10102-DQB10503 DQA10103-DQB10501 DQA10104-DQB10501 DQA10104-DQB10503 DQA10105-DQB10501 DQA10107-DQB10503 DQA10505-DQB10402
PFLWMGYELHPDKWTVQPIQ

SEQ ID NO: 4877 - protein, 21 aa, Human immunodeficiency virus 1
  source 1..21: note = HLAs: DRB1_1001 DPA10103-DPB10101 DPA10103-DPB10201 DPA10103-DPB10202 DPA10103-DPB11501 DPA10103-DPB11601 DPA10103-DPB11901 DPA10103-DPB13101 DPA10103-DPB13401 DPA10103-DPB14101 DPA10103-DPB14801 DPA10103-DPB15001 DPA10104-DPB10101 DPA10104-DPB11501 DPA10105-DPB10101 DPA10105-DPB15001 DPA10106-DPB10101 DPA10201-DPB10101 DPA10201-DPB11501 DPA10202-DPB10101 DPA10202-DPB13101 DPA10301-DPB10101 DPA10301-DPB10201 DPA10301-DPB10202 DPA10301-DPB10401 DPA10301-DPB10402 DPA10301-DPB110501 DPA10301-DPB110601 DPA10301-DPB11801 DPA10301-DPB12301 DPA10301-DPB13901 DPA10301-DPB14001 DPA10301-DPB14901 DPA10301-DPB16501 DPA10301-DPB18001 DPA10401-DPB10101 DPA10401-DPB10201 DPA10401-DPB10202 DPA10401-DPB10501 DQA10101-DQB10501 DQA10102-DQB10501 DQA10102-DQB10502 DQA10102-DQB10503 DQA10103-DQB10501 DQA10104-DQB10501 DQA10105-DQB10501
PFLWMGYELHPDKWTVQPIQL

SEQ ID NO: 4878 - protein, 22 aa, Human immunodeficiency virus 1
  source 1..22: note = HLAs: DRB1_1001 DPA10103-DPB10101 DPA10103-DPB10201 DPA10103-DPB10202 DPA10103-DPB11501 DPA10103-DPB11601 DPA10103-DPB11901 DPA10103-DPB13101 DPA10103-DPB13401 DPA10103-DPB14001 DPA10103-DPB14101 DPA10103-DPB14801 DPA10103-DPB15001 DPA10104-DPB10101 DPA10104-DPB11501 DPA10105-DPB10101 DPA10105-DPB15001 DPA10106-DPB10101 DPA10201-DPB10101 DPA10201-DPB11501 DPA10202-DPB10101 DPA10202-DPB110601 DPA10202-DPB11901 DPA10202-DPB13101 DPA10301-DPB10101 DPA10301-DPB10201 DPA10301-DPB10202 DPA10301-DPB10401 DPA10301-DPB10402 DPA10301-DPB110501 DPA10301-DPB110601 DPA10301-DPB11801 DPA10301-DPB12301 DPA10301-DPB13901 DPA10301-DPB14001 DPA10301-DPB14901 DPA10301-DPB15501 DPA10301-DPB16501 DPA10301-DPB18001 DPA10401-DPB10101 DPA10401-DPB10201 DPA10401-DPB10202 DPA10401-DPB10501 DQA10101-DQB10501 DQA10102-DQB10501 DQA10102-DQB10502 DQA10102-DQB10503 DQA10103-DQB10501 DQA10104-DQB10501 DQA10105-DQB10501 DQA10505-DQB10402
PFLWMGYELHPDKWTVQPIQLP

SEQ ID NO: 4879 - protein, 13 aa, Human immunodeficiency virus 1
  source 1..13: note = HLAs: DRB1_0401 DRB1_0404 DRB1_0408 DRB1_1001 DQA10102-DQB10501
PGIRYQYNVLPQG

SEQ ID NO: 4880 - protein, 14 aa, Human immunodeficiency virus 1
  source 1..14: note = HLAs: DRB1_0101 DRB1_0102 DRB1_0401 DRB1_0404 DRB1_0405 DRB1_0408 DRB1_0410 DRB1_0802 DRB1_0809 DRB1_0813 DRB1_1001 DRB1_1114 DRB1_1302 DRB1_1501 DRB1_1602 DPA10301-DPB10101 DPA10401-DPB10101 DQA10102-DQB10501 DQA10102-DQB10503
PGIRYQYNVLPQGW

SEQ ID NO: 4881 - protein, 15 aa, Human immunodeficiency virus 1
  source 1..15: note = HLAs: DRB1_0101 DRB1_0102 DRB1_0401 DRB1_0402 DRB1_0404 DRB1_0405 DRB1_0408 DRB1_0410 DRB1_0801 DRB1_0802 DRB1_0804 DRB1_0806 DRB1_0809 DRB1_0813 DRB1_0901 DRB1_1001 DRB1_1101 DRB1_1102 DRB1_1103 DRB1_1104 DRB1_1114 DRB1_1301 DRB1_1302 DRB1_1303 DRB1_1304 DRB1_1305 DRB1_1312 DRB1_1402 DRB1_1403 DRB1_1406 DRB1_1501 DRB1_1502 DRB1_1503 DRB1_1601 DRB1_1602 DPA10103-DPB11501 DPA10103-DPB15001 DPA10104-DPB11501 DPA10105-DPB15001 DPA10301-DPB10101 DPA10301-DPB10201 DPA10301-DPB10202 DPA10301-DPB110601 DPA10301-DPB11801 DPA10401-DPB10101 DQA10102-DQB10501 DQA10102-DQB10503 DQA10103-DQB10501
PGIRYQYNVLPQGWK

SEQ ID NO: 4882 - protein, 16 aa, Human immunodeficiency virus 1
  source 1..16: note = HLAs: DRB1_0101 DRB1_0102 DRB1_0401 DRB1_0404 DRB1_0405 DRB1_0408 DRB1_0410 DRB1_0801 DRB1_0802 DRB1_0809 DRB1_0813 DRB1_1001 DRB1_1101 DRB1_1114 DRB1_1302 DRB1_1305 DRB1_1402 DRB1_1406 DRB1_1501 DRB1_1602 DPA10301-DPB10101 DPA10301-DPB10201 DPA10301-DPB10202 DPA10301-DPB110601 DPA10401-DPB10101 DQA10102-DQB10501 DQA10102-DQB10503 DQA10103-DQB10501
PGIRYQYNVLPQGWKG

SEQ ID NO: 4883 - protein, 17 aa, Human immunodeficiency virus 1
  source 1..17: note = HLAs: DRB1_0101 DRB1_0102 DRB1_0401 DRB1_0404 DRB1_0405 DRB1_0408 DRB1_0410 DRB1_0801 DRB1_0802 DRB1_0809 DRB1_0813 DRB1_1001 DRB1_1101 DRB1_1104 DRB1_1114 DRB1_1302 DRB1_1305 DRB1_1402 DRB1_1406 DRB1_1501 DRB1_1601 DRB1_1602 DPA10301-DPB10101 DPA10301-DPB110601 DPA10401-DPB10101 DQA10102-DQB10501 DQA10102-DQB10503 DQA10103-DQB10501
PGIRYQYNVLPQGWKGS

SEQ ID NO: 4884 - protein, 18 aa, Human immunodeficiency virus 1
  source 1..18: note = HLAs: DRB1_0408 DRB1_1001 DQA10102-DQB10501
PGIRYQYNVLPQGWKGSP

SEQ ID NO: 4885 - protein, 19 aa, Human immunodeficiency virus 1
  source 1..19: note = HLAs: DRB1_0101 DRB1_0401 DRB1_0404 DRB1_0405 DRB1_0408 DRB1_0410 DRB1_0813 DRB1_1001 DRB1_1101 DRB1_1114 DRB1_1302 DRB1_1305 DRB1_1602 DPA10301-DPB10101 DPA10301-DPB110601 DPA10401-DPB10101 DQA10102-DQB10501 DQA10102-DQB10503 DQA10103-DQB10501
PGIRYQYNVLPQGWKGSPA

SEQ ID NO: 4886 - protein, 20 aa, Human immunodeficiency virus 1
  source 1..20: note = HLAs: DRB1_0101 DRB1_0102 DRB1_0401 DRB1_0404 DRB1_0405 DRB1_0408 DRB1_0410 DRB1_0801 DRB1_0802 DRB1_0804 DRB1_0806 DRB1_0809 DRB1_0813 DRB1_1001 DRB1_1101 DRB1_1102 DRB1_1104 DRB1_1114 DRB1_1301 DRB1_1302 DRB1_1304 DRB1_1305 DRB1_1402 DRB1_1406 DRB1_1501 DRB1_1502 DRB1_1601 DRB1_1602 DPA10103-DPB11501 DPA10103-DPB15001 DPA10104-DPB11501 DPA10105-DPB15001 DPA10202-DPB10101 DPA10301-DPB10101 DPA10301-DPB10201 DPA10301-DPB10202 DPA10301-DPB110601 DPA10301-DPB11801 DPA10301-DPB16501 DPA10401-DPB10101 DPA10401-DPB10201 DPA10401-DPB10501 DQA10102-DQB10501 DQA10102-DQB10503 DQA10103-DQB10501 DQA10505-DQB10402
PGIRYQYNVLPQGWKGSPAI

SEQ ID NO: 4887 - protein, 21 aa, Human immunodeficiency virus 1
  source 1..21: note = HLAs: DRB1_0101 DRB1_0401 DRB1_0404 DRB1_0408 DRB1_0410 DRB1_0813 DRB1_1001 DRB1_1101 DRB1_1114 DRB1_1302 DRB1_1305 DRB1_1406 DRB1_1602 DPA10401-DPB10101 DQA10102-DQB10501 DQA10103-DQB10501
PGIRYQYNVLPQGWKGSPAIF

SEQ ID NO: 4888 - protein, 22 aa, Human immunodeficiency virus 1
  source 1..22: note = HLAs: DRB1_0101 DRB1_0401 DRB1_0404 DRB1_0405 DRB1_0408 DRB1_0410 DRB1_0813 DRB1_1001 DRB1_1101 DRB1_1114 DRB1_1302 DRB1_1305 DRB1_1406 DRB1_1602 DPA10301-DPB10101 DPA10301-DPB110601 DPA10401-DPB10101 DQA10102-DQB10501 DQA10103-DQB10501 DQA10505-DQB10402
PGIRYQYNVLPQGWKGSPAIFQ

SEQ ID NO: 4889 - protein, 14 aa, Human immunodeficiency virus 1
  source 1..14: note = HLAs: DRB1_0401 DRB1_0405
PGIWQLDCTHLEGK

SEQ ID NO: 4890 - protein, 15 aa, Human immunodeficiency virus 1
  source 1..15: note = HLAs: DRB1_0101 DRB1_0301 DRB1_0401 DRB1_0405 DRB1_0408 DRB1_1001 DRB1_1303
PGIWQLDCTHLEGKI

SEQ ID NO: 4891 - protein, 16 aa, Human immunodeficiency virus 1
  source 1..16: note = HLAs: DRB1_0101 DRB1_0401 DRB1_0405 DRB1_0408
PGIWQLDCTHLEGKII

SEQ ID NO: 4892 - protein, 17 aa, Human immunodeficiency virus 1
  source 1..17: note = HLAs: DRB1_0101 DRB1_0401 DRB1_0405 DRB1_1001
PGIWQLDCTHLEGKIIL

SEQ ID NO: 4893 - protein, 19 aa, Human immunodeficiency virus 1
  source 1..19: note = HLAs: DRB1_0101 DRB1_0405 DRB1_1001 DPA10301-DPB10101 DPA10301-DPB10201 DPA10301-DPB10202 DPA10301-DPB110601 DPA10301-DPB11801 DPA10301-DPB14001 DPA10401-DPB10101 DQA10102-DQB10501
PGIWQLDCTHLEGKIILVA

SEQ ID NO: 4894 - protein, 20 aa, Human immunodeficiency virus 1
  source 1..20: note = HLAs: DRB1_0101 DRB1_0401 DRB1_0405 DRB1_1001 DRB1_1303 DPA10103-DPB11501 DPA10104-DPB11501 DPA10202-DPB10101 DPA10301-DPB10101 DPA10301-DPB10201 DPA10301-DPB10202 DPA10301-DPB10401 DPA10301-DPB110601 DPA10301-DPB11801 DPA10301-DPB12301 DPA10301-DPB13901 DPA10301-DPB14001 DPA10301-DPB16501 DPA10401-DPB10101 DPA10401-DPB10201 DPA10401-DPB10202 DQA10102-DQB10501
PGIWQLDCTHLEGKIILVAV

SEQ ID NO: 4895 - protein, 21 aa, Human immunodeficiency virus 1
  source 1..21: note = HLAs: DRB1_0101 DRB1_0405 DRB1_1001 DPA10103-DPB11501 DPA10104-DPB11501 DPA10301-DPB10101 DPA10301-DPB10201 DPA10301-DPB10202 DPA10301-DPB110601 DPA10301-DPB11801 DPA10301-DPB14001 DPA10301-DPB16501 DPA10401-DPB10101 DQA10102-DQB10501
PGIWQLDCTHLEGKIILVAVH

SEQ ID NO: 4896 - protein, 22 aa, Human immunodeficiency virus 1
  source 1..22: note = HLAs: DRB1_0101 DRB1_0405 DRB1_1001 DPA10103-DPB11501 DPA10104-DPB11501 DPA10301-DPB10101 DPA10301-DPB10201 DPA10301-DPB10202 DPA10301-DPB110601 DPA10301-DPB11801 DPA10301-DPB14001 DPA10301-DPB16501 DPA10401-DPB10101 DPA10401-DPB10202 DQA10102-DQB10501
PGIWQLDCTHLEGKIILVAVHV

SEQ ID NO: 4897 - protein, 23 aa, Human immunodeficiency virus 1
  source 1..23: note = HLAs: DRB1_0101 DRB1_0405 DRB1_1001 DPA10103-DPB11501 DPA10104-DPB11501 DPA10301-DPB10101 DPA10301-DPB10201 DPA10301-DPB10202 DPA10301-DPB110601 DPA10301-DPB11801 DPA10301-DPB14001 DPA10301-DPB16501 DPA10401-DPB10101 DPA10401-DPB10201 DPA10401-DPB10202 DQA10102-DQB10501 DQA10103-DQB10501
PGIWQLDCTHLEGKIILVAVHVA

SEQ ID NO: 4898 - protein, 24 aa, Human immunodeficiency virus 1
  source 1..24: note = HLAs: DRB1_0101 DRB1_0102 DRB1_0401 DRB1_0405 DRB1_0408 DRB1_0410 DRB1_1001 DPA10103-DPB11501 DPA10104-DPB11501 DPA10202-DPB10101 DPA10301-DPB10101 DPA10301-DPB10201 DPA10301-DPB10202 DPA10301-DPB10401 DPA10301-DPB110601 DPA10301-DPB11801 DPA10301-DPB12301 DPA10301-DPB13901 DPA10301-DPB14001 DPA10301-DPB16501 DPA10401-DPB10101 DPA10401-DPB10201 DPA10401-DPB10202 DQA10102-DQB10501 DQA10103-DQB10501
PGIWQLDCTHLEGKIILVAVHVAS

SEQ ID NO: 4899 - protein, 25 aa, Human immunodeficiency virus 1
  source 1..25: note = HLAs: DRB1_0101 DRB1_0102 DRB1_0401 DRB1_0404 DRB1_0405 DRB1_0408 DRB1_0410 DRB1_0813 DRB1_1001 DRB1_1406 DPA10103-DPB11501 DPA10104-DPB11501 DPA10202-DPB10101 DPA10301-DPB10101 DPA10301-DPB10201 DPA10301-DPB10202 DPA10301-DPB10401 DPA10301-DPB110601 DPA10301-DPB11801 DPA10301-DPB12301 DPA10301-DPB13901 DPA10301-DPB14001 DPA10301-DPB16501 DPA10401-DPB10101 DPA10401-DPB10201 DPA10401-DPB10202 DQA10102-DQB10501 DQA10102-DQB10609 DQA10103-DQB10501 DQA10103-DQB10601 DQA10103-DQB10609
PGIWQLDCTHLEGKIILVAVHVASG

SEQ ID NO: 4900 - protein, 16 aa, Human immunodeficiency virus 1
  source 1..16: note = HLAs: DRB1_0901 DQA10201-DQB10301 DQA10501-DQB10301 DQA10501-DQB10319 DQA10503-DQB10301 DQA10505-DQB10301 DQA10505-DQB10309 DQA10505-DQB10319 DQA10508-DQB10301 DQA10509-DQB10301
PGKWKPKMIGGIGGFI

SEQ ID NO: 4901 - protein, 17 aa, Human immunodeficiency virus 1
  source 1..17: note = HLAs: DRB1_0101 DRB1_0901 DQA10201-DQB10301 DQA10501-DQB10301 DQA10501-DQB10319 DQA10503-DQB10301 DQA10505-DQB10301 DQA10505-DQB10309 DQA10505-DQB10319 DQA10508-DQB10301 DQA10509-DQB10301
PGKWKPKMIGGIGGFIK

SEQ ID NO: 4902 - protein, 18 aa, Human immunodeficiency virus 1
  source 1..18: note = HLAs: DQA10201-DQB10301 DQA10501-DQB10301 DQA10501-DQB10319 DQA10503-DQB10301 DQA10505-DQB10301 DQA10505-DQB10309 DQA10505-DQB10319 DQA10508-DQB10301 DQA10509-DQB10301
PGKWKPKMIGGIGGFIKV

SEQ ID NO: 4903 - protein, 19 aa, Human immunodeficiency virus 1
  source 1..19: note = HLAs: DRB1_0101 DRB1_0901 DQA10102-DQB10501 DQA10102-DQB10601 DQA10103-DQB10601 DQA10201-DQB10301 DQA10501-DQB10301 DQA10501-DQB10319 DQA10503-DQB10301 DQA10505-DQB10301 DQA10505-DQB10309 DQA10505-DQB10319 DQA10508-DQB10301 DQA10509-DQB10301
PGKWKPKMIGGIGGFIKVR

SEQ ID NO: 4904 - protein, 20 aa, Human immunodeficiency virus 1
  source 1..20: note = HLAs: DRB1_0101 DRB1_0102 DRB1_0701 DRB1_0806 DRB1_0901 DRB1_1001 DRB1_1102 DRB1_1103 DRB1_1104 DRB1_1301 DRB1_1304 DRB1_1501 DRB1_1503 DRB1_1601 DQA10102-DQB10501 DQA10102-DQB10601 DQA10103-DQB10501 DQA10103-DQB10601 DQA10201-DQB10301 DQA10501-DQB10301 DQA10501-DQB10319 DQA10503-DQB10301 DQA10505-DQB10301 DQA10505-DQB10309 DQA10505-DQB10319 DQA10505-DQB10402 DQA10508-DQB10301 DQA10509-DQB10301
PGKWKPKMIGGIGGFIKVRQ

SEQ ID NO: 4905 - protein, 21 aa, Human immunodeficiency virus 1
  source 1..21: note = HLAs: DRB1_0101 DRB1_0806 DRB1_0901 DRB1_1102 DRB1_1103 DRB1_1104 DRB1_1301 DRB1_1304 DRB1_1501 DQA10102-DQB10501 DQA10103-DQB10601 DQA10201-DQB10301 DQA10501-DQB10301 DQA10501-DQB10319 DQA10503-DQB10301 DQA10505-DQB10301 DQA10505-DQB10309 DQA10505-DQB10319 DQA10508-DQB10301 DQA10509-DQB10301
PGKWKPKMIGGIGGFIKVRQY

SEQ ID NO: 4906 - protein, 20 aa, Human immunodeficiency virus 1
  source 1..20: note = HLAs: DPA10301-DPB10101
PGMDGPKVKQWPLTEEKIKA

SEQ ID NO: 4907 - protein, 21 aa, Human immunodeficiency virus 1
  source 1..21: note = HLAs: DPA10301-DPB10101
PGMDGPKVKQWPLTEEKIKAL

SEQ ID NO: 4908 - protein, 15 aa, Human immunodeficiency virus 1
  source 1..15: note = HLAs: DQA10201-DQB10301 DQA10301-DQB10301 DQA10302-DQB10301 DQA10303-DQB10301 DQA10501-DQB10301 DQA10501-DQB10319 DQA10503-DQB10301 DQA10505-DQB10301 DQA10505-DQB10309 DQA10505-DQB10319 DQA10508-DQB10301 DQA10509-DQB10301 DQA10601-DQB10301
PGQMREPRGSDIAGT

SEQ ID NO: 4909 - protein, 16 aa, Human immunodeficiency virus 1
  source 1..16: note = HLAs: DQA10201-DQB10301 DQA10301-DQB10301 DQA10302-DQB10301 DQA10303-DQB10301 DQA10401-DQB10301 DQA10401-DQB10319 DQA10501-DQB10301 DQA10501-DQB10319 DQA10503-DQB10301 DQA10505-DQB10301 DQA10505-DQB10309 DQA10505-DQB10319 DQA10506-DQB10303 DQA10508-DQB10301 DQA10509-DQB10301 DQA10601-DQB10301
PGQMREPRGSDIAGTT

SEQ ID NO: 4910 - protein, 17 aa, Human immunodeficiency virus 1
  source 1..17: note = HLAs: DQA10201-DQB10301 DQA10301-DQB10301 DQA10302-DQB10301 DQA10303-DQB10301 DQA10401-DQB10301 DQA10401-DQB10319 DQA10501-DQB10301 DQA10501-DQB10319 DQA10503-DQB10301 DQA10505-DQB10301 DQA10505-DQB10309 DQA10505-DQB10319 DQA10508-DQB10301 DQA10509-DQB10301 DQA10601-DQB10301
PGQMREPRGSDIAGTTS

SEQ ID NO: 4911 - protein, 18 aa, Human immunodeficiency virus 1
  source 1..18: note = HLAs: DQA10201-DQB10301 DQA10501-DQB10301 DQA10501-DQB10319 DQA10503-DQB10301 DQA10505-DQB10301 DQA10505-DQB10309 DQA10505-DQB10319 DQA10508-DQB10301 DQA10509-DQB10301 DQA10601-DQB10301
PGQMREPRGSDIAGTTST

SEQ ID NO: 4912 - protein, 19 aa, Human immunodeficiency virus 1
  source 1..19: note = HLAs: DQA10201-DQB10301 DQA10301-DQB10301 DQA10302-DQB10301 DQA10303-DQB10301 DQA10401-DQB10301 DQA10401-DQB10319 DQA10501-DQB10301 DQA10501-DQB10319 DQA10503-DQB10301 DQA10505-DQB10301 DQA10505-DQB10309 DQA10505-DQB10319 DQA10506-DQB10303 DQA10508-DQB10301 DQA10509-DQB10301 DQA10601-DQB10301
PGQMREPRGSDIAGTTSTL

SEQ ID NO: 4913 - protein, 20 aa, Human immunodeficiency virus 1
  source 1..20: note = HLAs: DQA10102-DQB10601 DQA10103-DQB10601 DQA10201-DQB10301 DQA10201-DQB10303 DQA10301-DQB10301 DQA10302-DQB10301 DQA10303-DQB10301 DQA10401-DQB10301 DQA10401-DQB10319 DQA10501-DQB10301 DQA10501-DQB10319 DQA10503-DQB10301 DQA10505-DQB10301 DQA10505-DQB10309 DQA10505-DQB10319 DQA10506-DQB10303 DQA10508-DQB10301 DQA10509-DQB10301 DQA10601-DQB10301
PGQMREPRGSDIAGTTSTLQ

SEQ ID NO: 4914 - protein, 21 aa, Human immunodeficiency virus 1
  source 1..21: note = HLAs: DQA10201-DQB10301 DQA10301-DQB10301 DQA10302-DQB10301 DQA10303-DQB10301 DQA10501-DQB10301 DQA10501-DQB10319 DQA10503-DQB10301 DQA10505-DQB10301 DQA10505-DQB10309 DQA10505-DQB10319 DQA10506-DQB10303 DQA10508-DQB10301 DQA10509-DQB10301 DQA10601-DQB10301
PGQMREPRGSDIAGTTSTLQE

SEQ ID NO: 4915 - protein, 22 aa, Human immunodeficiency virus 1
  source 1..22: note = HLAs: DQA10102-DQB10601 DQA10201-DQB10301 DQA10201-DQB10303 DQA10301-DQB10301 DQA10302-DQB10301 DQA10303-DQB10301 DQA10501-DQB10301 DQA10501-DQB10319 DQA10503-DQB10301 DQA10505-DQB10301 DQA10505-DQB10309 DQA10505-DQB10319 DQA10506-DQB10303 DQA10508-DQB10301 DQA10509-DQB10301 DQA10601-DQB10301
PGQMREPRGSDIAGTTSTLQEQ

SEQ ID NO: 4916 - protein, 23 aa, Human immunodeficiency virus 1
  source 1..23: note = HLAs: DQA10102-DQB10601 DQA10103-DQB10601 DQA10201-DQB10301 DQA10201-DQB10303 DQA10301-DQB10301 DQA10302-DQB10301 DQA10303-DQB10301 DQA10501-DQB10301 DQA10501-DQB10319 DQA10503-DQB10301 DQA10505-DQB10301 DQA10505-DQB10309 DQA10505-DQB10319 DQA10506-DQB10303 DQA10508-DQB10301 DQA10509-DQB10301 DQA10601-DQB10301
PGQMREPRGSDIAGTTSTLQEQI

SEQ ID NO: 4917 - protein, 15 aa, Human immunodeficiency virus 1
  source 1..15: note = HLAs: DRB1_0101 DRB1_0806 DRB1_1102 DRB1_1103 DRB1_1104 DRB1_1114 DRB1_1301 DRB1_1302 DRB1_1304 DRB1_1406
PHPAGLKKKKSVTVL

SEQ ID NO: 4918 - protein, 17 aa, Human immunodeficiency virus 1
  source 1..17: note = HLAs: DRB1_0101 DRB1_0701 DRB1_1102 DRB1_1103 DRB1_1104 DRB1_1301 DRB1_1304 DPA10103-DPB10101 DPA10103-DPB11501 DPA10103-DPB15001 DPA10104-DPB10101 DPA10104-DPB11501 DPA10105-DPB10101 DPA10105-DPB15001 DPA10202-DPB10101 DPA10202-DPB110601 DPA10202-DPB11901 DPA10301-DPB10101 DPA10301-DPB10201 DPA10301-DPB10202 DPA10301-DPB10401 DPA10301-DPB110601 DPA10301-DPB11801 DPA10301-DPB12301 DPA10301-DPB13901 DPA10301-DPB16501 DPA10401-DPB10101
PHPAGLKKKKSVTVLDV

SEQ ID NO: 4919 - protein, 18 aa, Human immunodeficiency virus 1
  source 1..18: note = HLAs: DPA10301-DPB10101 DPA10401-DPB10101
PHPAGLKKKKSVTVLDVG

SEQ ID NO: 4920 - protein, 19 aa, Human immunodeficiency virus 1
  source 1..19: note = HLAs: DRB1_1102 DRB1_1301 DPA10103-DPB11501 DPA10103-DPB15001 DPA10104-DPB11501 DPA10105-DPB15001 DPA10202-DPB10101 DPA10301-DPB10101 DPA10301-DPB10201 DPA10301-DPB10202 DPA10301-DPB110601 DPA10301-DPB11801 DPA10301-DPB16501 DPA10401-DPB10101
PHPAGLKKKKSVTVLDVGD

SEQ ID NO: 4921 - protein, 20 aa, Human immunodeficiency virus 1
  source 1..20: note = HLAs: DRB1_0101 DRB1_0701 DRB1_0801 DRB1_0804 DRB1_0806 DRB1_0813 DRB1_1001 DRB1_1102 DRB1_1103 DRB1_1104 DRB1_1114 DRB1_1301 DRB1_1302 DRB1_1304 DPA10103-DPB10101 DPA10103-DPB11501 DPA10103-DPB11901 DPA10103-DPB13101 DPA10103-DPB15001 DPA10104-DPB10101 DPA10104-DPB11501 DPA10105-DPB10101 DPA10105-DPB15001 DPA10202-DPB10101 DPA10202-DPB10501 DPA10202-DPB110601 DPA10202-DPB11101 DPA10202-DPB11401 DPA10202-DPB11901 DPA10202-DPB13801 DPA10202-DPB15501 DPA10301-DPB10101 DPA10301-DPB10201 DPA10301-DPB10202 DPA10301-DPB10401 DPA10301-DPB110601 DPA10301-DPB11801 DPA10301-DPB12301 DPA10301-DPB13901 DPA10301-DPB14001 DPA10301-DPB15501 DPA10301-DPB16501 DPA10401-DPB10101 DPA10401-DPB10201 DPA10401-DPB10202 DPA10401-DPB10301 DPA10401-DPB10501 DPA10401-DPB11401 DQA10102-DQB10501
PHPAGLKKKKSVTVLDVGDA

SEQ ID NO: 4922 - protein, 21 aa, Human immunodeficiency virus 1
  source 1..21: note = HLAs: DRB1_0101 DRB1_0806 DRB1_1001 DRB1_1102 DRB1_1103 DRB1_1301 DRB1_1304 DPA10103-DPB10101 DPA10103-DPB11501 DPA10103-DPB15001 DPA10104-DPB10101 DPA10104-DPB11501 DPA10105-DPB10101 DPA10105-DPB15001 DPA10202-DPB10101 DPA10301-DPB10101 DPA10301-DPB10201 DPA10301-DPB10202 DPA10301-DPB110601 DPA10301-DPB11801 DPA10301-DPB16501 DPA10401-DPB10101 DPA10401-DPB10501 DQA10102-DQB10501
PHPAGLKKKKSVTVLDVGDAY

SEQ ID NO: 4923 - protein, 22 aa, Human immunodeficiency virus 1
  source 1..22: note = HLAs: DRB1_0101 DRB1_0410 DRB1_0806 DRB1_1001 DRB1_1102 DRB1_1103 DRB1_1104 DRB1_1301 DRB1_1304 DPA10103-DPB10101 DPA10103-DPB11501 DPA10103-DPB15001 DPA10104-DPB10101 DPA10104-DPB11501 DPA10105-DPB10101 DPA10105-DPB15001 DPA10202-DPB10101 DPA10202-DPB110601 DPA10202-DPB11901 DPA10301-DPB10101 DPA10301-DPB10201 DPA10301-DPB10202 DPA10301-DPB110601 DPA10301-DPB11801 DPA10301-DPB14001 DPA10301-DPB16501 DPA10401-DPB10101 DPA10401-DPB10202 DPA10401-DPB10501 DQA10102-DQB10501 DQA10102-DQB10604 DQA10102-DQB10609
PHPAGLKKKKSVTVLDVGDAYF

SEQ ID NO: 4924 - protein, 23 aa, Human immunodeficiency virus 1
  source 1..23: note = HLAs: DRB1_0101 DRB1_0404 DRB1_0410 DRB1_0806 DRB1_1001 DRB1_1102 DRB1_1103 DRB1_1104 DRB1_1114 DRB1_1301 DRB1_1302 DRB1_1304 DRB1_1406 DPA10103-DPB10101 DPA10103-DPB11501 DPA10103-DPB15001 DPA10104-DPB10101 DPA10104-DPB11501 DPA10105-DPB10101 DPA10105-DPB15001 DPA10202-DPB10101 DPA10202-DPB110601 DPA10202-DPB11901 DPA10301-DPB10101 DPA10301-DPB10201 DPA10301-DPB10202 DPA10301-DPB10401 DPA10301-DPB110601 DPA10301-DPB11801 DPA10301-DPB12301 DPA10301-DPB13901 DPA10301-DPB14001 DPA10301-DPB16501 DPA10401-DPB10101 DPA10401-DPB10202 DPA10401-DPB10501 DQA10102-DQB10501 DQA10102-DQB10604 DQA10102-DQB10609
PHPAGLKKKKSVTVLDVGDAYFS

SEQ ID NO: 4925 - protein, 24 aa, Human immunodeficiency virus 1
  source 1..24: note = HLAs: DRB1_0101 DRB1_0404 DRB1_0410 DRB1_0806 DRB1_1001 DRB1_1102 DRB1_1103 DRB1_1104 DRB1_1114 DRB1_1301 DRB1_1302 DRB1_1304 DRB1_1406 DPA10103-DPB10101 DPA10103-DPB11501 DPA10103-DPB15001 DPA10104-DPB10101 DPA10104-DPB11501 DPA10105-DPB10101 DPA10105-DPB15001 DPA10202-DPB10101 DPA10202-DPB110601 DPA10202-DPB11901 DPA10301-DPB10101 DPA10301-DPB10201 DPA10301-DPB10202 DPA10301-DPB10401 DPA10301-DPB110601 DPA10301-DPB11801 DPA10301-DPB12301 DPA10301-DPB13901 DPA10301-DPB14001 DPA10301-DPB16501 DPA10401-DPB10101 DPA10401-DPB10201 DPA10401-DPB10202 DPA10401-DPB10501 DQA10102-DQB10501 DQA10102-DQB10503 DQA10102-DQB10604 DQA10102-DQB10609 DQA10103-DQB10501 DQA10103-DQB10609
PHPAGLKKKKSVTVLDVGDAYFSV

SEQ ID NO: 4926 - protein, 25 aa, Human immunodeficiency virus 1
  source 1..25: note = HLAs: DRB1_0101 DRB1_0404 DRB1_0410 DRB1_0806 DRB1_1001 DRB1_1102 DRB1_1103 DRB1_1104 DRB1_1114 DRB1_1301 DRB1_1302 DRB1_1304 DRB1_1406 DPA10103-DPB10101 DPA10103-DPB11501 DPA10103-DPB11901 DPA10103-DPB13101 DPA10103-DPB15001 DPA10104-DPB10101 DPA10104-DPB11501 DPA10105-DPB10101 DPA10105-DPB15001 DPA10202-DPB10101 DPA10202-DPB110601 DPA10202-DPB11901 DPA10301-DPB10101 DPA10301-DPB10201 DPA10301-DPB10202 DPA10301-DPB10401 DPA10301-DPB110601 DPA10301-DPB11801 DPA10301-DPB12301 DPA10301-DPB13901 DPA10301-DPB14001 DPA10301-DPB16501 DPA10401-DPB10101 DPA10401-DPB10201 DPA10401-DPB10202 DPA10401-DPB10501 DPA10401-DPB11401 DQA10102-DQB10501 DQA10102-DQB10503 DQA10102-DQB10604 DQA10102-DQB10609 DQA10103-DQB10501 DQA10103-DQB10609
PHPAGLKKKKSVTVLDVGDAYFSVP

SEQ ID NO: 4927 - protein, 14 aa, Human immunodeficiency virus 1
  source 1..14: note = HLAs: DPA10301-DPB10201
PIPVGEIYKRWIIL

SEQ ID NO: 4928 - protein, 15 aa, Human immunodeficiency virus 1
  source 1..15: note = HLAs: DRB1_0806 DRB1_1102 DRB1_1103 DRB1_1104 DRB1_1301 DRB1_1304 DRB1_1406 DRB1_1501 DPA10103-DPB10201 DPA10103-DPB10202 DPA10103-DPB11501 DPA10103-DPB14801 DPA10104-DPB11501 DPA10301-DPB10201 DPA10301-DPB10202 DPA10301-DPB14001 DPA10401-DPB10201 DPA10401-DPB10202
PIPVGEIYKRWIILG

SEQ ID NO: 4929 - protein, 16 aa, Human immunodeficiency virus 1
  source 1..16: note = HLAs: DRB1_1304 DPA10103-DPB10201 DPA10103-DPB10202 DPA10103-DPB11501 DPA10103-DPB11601 DPA10103-DPB11901 DPA10103-DPB14801 DPA10104-DPB11501 DPA10202-DPB110601 DPA10202-DPB11901 DPA10301-DPB10101 DPA10301-DPB10201 DPA10301-DPB10202 DPA10301-DPB10401 DPA10301-DPB110601 DPA10301-DPB11801 DPA10301-DPB12301 DPA10301-DPB13901 DPA10301-DPB14001 DPA10401-DPB10201 DPA10401-DPB10202 DQA10102-DQB10501
PIPVGEIYKRWIILGL

SEQ ID NO: 4930 - protein, 17 aa, Human immunodeficiency virus 1
  source 1..17: note = HLAs: DRB1_0806 DRB1_1001 DRB1_1103 DRB1_1104 DRB1_1304 DRB1_1501 DPA10103-DPB10101 DPA10103-DPB10201 DPA10103-DPB10202 DPA10103-DPB10501 DPA10103-DPB11501 DPA10103-DPB11601 DPA10103-DPB11901 DPA10103-DPB13101 DPA10103-DPB13401 DPA10103-DPB14001 DPA10103-DPB14101 DPA10103-DPB14801 DPA10103-DPB15001 DPA10104-DPB10101 DPA10104-DPB11501 DPA10105-DPB10101 DPA10105-DPB15001 DPA10201-DPB110601 DPA10201-DPB11501 DPA10201-DPB11601 DPA10201-DPB11901 DPA10202-DPB10101 DPA10202-DPB10202 DPA10202-DPB10501 DPA10202-DPB110601 DPA10202-DPB11901 DPA10202-DPB13101 DPA10202-DPB13801 DPA10202-DPB16501 DPA10301-DPB10101 DPA10301-DPB10201 DPA10301-DPB10202 DPA10301-DPB10401 DPA10301-DPB10402 DPA10301-DPB110501 DPA10301-DPB110601 DPA10301-DPB11801 DPA10301-DPB12301 DPA10301-DPB13901 DPA10301-DPB14001 DPA10301-DPB14901 DPA10301-DPB16501 DPA10301-DPB18001 DPA10401-DPB10101 DPA10401-DPB10201 DPA10401-DPB10202 DPA10401-DPB10501 DQA10102-DQB10501
PIPVGEIYKRWIILGLN

SEQ ID NO: 4931 - protein, 18 aa, Human immunodeficiency virus 1
  source 1..18: note = HLAs: DRB1_1001 DPA10103-DPB10101 DPA10103-DPB10201 DPA10103-DPB10202 DPA10103-DPB10501 DPA10103-DPB11501 DPA10103-DPB11601 DPA10103-DPB11901 DPA10103-DPB13101 DPA10103-DPB14801 DPA10103-DPB15001 DPA10104-DPB10101 DPA10104-DPB11501 DPA10105-DPB10101 DPA10105-DPB15001 DPA10201-DPB110601 DPA10201-DPB11501 DPA10201-DPB11901 DPA10202-DPB10101 DPA10202-DPB110601 DPA10202-DPB11901 DPA10301-DPB10101 DPA10301-DPB10201 DPA10301-DPB10202 DPA10301-DPB10401 DPA10301-DPB110601 DPA10301-DPB11801 DPA10301-DPB12301 DPA10301-DPB13901 DPA10301-DPB14001 DPA10301-DPB16501 DPA10401-DPB10101 DPA10401-DPB10201 DPA10401-DPB10202 DPA10401-DPB10301 DPA10401-DPB10501 DQA10102-DQB10501
PIPVGEIYKRWIILGLNK

SEQ ID NO: 4932 - protein, 19 aa, Human immunodeficiency virus 1
  source 1..19: note = HLAs: DRB1_0101 DRB1_0405 DRB1_0801 DRB1_0806 DRB1_1001 DRB1_1104 DRB1_1304 DRB1_1406 DRB1_1501 DRB1_1502 DRB1_1601 DRB1_1602 DPA10103-DPB10101 DPA10103-DPB10201 DPA10103-DPB10202 DPA10103-DPB10301 DPA10103-DPB10401 DPA10103-DPB10501 DPA10103-DPB10601 DPA10103-DPB11101 DPA10103-DPB112401 DPA10103-DPB112601 DPA10103-DPB11301 DPA10103-DPB113101 DPA10103-DPB113301 DPA10103-DPB11401 DPA10103-DPB11501 DPA10103-DPB11601 DPA10103-DPB11701 DPA10103-DPB11801 DPA10103-DPB11901 DPA10103-DPB12001 DPA10103-DPB12101 DPA10103-DPB12301 DPA10103-DPB12901 DPA10103-DPB13001 DPA10103-DPB13101 DPA10103-DPB13401 DPA10103-DPB13901 DPA10103-DPB14001 DPA10103-DPB14101 DPA10103-DPB14801 DPA10103-DPB15001 DPA10103-DPB15501 DPA10104-DPB10101 DPA10104-DPB10301 DPA10104-DPB11301 DPA10104-DPB11501 DPA10105-DPB10101 DPA10105-DPB10301 DPA10105-DPB10401 DPA10105-DPB11801 DPA10105-DPB15001 DPA10106-DPB10101 DPA10106-DPB11101 DPA10201-DPB10101 DPA10201-DPB10202 DPA10201-DPB10501 DPA10201-DPB110601 DPA10201-DPB11101; note = HLAs: DPA10201-DPB11501 DPA10201-DPB11601 DPA10201-DPB11901 DPA10202-DPB10101 DPA10202-DPB10201 DPA10202-DPB10202 DPA10202-DPB10401 DPA10202-DPB10501 DPA10202-DPB110601 DPA10202-DPB11101 DPA10202-DPB11901 DPA10202-DPB13101 DPA10202-DPB13801 DPA10202-DPB15501 DPA10202-DPB16501 DPA10301-DPB10101 DPA10301-DPB10201 DPA10301-DPB10202 DPA10301-DPB10301 DPA10301-DPB10401 DPA10301-DPB10402 DPA10301-DPB10901 DPA10301-DPB110501 DPA10301-DPB110601 DPA10301-DPB11101 DPA10301-DPB11301 DPA10301-DPB11701 DPA10301-DPB11801 DPA10301-DPB12301 DPA10301-DPB13901 DPA10301-DPB14001 DPA10301-DPB14901 DPA10301-DPB15501 DPA10301-DPB16501 DPA10301-DPB17501 DPA10301-DPB18001 DPA10401-DPB10101 DPA10401-DPB10201 DPA10401-DPB10202 DPA10401-DPB10301 DPA10401-DPB10402 DPA10401-DPB10501 DPA10401-DPB110501 DPA10401-DPB11301 DPA10401-DPB113301 DPA10401-DPB11401 DPA10401-DPB14901 DQA10102-DQB10501 DQA10103-DQB10501
PIPVGEIYKRWIILGLNKI

SEQ ID NO: 4933 - protein, 20 aa, Human immunodeficiency virus 1
  source 1..20: note = HLAs: DRB1_0101 DRB1_0102 DRB1_0404 DRB1_0405 DRB1_0408 DRB1_0410 DRB1_0701 DRB1_0801 DRB1_0802 DRB1_0803 DRB1_0804 DRB1_0806 DRB1_0809 DRB1_0813 DRB1_0901 DRB1_1001 DRB1_1101 DRB1_1102 DRB1_1103 DRB1_1104 DRB1_1114 DRB1_1201 DRB1_1301 DRB1_1302 DRB1_1304 DRB1_1305 DRB1_1312 DRB1_1401 DRB1_1402 DRB1_1404 DRB1_1406 DRB1_1454 DRB1_1501 DRB1_1502 DRB1_1503 DRB1_1601 DRB1_1602 DPA10103-DPB10101 DPA10103-DPB10201 DPA10103-DPB10202 DPA10103-DPB10301 DPA10103-DPB10401 DPA10103-DPB10402 DPA10103-DPB10501 DPA10103-DPB10601 DPA10103-DPB10901 DPA10103-DPB11001 DPA10103-DPB110501 DPA10103-DPB11101 DPA10103-DPB112401 DPA10103-DPB112601 DPA10103-DPB11301 DPA10103-DPB113101 DPA10103-DPB113301 DPA10103-DPB11401 DPA10103-DPB11501 DPA10103-DPB11601 DPA10103-DPB11701 DPA10103-DPB11801 DPA10103-DPB11901 DPA10103-DPB12001 DPA10103-DPB12101 DPA10103-DPB12301 DPA10103-DPB12901 DPA10103-DPB13001 DPA10103-DPB13101 DPA10103-DPB13401 DPA10103-DPB13901 DPA10103-DPB14001 DPA10103-DPB14101 DPA10103-DPB14801; note = HLAs: DPA10103-DPB14901 DPA10103-DPB15001 DPA10103-DPB15101 DPA10103-DPB15501 DPA10103-DPB15901 DPA10103-DPB18001 DPA10104-DPB10101 DPA10104-DPB10301 DPA10104-DPB11001 DPA10104-DPB11301 DPA10104-DPB11501 DPA10105-DPB10101 DPA10105-DPB10301 DPA10105-DPB10401 DPA10105-DPB11801 DPA10105-DPB15001 DPA10106-DPB10101 DPA10106-DPB11101 DPA10201-DPB10101 DPA10201-DPB10201 DPA10201-DPB10202 DPA10201-DPB10501 DPA10201-DPB10601 DPA10201-DPB110601 DPA10201-DPB11101 DPA10201-DPB11301 DPA10201-DPB113101 DPA10201-DPB113301 DPA10201-DPB11501 DPA10201-DPB11601 DPA10201-DPB11701 DPA10201-DPB11901 DPA10201-DPB13001 DPA10201-DPB15501 DPA10201-DPB19101 DPA10202-DPB10101 DPA10202-DPB10201 DPA10202-DPB10202 DPA10202-DPB10401 DPA10202-DPB10501 DPA10202-DPB10901 DPA10202-DPB110601 DPA10202-DPB11101 DPA10202-DPB11301 DPA10202-DPB113101 DPA10202-DPB11701 DPA10202-DPB11801 DPA10202-DPB11901 DPA10202-DPB12101 DPA10202-DPB12901 DPA10202-DPB13001 DPA10202-DPB13101 DPA10202-DPB13801 DPA10202-DPB15501; note = HLAs: DPA10202-DPB16501 DPA10202-DPB18501 DPA10301-DPB10101 DPA10301-DPB10201 DPA10301-DPB10202 DPA10301-DPB10301 DPA10301-DPB10401 DPA10301-DPB10402 DPA10301-DPB10901 DPA10301-DPB110501 DPA10301-DPB110601 DPA10301-DPB11101 DPA10301-DPB11301 DPA10301-DPB11701 DPA10301-DPB11801 DPA10301-DPB12301 DPA10301-DPB13901 DPA10301-DPB14001 DPA10301-DPB14901 DPA10301-DPB15501 DPA10301-DPB16501 DPA10301-DPB17501 DPA10301-DPB18001 DPA10401-DPB10101 DPA10401-DPB10201 DPA10401-DPB10202 DPA10401-DPB10301 DPA10401-DPB10402 DPA10401-DPB10501 DPA10401-DPB110501 DPA10401-DPB11301 DPA10401-DPB113301 DPA10401-DPB11401 DPA10401-DPB14901 DQA10102-DQB10501 DQA10102-DQB10503 DQA10103-DQB10501
PIPVGEIYKRWIILGLNKIV

SEQ ID NO: 4934 - protein, 21 aa, Human immunodeficiency virus 1
  source 1..21: note = HLAs: DRB1_0101 DRB1_0102 DRB1_0404 DRB1_0405 DRB1_0408 DRB1_0410 DRB1_0701 DRB1_0801 DRB1_0802 DRB1_0804 DRB1_0806 DRB1_0809 DRB1_0813 DRB1_0901 DRB1_1001 DRB1_1101 DRB1_1102 DRB1_1103 DRB1_1104 DRB1_1114 DRB1_1201 DRB1_1301 DRB1_1302 DRB1_1304 DRB1_1305 DRB1_1312 DRB1_1401 DRB1_1402 DRB1_1403 DRB1_1404 DRB1_1405 DRB1_1406 DRB1_1454 DRB1_1501 DRB1_1502 DRB1_1503 DRB1_1601 DRB1_1602 DPA10103-DPB10101 DPA10103-DPB10201 DPA10103-DPB10202 DPA10103-DPB10301 DPA10103-DPB10501 DPA10103-DPB10601 DPA10103-DPB11101 DPA10103-DPB112401 DPA10103-DPB113101 DPA10103-DPB11501 DPA10103-DPB11601 DPA10103-DPB11701 DPA10103-DPB11801 DPA10103-DPB11901 DPA10103-DPB12001 DPA10103-DPB12101 DPA10103-DPB13001 DPA10103-DPB13101 DPA10103-DPB13401 DPA10103-DPB14001 DPA10103-DPB14101 DPA10103-DPB14801 DPA10103-DPB15001 DPA10103-DPB15501 DPA10104-DPB10101 DPA10104-DPB10301 DPA10104-DPB11501 DPA10105-DPB10101 DPA10105-DPB10301 DPA10105-DPB11801 DPA10105-DPB15001 DPA10106-DPB10101 DPA10201-DPB10101 DPA10201-DPB10501; note = HLAs: DPA10201-DPB110601 DPA10201-DPB11501 DPA10201-DPB11601 DPA10201-DPB11901 DPA10202-DPB10101 DPA10202-DPB10201 DPA10202-DPB10202 DPA10202-DPB10501 DPA10202-DPB110601 DPA10202-DPB11801 DPA10202-DPB11901 DPA10202-DPB13101 DPA10202-DPB13801 DPA10202-DPB15501 DPA10202-DPB16501 DPA10301-DPB10101 DPA10301-DPB10201 DPA10301-DPB10202 DPA10301-DPB10401 DPA10301-DPB10402 DPA10301-DPB110501 DPA10301-DPB110601 DPA10301-DPB11101 DPA10301-DPB11301 DPA10301-DPB11701 DPA10301-DPB11801 DPA10301-DPB12301 DPA10301-DPB13901 DPA10301-DPB14001 DPA10301-DPB14901 DPA10301-DPB15501 DPA10301-DPB16501 DPA10301-DPB17501 DPA10301-DPB18001 DPA10401-DPB10101 DPA10401-DPB10201 DPA10401-DPB10202 DPA10401-DPB10301 DPA10401-DPB10402 DPA10401-DPB10501 DPA10401-DPB110501 DPA10401-DPB11301 DPA10401-DPB113301 DPA10401-DPB11401 DPA10401-DPB14901 DQA10102-DQB10501 DQA10103-DQB10501
PIPVGEIYKRWIILGLNKIVR

SEQ ID NO: 4935 - protein, 22 aa, Human immunodeficiency virus 1
  source 1..22: note = HLAs: DRB1_0101 DRB1_0102 DRB1_0404 DRB1_0405 DRB1_0408 DRB1_0410 DRB1_0701 DRB1_0801 DRB1_0802 DRB1_0803 DRB1_0804 DRB1_0806 DRB1_0809 DRB1_0813 DRB1_0901 DRB1_1001 DRB1_1101 DRB1_1102 DRB1_1103 DRB1_1104 DRB1_1114 DRB1_1201 DRB1_1202 DRB1_1301 DRB1_1302 DRB1_1303 DRB1_1304 DRB1_1305 DRB1_1312 DRB1_1401 DRB1_1402 DRB1_1403 DRB1_1404 DRB1_1405 DRB1_1406 DRB1_1407 DRB1_1418 DRB1_1454 DRB1_1501 DRB1_1502 DRB1_1503 DRB1_1601 DRB1_1602 DPA10103-DPB10101 DPA10103-DPB10201 DPA10103-DPB10202 DPA10103-DPB10301 DPA10103-DPB10501 DPA10103-DPB10601 DPA10103-DPB11101 DPA10103-DPB112401 DPA10103-DPB11301 DPA10103-DPB113101 DPA10103-DPB113301 DPA10103-DPB11401 DPA10103-DPB11501 DPA10103-DPB11601 DPA10103-DPB11701 DPA10103-DPB11801 DPA10103-DPB11901 DPA10103-DPB12001 DPA10103-DPB12101 DPA10103-DPB13001 DPA10103-DPB13101 DPA10103-DPB13401 DPA10103-DPB14001 DPA10103-DPB14101 DPA10103-DPB14801 DPA10103-DPB15001 DPA10103-DPB15501 DPA10104-DPB10101 DPA10104-DPB10301 DPA10104-DPB11301 DPA10104-DPB11501; note = HLAs: DPA10105-DPB10101 DPA10105-DPB10301 DPA10105-DPB11801 DPA10105-DPB15001 DPA10106-DPB10101 DPA10201-DPB10101 DPA10201-DPB10202 DPA10201-DPB10501 DPA10201-DPB110601 DPA10201-DPB11501 DPA10201-DPB11601 DPA10201-DPB11901 DPA10202-DPB10101 DPA10202-DPB10201 DPA10202-DPB10202 DPA10202-DPB10501 DPA10202-DPB110601 DPA10202-DPB11101 DPA10202-DPB11301 DPA10202-DPB11801 DPA10202-DPB11901 DPA10202-DPB12101 DPA10202-DPB13001 DPA10202-DPB13101 DPA10202-DPB13801 DPA10202-DPB15501 DPA10202-DPB16501 DPA10301-DPB10101 DPA10301-DPB10201 DPA10301-DPB10202 DPA10301-DPB10401 DPA10301-DPB10402 DPA10301-DPB10901 DPA10301-DPB110501 DPA10301-DPB110601 DPA10301-DPB11101 DPA10301-DPB11301 DPA10301-DPB11701 DPA10301-DPB11801 DPA10301-DPB12301 DPA10301-DPB13901 DPA10301-DPB14001 DPA10301-DPB14901 DPA10301-DPB15501 DPA10301-DPB16501 DPA10301-DPB17501 DPA10301-DPB18001 DPA10401-DPB10101 DPA10401-DPB10201 DPA10401-DPB10202 DPA10401-DPB10301 DPA10401-DPB10402 DPA10401-DPB10501 DPA10401-DPB110501; note = HLAs: DPA10401-DPB11301 DPA10401-DPB113301 DPA10401-DPB11401 DPA10401-DPB14901 DQA10102-DQB10501 DQA10102-DQB10503 DQA10103-DQB10501 DQA10103-DQB10609
PIPVGEIYKRWIILGLNKIVRM

SEQ ID NO: 4936 - protein, 23 aa, Human immunodeficiency virus 1
  source 1..23: note = HLAs: DRB1_0101 DRB1_0102 DRB1_0401 DRB1_0404 DRB1_0405 DRB1_0408 DRB1_0410 DRB1_0701 DRB1_0801 DRB1_0802 DRB1_0803 DRB1_0804 DRB1_0806 DRB1_0809 DRB1_0813 DRB1_0901 DRB1_1001 DRB1_1101 DRB1_1102 DRB1_1103 DRB1_1104 DRB1_1114 DRB1_1201 DRB1_1202 DRB1_1301 DRB1_1302 DRB1_1303 DRB1_1304 DRB1_1305 DRB1_1312 DRB1_1401 DRB1_1402 DRB1_1403 DRB1_1404 DRB1_1405 DRB1_1406 DRB1_1407 DRB1_1418 DRB1_1454 DRB1_1501 DRB1_1502 DRB1_1503 DRB1_1601 DRB1_1602 DPA10103-DPB10101 DPA10103-DPB10201 DPA10103-DPB10202 DPA10103-DPB10301 DPA10103-DPB10501 DPA10103-DPB10601 DPA10103-DPB11101 DPA10103-DPB112401 DPA10103-DPB11301 DPA10103-DPB113101 DPA10103-DPB113301 DPA10103-DPB11401 DPA10103-DPB11501 DPA10103-DPB11601 DPA10103-DPB11701 DPA10103-DPB11801 DPA10103-DPB11901 DPA10103-DPB12001 DPA10103-DPB12101 DPA10103-DPB13001 DPA10103-DPB13101 DPA10103-DPB13401 DPA10103-DPB14001 DPA10103-DPB14101 DPA10103-DPB14801 DPA10103-DPB15001 DPA10103-DPB15501 DPA10104-DPB10101 DPA10104-DPB10301 DPA10104-DPB11301; note = HLAs: DPA10104-DPB11501 DPA10105-DPB10101 DPA10105-DPB10301 DPA10105-DPB11801 DPA10105-DPB15001 DPA10106-DPB10101 DPA10201-DPB10101 DPA10201-DPB10202 DPA10201-DPB10501 DPA10201-DPB110601 DPA10201-DPB11501 DPA10201-DPB11601 DPA10201-DPB11901 DPA10201-DPB15501 DPA10202-DPB10101 DPA10202-DPB10201 DPA10202-DPB10202 DPA10202-DPB10401 DPA10202-DPB10501 DPA10202-DPB110601 DPA10202-DPB11101 DPA10202-DPB11301 DPA10202-DPB11801 DPA10202-DPB11901 DPA10202-DPB12101 DPA10202-DPB13001 DPA10202-DPB13101 DPA10202-DPB13801 DPA10202-DPB15501 DPA10202-DPB16501 DPA10301-DPB10101 DPA10301-DPB10201 DPA10301-DPB10202 DPA10301-DPB10401 DPA10301-DPB10402 DPA10301-DPB10901 DPA10301-DPB110501 DPA10301-DPB110601 DPA10301-DPB11101 DPA10301-DPB11301 DPA10301-DPB11701 DPA10301-DPB11801 DPA10301-DPB12301 DPA10301-DPB13901 DPA10301-DPB14001 DPA10301-DPB14901 DPA10301-DPB15501 DPA10301-DPB16501 DPA10301-DPB17501 DPA10301-DPB18001 DPA10401-DPB10101 DPA10401-DPB10201 DPA10401-DPB10202 DPA10401-DPB10301 DPA10401-DPB10402; note = HLAs: DPA10401-DPB10501 DPA10401-DPB110501 DPA10401-DPB11301 DPA10401-DPB113301 DPA10401-DPB11401 DPA10401-DPB14901 DQA10102-DQB10501 DQA10102-DQB10503 DQA10103-DQB10501 DQA10103-DQB10609
PIPVGEIYKRWIILGLNKIVRMY

SEQ ID NO: 4937 - protein, 24 aa, Human immunodeficiency virus 1
  source 1..24: note = HLAs: DRB1_0101 DRB1_0102 DRB1_0301 DRB1_0401 DRB1_0404 DRB1_0405 DRB1_0408 DRB1_0410 DRB1_0701 DRB1_0801 DRB1_0802 DRB1_0803 DRB1_0804 DRB1_0806 DRB1_0809 DRB1_0813 DRB1_0901 DRB1_1001 DRB1_1101 DRB1_1102 DRB1_1103 DRB1_1104 DRB1_1114 DRB1_1201 DRB1_1202 DRB1_1301 DRB1_1302 DRB1_1303 DRB1_1304 DRB1_1305 DRB1_1312 DRB1_1401 DRB1_1402 DRB1_1403 DRB1_1404 DRB1_1405 DRB1_1406 DRB1_1407 DRB1_1418 DRB1_1454 DRB1_1501 DRB1_1502 DRB1_1503 DRB1_1601 DRB1_1602 DPA10103-DPB10101 DPA10103-DPB10201 DPA10103-DPB10202 DPA10103-DPB10301 DPA10103-DPB10401 DPA10103-DPB10501 DPA10103-DPB10601 DPA10103-DPB11101 DPA10103-DPB112401 DPA10103-DPB112601 DPA10103-DPB11301 DPA10103-DPB113101 DPA10103-DPB113301 DPA10103-DPB11401 DPA10103-DPB11501 DPA10103-DPB11601 DPA10103-DPB11701 DPA10103-DPB11801 DPA10103-DPB11901 DPA10103-DPB12001 DPA10103-DPB12101 DPA10103-DPB12301 DPA10103-DPB12901 DPA10103-DPB13001 DPA10103-DPB13101 DPA10103-DPB13401 DPA10103-DPB13901 DPA10103-DPB14001 DPA10103-DPB14101 DPA10103-DPB14801; note = HLAs: DPA10103-DPB15001 DPA10103-DPB15501 DPA10104-DPB10101 DPA10104-DPB10301 DPA10104-DPB11301 DPA10104-DPB11501 DPA10105-DPB10101 DPA10105-DPB10301 DPA10105-DPB10401 DPA10105-DPB11801 DPA10105-DPB15001 DPA10106-DPB10101 DPA10201-DPB10101 DPA10201-DPB10202 DPA10201-DPB10501 DPA10201-DPB110601 DPA10201-DPB11501 DPA10201-DPB11601 DPA10201-DPB11901 DPA10201-DPB15501 DPA10202-DPB10101 DPA10202-DPB10201 DPA10202-DPB10202 DPA10202-DPB10401 DPA10202-DPB10501 DPA10202-DPB110601 DPA10202-DPB11101 DPA10202-DPB11301 DPA10202-DPB113101 DPA10202-DPB11701 DPA10202-DPB11801 DPA10202-DPB11901 DPA10202-DPB12101 DPA10202-DPB13001 DPA10202-DPB13101 DPA10202-DPB13801 DPA10202-DPB15501 DPA10202-DPB16501 DPA10301-DPB10101 DPA10301-DPB10201 DPA10301-DPB10202 DPA10301-DPB10401 DPA10301-DPB10402 DPA10301-DPB10901 DPA10301-DPB110501 DPA10301-DPB110601 DPA10301-DPB11101 DPA10301-DPB11301 DPA10301-DPB11701 DPA10301-DPB11801 DPA10301-DPB12301 DPA10301-DPB13901 DPA10301-DPB14001 DPA10301-DPB14901; note = HLAs: DPA10301-DPB15501 DPA10301-DPB16501 DPA10301-DPB17501 DPA10301-DPB18001 DPA10401-DPB10101 DPA10401-DPB10201 DPA10401-DPB10202 DPA10401-DPB10301 DPA10401-DPB10402 DPA10401-DPB10501 DPA10401-DPB110501 DPA10401-DPB11301 DPA10401-DPB113301 DPA10401-DPB11401 DPA10401-DPB14901 DQA10102-DQB10501 DQA10102-DQB10503 DQA10103-DQB10501 DQA10103-DQB10609
PIPVGEIYKRWIILGLNKIVRMYS

SEQ ID NO: 4938 - protein, 25 aa, Human immunodeficiency virus 1
  source 1..25: note = HLAs: DRB1_0101 DRB1_0102 DRB1_0301 DRB1_0401 DRB1_0404 DRB1_0405 DRB1_0408 DRB1_0410 DRB1_0701 DRB1_0801 DRB1_0802 DRB1_0803 DRB1_0804 DRB1_0806 DRB1_0809 DRB1_0813 DRB1_0901 DRB1_1001 DRB1_1101 DRB1_1102 DRB1_1103 DRB1_1104 DRB1_1114 DRB1_1201 DRB1_1202 DRB1_1301 DRB1_1302 DRB1_1303 DRB1_1304 DRB1_1305 DRB1_1312 DRB1_1401 DRB1_1402 DRB1_1403 DRB1_1404 DRB1_1405 DRB1_1406 DRB1_1407 DRB1_1418 DRB1_1454 DRB1_1501 DRB1_1502 DRB1_1503 DRB1_1601 DRB1_1602 DPA10103-DPB10101 DPA10103-DPB10201 DPA10103-DPB10202 DPA10103-DPB10301 DPA10103-DPB10401 DPA10103-DPB10501 DPA10103-DPB10601 DPA10103-DPB11101 DPA10103-DPB112401 DPA10103-DPB112601 DPA10103-DPB11301 DPA10103-DPB113101 DPA10103-DPB113301 DPA10103-DPB11401 DPA10103-DPB11501 DPA10103-DPB11601 DPA10103-DPB11701 DPA10103-DPB11801 DPA10103-DPB11901 DPA10103-DPB12001 DPA10103-DPB12101 DPA10103-DPB12301 DPA10103-DPB12901 DPA10103-DPB13001 DPA10103-DPB13101 DPA10103-DPB13401 DPA10103-DPB13901 DPA10103-DPB14001 DPA10103-DPB14101 DPA10103-DPB14801; note = HLAs: DPA10103-DPB15001 DPA10103-DPB15501 DPA10103-DPB15901 DPA10104-DPB10101 DPA10104-DPB10301 DPA10104-DPB11301 DPA10104-DPB11501 DPA10105-DPB10101 DPA10105-DPB10301 DPA10105-DPB10401 DPA10105-DPB11801 DPA10105-DPB15001 DPA10106-DPB10101 DPA10201-DPB10101 DPA10201-DPB10202 DPA10201-DPB10501 DPA10201-DPB110601 DPA10201-DPB11501 DPA10201-DPB11601 DPA10201-DPB11801 DPA10201-DPB11901 DPA10201-DPB15501 DPA10202-DPB10101 DPA10202-DPB10201 DPA10202-DPB10202 DPA10202-DPB10401 DPA10202-DPB10501 DPA10202-DPB110601 DPA10202-DPB11101 DPA10202-DPB11301 DPA10202-DPB113101 DPA10202-DPB11701 DPA10202-DPB11801 DPA10202-DPB11901 DPA10202-DPB12101 DPA10202-DPB13001 DPA10202-DPB13101 DPA10202-DPB13801 DPA10202-DPB15501 DPA10202-DPB16501 DPA10202-DPB18501 DPA10301-DPB10101 DPA10301-DPB10201 DPA10301-DPB10202 DPA10301-DPB10401 DPA10301-DPB10402 DPA10301-DPB10901 DPA10301-DPB110501 DPA10301-DPB110601 DPA10301-DPB11101 DPA10301-DPB11301 DPA10301-DPB11701 DPA10301-DPB11801 DPA10301-DPB12301; note = HLAs: DPA10301-DPB13901 DPA10301-DPB14001 DPA10301-DPB14901 DPA10301-DPB15501 DPA10301-DPB16501 DPA10301-DPB17501 DPA10301-DPB18001 DPA10401-DPB10101 DPA10401-DPB10201 DPA10401-DPB10202 DPA10401-DPB10301 DPA10401-DPB10402 DPA10401-DPB10501 DPA10401-DPB110501 DPA10401-DPB11301 DPA10401-DPB113301 DPA10401-DPB11401 DPA10401-DPB14901 DQA10102-DQB10501 DQA10102-DQB10503 DQA10102-DQB10609 DQA10103-DQB10501 DQA10103-DQB10503 DQA10103-DQB10601 DQA10103-DQB10602 DQA10103-DQB10608 DQA10103-DQB10609
PIPVGEIYKRWIILGLNKIVRMYSP

SEQ ID NO: 4939 - protein, 14 aa, Human immunodeficiency virus 1
  source 1..14: note = HLAs: DRB1_0101 DRB1_0102 DRB1_0404 DRB1_0701 DRB1_0813 DRB1_1001 DRB1_1114 DRB1_1302 DRB1_1406 DQA10102-DQB10501
PISPIETVPVKLKP

SEQ ID NO: 4940 - protein, 15 aa, Human immunodeficiency virus 1
  source 1..15: note = HLAs: DRB1_0101 DRB1_0102 DRB1_0401 DRB1_0404 DRB1_0405 DRB1_0408 DRB1_0410 DRB1_0701 DRB1_0802 DRB1_0804 DRB1_0806 DRB1_0809 DRB1_0813 DRB1_0901 DRB1_1001 DRB1_1102 DRB1_1103 DRB1_1104 DRB1_1114 DRB1_1201 DRB1_1301 DRB1_1302 DRB1_1304 DRB1_1401 DRB1_1402 DRB1_1404 DRB1_1406 DRB1_1454 DRB1_1501 DRB1_1602 DQA10102-DQB10501 DQA10103-DQB10601 DQA10103-DQB10609 DQA10201-DQB10301 DQA10505-DQB10402
PISPIETVPVKLKPG

SEQ ID NO: 4941 - protein, 16 aa, Human immunodeficiency virus 1
  source 1..16: note = HLAs: DRB1_0101 DRB1_0404 DRB1_0701 DRB1_0813 DRB1_0901 DRB1_1001 DRB1_1114 DRB1_1302 DRB1_1406 DQA10102-DQB10501 DQA10103-DQB10601 DQA10103-DQB10609
PISPIETVPVKLKPGM

SEQ ID NO: 4942 - protein, 17 aa, Human immunodeficiency virus 1
  source 1..17: note = HLAs: DRB1_0101 DRB1_0404 DRB1_0701 DRB1_0813 DRB1_0901 DRB1_1001 DRB1_1102 DRB1_1114 DRB1_1301 DRB1_1302 DRB1_1304 DRB1_1406 DQA10102-DQB10501 DQA10103-DQB10601
PISPIETVPVKLKPGMD

SEQ ID NO: 4943 - protein, 19 aa, Human immunodeficiency virus 1
  source 1..19: note = HLAs: DRB1_0101 DRB1_1406 DQA10102-DQB10501
PISPIETVPVKLKPGMDGP

SEQ ID NO: 4944 - protein, 20 aa, Human immunodeficiency virus 1
  source 1..20: note = HLAs: DRB1_0101 DRB1_0701 DRB1_0806 DRB1_0813 DRB1_1001 DRB1_1102 DRB1_1103 DRB1_1114 DRB1_1301 DRB1_1302 DRB1_1304 DRB1_1406 DPA10202-DPB10101 DPA10301-DPB11801 DQA10102-DQB10501 DQA10103-DQB10601 DQA10103-DQB10609
PISPIETVPVKLKPGMDGPK

SEQ ID NO: 4945 - protein, 21 aa, Human immunodeficiency virus 1
  source 1..21: note = HLAs: DRB1_0101 DRB1_0701 DRB1_1304 DRB1_1406 DQA10102-DQB10501
PISPIETVPVKLKPGMDGPKV

SEQ ID NO: 4946 - protein, 22 aa, Human immunodeficiency virus 1
  source 1..22: note = HLAs: DRB1_0101 DRB1_0701 DRB1_1103 DRB1_1304 DRB1_1406 DQA10102-DQB10501
PISPIETVPVKLKPGMDGPKVK

SEQ ID NO: 4947 - protein, 23 aa, Human immunodeficiency virus 1
  source 1..23: note = HLAs: DRB1_0101 DRB1_0701 DRB1_1103 DRB1_1304 DRB1_1406 DQA10102-DQB10501
PISPIETVPVKLKPGMDGPKVKQ

SEQ ID NO: 4948 - protein, 24 aa, Human immunodeficiency virus 1
  source 1..24: note = HLAs: DRB1_0101 DRB1_0701 DRB1_1001 DRB1_1103 DRB1_1304 DRB1_1406 DQA10102-DQB10501
PISPIETVPVKLKPGMDGPKVKQW

SEQ ID NO: 4949 - protein, 25 aa, Human immunodeficiency virus 1
  source 1..25: note = HLAs: DRB1_0101 DRB1_0701 DRB1_1001 DRB1_1103 DRB1_1304 DRB1_1406 DQA10102-DQB10501
PISPIETVPVKLKPGMDGPKVKQWP

SEQ ID NO: 4950 - protein, 13 aa, Human immunodeficiency virus 1
  source 1..13: note = HLAs: DQA10101-DQB10501 DQA10102-DQB10501 DQA10102-DQB10502 DQA10104-DQB10501 DQA10105-DQB10501
PKEPFRDYVDRFF

SEQ ID NO: 4951 - protein, 14 aa, Human immunodeficiency virus 1
  source 1..14: note = HLAs: DRB1_1501 DRB1_1503 DQA10101-DQB10501 DQA10101-DQB10503 DQA10102-DQB10501 DQA10102-DQB10502 DQA10102-DQB10503 DQA10103-DQB10501 DQA10104-DQB10501 DQA10104-DQB10503 DQA10105-DQB10501 DQA10107-DQB10503
PKEPFRDYVDRFFK

SEQ ID NO: 4952 - protein, 13 aa, Human immunodeficiency virus 1
  source 1..13: note = HLAs: DQA10201-DQB10301 DQA10501-DQB10301 DQA10501-DQB10319 DQA10503-DQB10301 DQA10505-DQB10301 DQA10505-DQB10309 DQA10505-DQB10319 DQA10508-DQB10301 DQA10509-DQB10301
PKMIGGIGGFIKV

SEQ ID NO: 4953 - protein, 14 aa, Human immunodeficiency virus 1
  source 1..14: note = HLAs: DRB1_0101 DRB1_0901 DQA10201-DQB10301 DQA10501-DQB10301 DQA10501-DQB10319 DQA10503-DQB10301 DQA10505-DQB10301 DQA10505-DQB10309 DQA10505-DQB10319 DQA10508-DQB10301 DQA10509-DQB10301
PKMIGGIGGFIKVR

SEQ ID NO: 4954 - protein, 15 aa, Human immunodeficiency virus 1
  source 1..15: note = HLAs: DRB1_0101 DRB1_0102 DRB1_0701 DRB1_0804 DRB1_0806 DRB1_0901 DRB1_1001 DRB1_1101 DRB1_1102 DRB1_1103 DRB1_1104 DRB1_1301 DRB1_1304 DRB1_1305 DRB1_1406 DRB1_1501 DRB1_1503 DRB1_1601 DRB1_1602 DQA10102-DQB10501 DQA10102-DQB10601 DQA10103-DQB10601 DQA10201-DQB10301 DQA10501-DQB10301 DQA10501-DQB10319 DQA10503-DQB10301 DQA10505-DQB10301 DQA10505-DQB10309 DQA10505-DQB10319 DQA10505-DQB10402 DQA10508-DQB10301 DQA10509-DQB10301
PKMIGGIGGFIKVRQ

SEQ ID NO: 4955 - protein, 16 aa, Human immunodeficiency virus 1
  source 1..16: note = HLAs: DRB1_0101 DRB1_0804 DRB1_0806 DRB1_0901 DRB1_1102 DRB1_1103 DRB1_1104 DRB1_1301 DRB1_1304 DRB1_1406 DRB1_1501 DQA10102-DQB10501 DQA10102-DQB10601 DQA10103-DQB10601 DQA10201-DQB10301 DQA10501-DQB10301 DQA10501-DQB10319 DQA10503-DQB10301 DQA10505-DQB10301 DQA10505-DQB10309 DQA10505-DQB10319 DQA10508-DQB10301 DQA10509-DQB10301
PKMIGGIGGFIKVRQY

SEQ ID NO: 4956 - protein, 17 aa, Human immunodeficiency virus 1
  source 1..17: note = HLAs: DRB1_0101 DRB1_0804 DRB1_0806 DRB1_0901 DRB1_1102 DRB1_1103 DRB1_1104 DRB1_1301 DRB1_1304 DRB1_1406 DRB1_1501 DQA10102-DQB10501 DQA10102-DQB10601 DQA10103-DQB10601 DQA10201-DQB10301 DQA10501-DQB10301 DQA10501-DQB10319 DQA10503-DQB10301 DQA10505-DQB10301 DQA10505-DQB10309 DQA10505-DQB10319 DQA10508-DQB10301 DQA10509-DQB10301
PKMIGGIGGFIKVRQYD

SEQ ID NO: 4957 - protein, 18 aa, Human immunodeficiency virus 1
  source 1..18: note = HLAs: DRB1_1104 DQA10201-DQB10301
PKMIGGIGGFIKVRQYDQ

SEQ ID NO: 4958 - protein, 16 aa, Human immunodeficiency virus 1
  source 1..16: note = HLAs: DPA10301-DPB10101
PKVKQWPLTEEKIKAL

SEQ ID NO: 4959 - protein, 13 aa, Human immunodeficiency virus 1
  source 1..13: note = HLAs: DQA10201-DQB10301
PMFSALSEGATPQ

SEQ ID NO: 4960 - protein, 14 aa, Human immunodeficiency virus 1
  source 1..14: note = HLAs: DRB1_0101 DRB1_1001 DQA10102-DQB10601 DQA10201-DQB10301 DQA10201-DQB10303 DQA10501-DQB10301 DQA10501-DQB10319 DQA10503-DQB10301 DQA10505-DQB10301 DQA10505-DQB10309 DQA10505-DQB10319 DQA10506-DQB10303 DQA10508-DQB10301 DQA10509-DQB10301 DQA10601-DQB10301
PMFSALSEGATPQD

SEQ ID NO: 4961 - protein, 15 aa, Human immunodeficiency virus 1
  source 1..15: note = HLAs: DRB1_0101 DRB1_0901 DRB1_1001 DQA10102-DQB10601 DQA10103-DQB10601 DQA10201-DQB10301 DQA10201-DQB10303 DQA10301-DQB10301 DQA10302-DQB10301 DQA10303-DQB10301 DQA10401-DQB10301 DQA10401-DQB10319 DQA10501-DQB10301 DQA10501-DQB10319 DQA10503-DQB10301 DQA10505-DQB10301 DQA10505-DQB10302 DQA10505-DQB10309 DQA10505-DQB10319 DQA10505-DQB10402 DQA10506-DQB10303 DQA10508-DQB10301 DQA10509-DQB10301 DQA10601-DQB10301
PMFSALSEGATPQDL

SEQ ID NO: 4962 - protein, 16 aa, Human immunodeficiency virus 1
  source 1..16: note = HLAs: DRB1_1001 DQA10102-DQB10601 DQA10103-DQB10601 DQA10201-DQB10301 DQA10201-DQB10303 DQA10301-DQB10301 DQA10302-DQB10301 DQA10303-DQB10301 DQA10401-DQB10301 DQA10401-DQB10319 DQA10501-DQB10301 DQA10501-DQB10319 DQA10503-DQB10301 DQA10505-DQB10301 DQA10505-DQB10302 DQA10505-DQB10309 DQA10505-DQB10319 DQA10506-DQB10303 DQA10508-DQB10301 DQA10509-DQB10301 DQA10601-DQB10301
PMFSALSEGATPQDLN

SEQ ID NO: 4963 - protein, 17 aa, Human immunodeficiency virus 1
  source 1..17: note = HLAs: DRB1_0101 DRB1_1001 DQA10102-DQB10601 DQA10103-DQB10601 DQA10201-DQB10301 DQA10201-DQB10303 DQA10301-DQB10301 DQA10302-DQB10301 DQA10303-DQB10301 DQA10401-DQB10301 DQA10401-DQB10319 DQA10501-DQB10301 DQA10501-DQB10319 DQA10503-DQB10301 DQA10505-DQB10301 DQA10505-DQB10309 DQA10505-DQB10319 DQA10506-DQB10303 DQA10508-DQB10301 DQA10509-DQB10301 DQA10601-DQB10301
PMFSALSEGATPQDLNT

SEQ ID NO: 4964 - protein, 18 aa, Human immunodeficiency virus 1
  source 1..18: note = HLAs: DQA10102-DQB10601 DQA10201-DQB10301
PMFSALSEGATPQDLNTM

SEQ ID NO: 4965 - protein, 19 aa, Human immunodeficiency virus 1
  source 1..19: note = HLAs: DRB1_1001 DQA10102-DQB10601 DQA10103-DQB10601 DQA10201-DQB10301 DQA10201-DQB10303
PMFSALSEGATPQDLNTML

SEQ ID NO: 4966 - protein, 20 aa, Human immunodeficiency virus 1
  source 1..20: note = HLAs: DRB1_0101 DRB1_1001 DQA10102-DQB10501 DQA10102-DQB10601 DQA10103-DQB10601 DQA10201-DQB10301 DQA10201-DQB10303 DQA10501-DQB10301 DQA10501-DQB10319 DQA10503-DQB10301 DQA10505-DQB10301 DQA10505-DQB10309 DQA10505-DQB10319 DQA10506-DQB10303 DQA10508-DQB10301 DQA10509-DQB10301 DQA10601-DQB10301
PMFSALSEGATPQDLNTMLN

SEQ ID NO: 4967 - protein, 21 aa, Human immunodeficiency virus 1
  source 1..21: note = HLAs: DQA10102-DQB10601 DQA10201-DQB10301
PMFSALSEGATPQDLNTMLNT

SEQ ID NO: 4968 - protein, 22 aa, Human immunodeficiency virus 1
  source 1..22: note = HLAs: DRB1_1001 DQA10102-DQB10601 DQA10201-DQB10301
PMFSALSEGATPQDLNTMLNTV

SEQ ID NO: 4969 - protein, 23 aa, Human immunodeficiency virus 1
  source 1..23: note = HLAs: DRB1_1001 DQA10102-DQB10501 DQA10102-DQB10601 DQA10201-DQB10301
PMFSALSEGATPQDLNTMLNTVG

SEQ ID NO: 4970 - protein, 24 aa, Human immunodeficiency virus 1
  source 1..24: note = HLAs: DRB1_1001 DQA10102-DQB10501 DQA10102-DQB10601 DQA10201-DQB10301
PMFSALSEGATPQDLNTMLNTVGG

SEQ ID NO: 4971 - protein, 25 aa, Human immunodeficiency virus 1
  source 1..25: note = HLAs: DRB1_0404 DRB1_1001 DQA10102-DQB10501 DQA10102-DQB10601 DQA10201-DQB10301 DQA10201-DQB10303
PMFSALSEGATPQDLNTMLNTVGGH

SEQ ID NO: 4972 - protein, 13 aa, Human immunodeficiency virus 1
  source 1..13: note = HLAs: DPA10103-DPB10101 DPA10103-DPB10201 DPA10103-DPB10202 DPA10103-DPB11501 DPA10103-DPB13101 DPA10103-DPB13401 DPA10103-DPB14801 DPA10104-DPB10101 DPA10104-DPB11501 DPA10105-DPB10101 DPA10106-DPB10101 DPA10201-DPB10101 DPA10201-DPB11501 DPA10202-DPB10101 DPA10301-DPB10101 DPA10301-DPB10201 DPA10301-DPB10202 DPA10301-DPB10401 DPA10301-DPB110601 DPA10301-DPB11801 DPA10301-DPB12301 DPA10301-DPB13901 DPA10301-DPB14001 DPA10301-DPB16501 DPA10401-DPB10101 DPA10401-DPB10201 DPA10401-DPB10202 DQA10101-DQB10501 DQA10102-DQB10501 DQA10102-DQB10502 DQA10104-DQB10501 DQA10105-DQB10501
PPFLWMGYELHPD

SEQ ID NO: 4973 - protein, 14 aa, Human immunodeficiency virus 1
  source 1..14: note = HLAs: DRB1_1001 DPA10103-DPB10101 DPA10103-DPB10201 DPA10103-DPB10202 DPA10103-DPB10401 DPA10103-DPB112601 DPA10103-DPB11501 DPA10103-DPB11601 DPA10103-DPB11901 DPA10103-DPB12301 DPA10103-DPB13101 DPA10103-DPB13401 DPA10103-DPB13901 DPA10103-DPB14001 DPA10103-DPB14101 DPA10103-DPB14801 DPA10103-DPB15001 DPA10103-DPB15901 DPA10104-DPB10101 DPA10104-DPB11501 DPA10105-DPB10101 DPA10105-DPB10401 DPA10105-DPB15001 DPA10106-DPB10101 DPA10201-DPB10101 DPA10201-DPB110601 DPA10201-DPB11501 DPA10201-DPB11601 DPA10201-DPB11901 DPA10202-DPB10101 DPA10202-DPB10201 DPA10202-DPB10202 DPA10202-DPB10401 DPA10202-DPB110601 DPA10202-DPB11901 DPA10202-DPB13101 DPA10202-DPB16501 DPA10301-DPB10101 DPA10301-DPB10201 DPA10301-DPB10202 DPA10301-DPB10401 DPA10301-DPB10402 DPA10301-DPB110501 DPA10301-DPB110601 DPA10301-DPB11801 DPA10301-DPB12301 DPA10301-DPB13901 DPA10301-DPB14001 DPA10301-DPB14901 DPA10301-DPB15501 DPA10301-DPB16501 DPA10301-DPB17501 DPA10301-DPB18001 DPA10401-DPB10101 DPA10401-DPB10201; note = HLAs: DPA10401-DPB10202 DPA10401-DPB10402 DPA10401-DPB10501 DPA10401-DPB110501 DPA10401-DPB14901 DQA10101-DQB10501 DQA10101-DQB10503 DQA10102-DQB10501 DQA10102-DQB10502 DQA10102-DQB10503 DQA10103-DQB10501 DQA10104-DQB10501 DQA10104-DQB10503 DQA10105-DQB10501 DQA10107-DQB10503
PPFLWMGYELHPDK

SEQ ID NO: 4974 - protein, 15 aa, Human immunodeficiency virus 1
  source 1..15: note = HLAs: DRB1_0101 DRB1_0405 DRB1_0410 DRB1_1001 DRB1_1304 DRB1_1501 DRB1_1602 DPA10103-DPB10101 DPA10103-DPB10201 DPA10103-DPB10202 DPA10103-DPB10401 DPA10103-DPB112601 DPA10103-DPB11501 DPA10103-DPB11601 DPA10103-DPB11801 DPA10103-DPB11901 DPA10103-DPB12301 DPA10103-DPB13101 DPA10103-DPB13401 DPA10103-DPB13901 DPA10103-DPB14001 DPA10103-DPB14101 DPA10103-DPB14801 DPA10103-DPB15001 DPA10103-DPB15901 DPA10104-DPB10101 DPA10104-DPB11501 DPA10105-DPB10101 DPA10105-DPB10401 DPA10105-DPB11801 DPA10105-DPB15001 DPA10106-DPB10101 DPA10201-DPB10101 DPA10201-DPB10201 DPA10201-DPB10202 DPA10201-DPB110601 DPA10201-DPB11501 DPA10201-DPB11601 DPA10201-DPB11901 DPA10201-DPB13401 DPA10202-DPB10101 DPA10202-DPB10201 DPA10202-DPB10202 DPA10202-DPB10401 DPA10202-DPB110601 DPA10202-DPB11901 DPA10202-DPB13101 DPA10202-DPB15501 DPA10202-DPB16501 DPA10301-DPB10101 DPA10301-DPB10201 DPA10301-DPB10202 DPA10301-DPB10401 DPA10301-DPB10402 DPA10301-DPB110501 DPA10301-DPB110601 DPA10301-DPB11801 DPA10301-DPB12301; note = HLAs: DPA10301-DPB13901 DPA10301-DPB14001 DPA10301-DPB14901 DPA10301-DPB15501 DPA10301-DPB16501 DPA10301-DPB17501 DPA10301-DPB18001 DPA10401-DPB10101 DPA10401-DPB10201 DPA10401-DPB10202 DPA10401-DPB10402 DPA10401-DPB10501 DPA10401-DPB110501 DPA10401-DPB14901 DQA10101-DQB10501 DQA10101-DQB10503 DQA10102-DQB10501 DQA10102-DQB10502 DQA10102-DQB10503 DQA10103-DQB10501 DQA10104-DQB10501 DQA10104-DQB10503 DQA10105-DQB10501 DQA10107-DQB10503 DQA10505-DQB10402
PPFLWMGYELHPDKW

SEQ ID NO: 4975 - protein, 16 aa, Human immunodeficiency virus 1
  source 1..16: note = HLAs: DRB1_1001 DPA10103-DPB10101 DPA10103-DPB10201 DPA10103-DPB10202 DPA10103-DPB10401 DPA10103-DPB112601 DPA10103-DPB11501 DPA10103-DPB11601 DPA10103-DPB11801 DPA10103-DPB11901 DPA10103-DPB12301 DPA10103-DPB13101 DPA10103-DPB13401 DPA10103-DPB13901 DPA10103-DPB14001 DPA10103-DPB14101 DPA10103-DPB14801 DPA10103-DPB15001 DPA10103-DPB15901 DPA10104-DPB10101 DPA10104-DPB11501 DPA10105-DPB10101 DPA10105-DPB10401 DPA10105-DPB11801 DPA10105-DPB15001 DPA10106-DPB10101 DPA10201-DPB10101 DPA10201-DPB10202 DPA10201-DPB110601 DPA10201-DPB11501 DPA10201-DPB11601 DPA10201-DPB11901 DPA10201-DPB13401 DPA10202-DPB10101 DPA10202-DPB10201 DPA10202-DPB10202 DPA10202-DPB10401 DPA10202-DPB110601 DPA10202-DPB11901 DPA10202-DPB13101 DPA10202-DPB15501 DPA10202-DPB16501 DPA10301-DPB10101 DPA10301-DPB10201 DPA10301-DPB10202 DPA10301-DPB10401 DPA10301-DPB10402 DPA10301-DPB110501 DPA10301-DPB110601 DPA10301-DPB11801 DPA10301-DPB12301 DPA10301-DPB13901 DPA10301-DPB14001 DPA10301-DPB14901 DPA10301-DPB15501; note = HLAs: DPA10301-DPB16501 DPA10301-DPB17501 DPA10301-DPB18001 DPA10401-DPB10101 DPA10401-DPB10201 DPA10401-DPB10202 DPA10401-DPB10402 DPA10401-DPB10501 DPA10401-DPB110501 DPA10401-DPB14901 DQA10101-DQB10501 DQA10101-DQB10503 DQA10102-DQB10501 DQA10102-DQB10502 DQA10102-DQB10503 DQA10103-DQB10501 DQA10104-DQB10501 DQA10104-DQB10503 DQA10105-DQB10501 DQA10107-DQB10503 DQA10505-DQB10402
PPFLWMGYELHPDKWT

SEQ ID NO: 4976 - protein, 17 aa, Human immunodeficiency virus 1
  source 1..17: note = HLAs: DRB1_1001 DPA10103-DPB10101 DPA10103-DPB10201 DPA10103-DPB10202 DPA10103-DPB10401 DPA10103-DPB112601 DPA10103-DPB11501 DPA10103-DPB11601 DPA10103-DPB11801 DPA10103-DPB11901 DPA10103-DPB12301 DPA10103-DPB13101 DPA10103-DPB13401 DPA10103-DPB13901 DPA10103-DPB14001 DPA10103-DPB14101 DPA10103-DPB14801 DPA10103-DPB15001 DPA10103-DPB15901 DPA10104-DPB10101 DPA10104-DPB11501 DPA10105-DPB10101 DPA10105-DPB10401 DPA10105-DPB11801 DPA10105-DPB15001 DPA10106-DPB10101 DPA10201-DPB10101 DPA10201-DPB10202 DPA10201-DPB110601 DPA10201-DPB11501 DPA10201-DPB11601 DPA10201-DPB11901 DPA10201-DPB13401 DPA10202-DPB10101 DPA10202-DPB10201 DPA10202-DPB10202 DPA10202-DPB10401 DPA10202-DPB110601 DPA10202-DPB11901 DPA10202-DPB13101 DPA10202-DPB16501 DPA10301-DPB10101 DPA10301-DPB10201 DPA10301-DPB10202 DPA10301-DPB10401 DPA10301-DPB10402 DPA10301-DPB110501 DPA10301-DPB110601 DPA10301-DPB11801 DPA10301-DPB12301 DPA10301-DPB13901 DPA10301-DPB14001 DPA10301-DPB14901 DPA10301-DPB15501 DPA10301-DPB16501; note = HLAs: DPA10301-DPB17501 DPA10301-DPB18001 DPA10401-DPB10101 DPA10401-DPB10201 DPA10401-DPB10202 DPA10401-DPB10402 DPA10401-DPB10501 DPA10401-DPB110501 DPA10401-DPB14901 DQA10101-DQB10501 DQA10101-DQB10503 DQA10102-DQB10501 DQA10102-DQB10502 DQA10102-DQB10503 DQA10103-DQB10501 DQA10104-DQB10501 DQA10104-DQB10503 DQA10105-DQB10501 DQA10107-DQB10503
PPFLWMGYELHPDKWTV

SEQ ID NO: 4977 - protein, 18 aa, Human immunodeficiency virus 1
  source 1..18: note = HLAs: DPA10103-DPB10101 DPA10103-DPB10201 DPA10103-DPB10202 DPA10103-DPB10401 DPA10103-DPB112601 DPA10103-DPB11501 DPA10103-DPB11601 DPA10103-DPB12301 DPA10103-DPB13101 DPA10103-DPB13401 DPA10103-DPB13901 DPA10103-DPB14101 DPA10103-DPB14801 DPA10103-DPB15001 DPA10104-DPB10101 DPA10104-DPB11501 DPA10105-DPB10101 DPA10105-DPB10401 DPA10105-DPB15001 DPA10106-DPB10101 DPA10201-DPB10101 DPA10201-DPB11501 DPA10202-DPB10101 DPA10202-DPB13101 DPA10301-DPB10101 DPA10301-DPB10201 DPA10301-DPB10202 DPA10301-DPB10401 DPA10301-DPB10402 DPA10301-DPB110501 DPA10301-DPB110601 DPA10301-DPB11801 DPA10301-DPB12301 DPA10301-DPB13901 DPA10301-DPB14001 DPA10301-DPB14901 DPA10301-DPB16501 DPA10301-DPB18001 DPA10401-DPB10101 DPA10401-DPB10201 DPA10401-DPB10202 DQA10101-DQB10501 DQA10102-DQB10501 DQA10102-DQB10502 DQA10102-DQB10503 DQA10104-DQB10501 DQA10105-DQB10501
PPFLWMGYELHPDKWTVQ

SEQ ID NO: 4978 - protein, 19 aa, Human immunodeficiency virus 1
  source 1..19: note = HLAs: DRB1_1001 DPA10103-DPB10101 DPA10103-DPB10201 DPA10103-DPB10202 DPA10103-DPB10401 DPA10103-DPB112601 DPA10103-DPB11501 DPA10103-DPB11601 DPA10103-DPB11901 DPA10103-DPB12301 DPA10103-DPB13101 DPA10103-DPB13401 DPA10103-DPB13901 DPA10103-DPB14001 DPA10103-DPB14101 DPA10103-DPB14801 DPA10103-DPB15001 DPA10103-DPB15901 DPA10104-DPB10101 DPA10104-DPB11501 DPA10105-DPB10101 DPA10105-DPB10401 DPA10105-DPB15001 DPA10106-DPB10101 DPA10201-DPB10101 DPA10201-DPB110601 DPA10201-DPB11501 DPA10201-DPB11601 DPA10201-DPB11901 DPA10202-DPB10101 DPA10202-DPB10202 DPA10202-DPB110601 DPA10202-DPB11901 DPA10202-DPB13101 DPA10202-DPB16501 DPA10301-DPB10101 DPA10301-DPB10201 DPA10301-DPB10202 DPA10301-DPB10401 DPA10301-DPB10402 DPA10301-DPB110501 DPA10301-DPB110601 DPA10301-DPB11801 DPA10301-DPB12301 DPA10301-DPB13901 DPA10301-DPB14001 DPA10301-DPB14901 DPA10301-DPB15501 DPA10301-DPB16501 DPA10301-DPB17501 DPA10301-DPB18001 DPA10401-DPB10101 DPA10401-DPB10201 DPA10401-DPB10202 DPA10401-DPB10501; note = HLAs: DQA10101-DQB10501 DQA10101-DQB10503 DQA10102-DQB10501 DQA10102-DQB10502 DQA10102-DQB10503 DQA10103-DQB10501 DQA10104-DQB10501 DQA10104-DQB10503 DQA10105-DQB10501 DQA10107-DQB10503
PPFLWMGYELHPDKWTVQP

SEQ ID NO: 4979 - protein, 20 aa, Human immunodeficiency virus 1
  source 1..20: note = HLAs: DRB1_0101 DRB1_1001 DRB1_1602 DPA10103-DPB10101 DPA10103-DPB10201 DPA10103-DPB10202 DPA10103-DPB10401 DPA10103-DPB10501 DPA10103-DPB112601 DPA10103-DPB11501 DPA10103-DPB11601 DPA10103-DPB11801 DPA10103-DPB11901 DPA10103-DPB12301 DPA10103-DPB13101 DPA10103-DPB13401 DPA10103-DPB13901 DPA10103-DPB14001 DPA10103-DPB14101 DPA10103-DPB14801 DPA10103-DPB15001 DPA10103-DPB15901 DPA10104-DPB10101 DPA10104-DPB11501 DPA10105-DPB10101 DPA10105-DPB10401 DPA10105-DPB11801 DPA10105-DPB15001 DPA10106-DPB10101 DPA10201-DPB10101 DPA10201-DPB10202 DPA10201-DPB110601 DPA10201-DPB11501 DPA10201-DPB11601 DPA10201-DPB11901 DPA10202-DPB10101 DPA10202-DPB10201 DPA10202-DPB10202 DPA10202-DPB10401 DPA10202-DPB10501 DPA10202-DPB110601 DPA10202-DPB11901 DPA10202-DPB13101 DPA10202-DPB13801 DPA10202-DPB15501 DPA10202-DPB16501 DPA10301-DPB10101 DPA10301-DPB10201 DPA10301-DPB10202 DPA10301-DPB10401 DPA10301-DPB10402 DPA10301-DPB110501 DPA10301-DPB110601 DPA10301-DPB11101 DPA10301-DPB11801 DPA10301-DPB12301; note = HLAs: DPA10301-DPB13901 DPA10301-DPB14001 DPA10301-DPB14901 DPA10301-DPB15501 DPA10301-DPB16501 DPA10301-DPB17501 DPA10301-DPB18001 DPA10401-DPB10101 DPA10401-DPB10201 DPA10401-DPB10202 DPA10401-DPB10402 DPA10401-DPB10501 DPA10401-DPB110501 DPA10401-DPB14901 DQA10101-DQB10501 DQA10101-DQB10503 DQA10102-DQB10501 DQA10102-DQB10502 DQA10102-DQB10503 DQA10103-DQB10501 DQA10104-DQB10501 DQA10104-DQB10503 DQA10105-DQB10501 DQA10107-DQB10503 DQA10505-DQB10402
PPFLWMGYELHPDKWTVQPI

SEQ ID NO: 4980 - protein, 21 aa, Human immunodeficiency virus 1
  source 1..21: note = HLAs: DRB1_1001 DPA10103-DPB10101 DPA10103-DPB10201 DPA10103-DPB10202 DPA10103-DPB10401 DPA10103-DPB112601 DPA10103-DPB11501 DPA10103-DPB11601 DPA10103-DPB11901 DPA10103-DPB12301 DPA10103-DPB13101 DPA10103-DPB13401 DPA10103-DPB13901 DPA10103-DPB14001 DPA10103-DPB14101 DPA10103-DPB14801 DPA10103-DPB15001 DPA10103-DPB15901 DPA10104-DPB10101 DPA10104-DPB11501 DPA10105-DPB10101 DPA10105-DPB10401 DPA10105-DPB15001 DPA10106-DPB10101 DPA10201-DPB10101 DPA10201-DPB11501 DPA10201-DPB11601 DPA10202-DPB10101 DPA10202-DPB110601 DPA10202-DPB11901 DPA10202-DPB13101 DPA10202-DPB16501 DPA10301-DPB10101 DPA10301-DPB10201 DPA10301-DPB10202 DPA10301-DPB10401 DPA10301-DPB10402 DPA10301-DPB110501 DPA10301-DPB110601 DPA10301-DPB11801 DPA10301-DPB12301 DPA10301-DPB13901 DPA10301-DPB14001 DPA10301-DPB14901 DPA10301-DPB15501 DPA10301-DPB16501 DPA10301-DPB18001 DPA10401-DPB10101 DPA10401-DPB10201 DPA10401-DPB10202 DPA10401-DPB10501 DQA10101-DQB10501 DQA10102-DQB10501 DQA10102-DQB10502 DQA10102-DQB10503; note = HLAs: DQA10103-DQB10501 DQA10104-DQB10501 DQA10105-DQB10501
PPFLWMGYELHPDKWTVQPIQ

SEQ ID NO: 4981 - protein, 22 aa, Human immunodeficiency virus 1
  source 1..22: note = HLAs: DRB1_1001 DPA10103-DPB10101 DPA10103-DPB10201 DPA10103-DPB10202 DPA10103-DPB10401 DPA10103-DPB112601 DPA10103-DPB11501 DPA10103-DPB11601 DPA10103-DPB11901 DPA10103-DPB12301 DPA10103-DPB13101 DPA10103-DPB13401 DPA10103-DPB13901 DPA10103-DPB14001 DPA10103-DPB14101 DPA10103-DPB14801 DPA10103-DPB15001 DPA10103-DPB15901 DPA10104-DPB10101 DPA10104-DPB11501 DPA10105-DPB10101 DPA10105-DPB10401 DPA10105-DPB15001 DPA10106-DPB10101 DPA10201-DPB10101 DPA10201-DPB11501 DPA10201-DPB11601 DPA10202-DPB10101 DPA10202-DPB10202 DPA10202-DPB110601 DPA10202-DPB11901 DPA10202-DPB13101 DPA10202-DPB16501 DPA10301-DPB10101 DPA10301-DPB10201 DPA10301-DPB10202 DPA10301-DPB10401 DPA10301-DPB10402 DPA10301-DPB110501 DPA10301-DPB110601 DPA10301-DPB11801 DPA10301-DPB12301 DPA10301-DPB13901 DPA10301-DPB14001 DPA10301-DPB14901 DPA10301-DPB15501 DPA10301-DPB16501 DPA10301-DPB17501 DPA10301-DPB18001 DPA10401-DPB10101 DPA10401-DPB10201 DPA10401-DPB10202 DPA10401-DPB10501 DQA10101-DQB10501 DQA10102-DQB10501; note = HLAs: DQA10102-DQB10502 DQA10102-DQB10503 DQA10103-DQB10501 DQA10104-DQB10501 DQA10105-DQB10501 DQA10505-DQB10402
PPFLWMGYELHPDKWTVQPIQL

SEQ ID NO: 4982 - protein, 23 aa, Human immunodeficiency virus 1
  source 1..23: note = HLAs: DRB1_1001 DPA10103-DPB10101 DPA10103-DPB10201 DPA10103-DPB10202 DPA10103-DPB10401 DPA10103-DPB112601 DPA10103-DPB11501 DPA10103-DPB11601 DPA10103-DPB11901 DPA10103-DPB12301 DPA10103-DPB13101 DPA10103-DPB13401 DPA10103-DPB13901 DPA10103-DPB14001 DPA10103-DPB14101 DPA10103-DPB14801 DPA10103-DPB15001 DPA10103-DPB15901 DPA10104-DPB10101 DPA10104-DPB11501 DPA10105-DPB10101 DPA10105-DPB10401 DPA10105-DPB15001 DPA10106-DPB10101 DPA10201-DPB10101 DPA10201-DPB11501 DPA10201-DPB11601 DPA10202-DPB10101 DPA10202-DPB10202 DPA10202-DPB110601 DPA10202-DPB11901 DPA10202-DPB13101 DPA10202-DPB16501 DPA10301-DPB10101 DPA10301-DPB10201 DPA10301-DPB10202 DPA10301-DPB10401 DPA10301-DPB10402 DPA10301-DPB110501 DPA10301-DPB110601 DPA10301-DPB11801 DPA10301-DPB12301 DPA10301-DPB13901 DPA10301-DPB14001 DPA10301-DPB14901 DPA10301-DPB15501 DPA10301-DPB16501 DPA10301-DPB17501 DPA10301-DPB18001 DPA10401-DPB10101 DPA10401-DPB10201 DPA10401-DPB10202 DPA10401-DPB10501 DQA10101-DQB10501 DQA10102-DQB10501; note = HLAs: DQA10102-DQB10502 DQA10102-DQB10503 DQA10103-DQB10501 DQA10104-DQB10501 DQA10105-DQB10501 DQA10505-DQB10402
PPFLWMGYELHPDKWTVQPIQLP

SEQ ID NO: 4983 - protein, 15 aa, Human immunodeficiency virus 1
  source 1..15: note = HLAs: DRB1_0806 DRB1_1102 DRB1_1103 DRB1_1104 DRB1_1301 DRB1_1304 DRB1_1406 DRB1_1501 DPA10103-DPB10201 DPA10103-DPB10202 DPA10103-DPB11501 DPA10103-DPB14801 DPA10104-DPB11501 DPA10301-DPB10201 DPA10301-DPB10202 DPA10301-DPB14001 DPA10401-DPB10201 DPA10401-DPB10202
PPIPVGEIYKRWIIL

SEQ ID NO: 4984 - protein, 16 aa, Human immunodeficiency virus 1
  source 1..16: note = HLAs: DRB1_1304 DPA10103-DPB11501 DPA10104-DPB11501 DPA10301-DPB10201 DPA10301-DPB10202
PPIPVGEIYKRWIILG

SEQ ID NO: 4985 - protein, 17 aa, Human immunodeficiency virus 1
  source 1..17: note = HLAs: DRB1_1304 DPA10103-DPB10201 DPA10103-DPB10202 DPA10103-DPB11501 DPA10103-DPB11601 DPA10103-DPB13401 DPA10103-DPB14801 DPA10104-DPB11501 DPA10202-DPB110601 DPA10202-DPB11901 DPA10301-DPB10101 DPA10301-DPB10201 DPA10301-DPB10202 DPA10301-DPB10401 DPA10301-DPB110601 DPA10301-DPB11801 DPA10301-DPB12301 DPA10301-DPB13901 DPA10301-DPB14001 DPA10401-DPB10201 DPA10401-DPB10202
PPIPVGEIYKRWIILGL

SEQ ID NO: 4986 - protein, 18 aa, Human immunodeficiency virus 1
  source 1..18: note = HLAs: DPA10103-DPB10101 DPA10103-DPB10202 DPA10103-DPB11501 DPA10103-DPB11601 DPA10103-DPB11901 DPA10104-DPB10101 DPA10104-DPB11501 DPA10105-DPB10101 DPA10301-DPB10101 DPA10301-DPB10201 DPA10301-DPB10202 DPA10301-DPB110601 DPA10301-DPB11801 DPA10301-DPB14001 DPA10301-DPB16501 DPA10401-DPB10101 DPA10401-DPB10202 DQA10102-DQB10501
PPIPVGEIYKRWIILGLN

SEQ ID NO: 4987 - protein, 19 aa, Human immunodeficiency virus 1
  source 1..19: note = HLAs: DRB1_0806 DRB1_1001 DRB1_1104 DRB1_1304 DRB1_1501 DPA10103-DPB10101 DPA10103-DPB10201 DPA10103-DPB10202 DPA10103-DPB10301 DPA10103-DPB10501 DPA10103-DPB10601 DPA10103-DPB11101 DPA10103-DPB112401 DPA10103-DPB11501 DPA10103-DPB11601 DPA10103-DPB11901 DPA10103-DPB12001 DPA10103-DPB13101 DPA10103-DPB13401 DPA10103-DPB14001 DPA10103-DPB14101 DPA10103-DPB14801 DPA10103-DPB15001 DPA10103-DPB15501 DPA10104-DPB10101 DPA10104-DPB10301 DPA10104-DPB11501 DPA10105-DPB10101 DPA10105-DPB10301 DPA10105-DPB15001 DPA10106-DPB10101 DPA10201-DPB10101 DPA10201-DPB110601 DPA10201-DPB11501 DPA10201-DPB11601 DPA10201-DPB11901 DPA10202-DPB10101 DPA10202-DPB10202 DPA10202-DPB10501 DPA10202-DPB110601 DPA10202-DPB11901 DPA10202-DPB13101 DPA10202-DPB13801 DPA10202-DPB16501 DPA10301-DPB10101 DPA10301-DPB10201 DPA10301-DPB10202 DPA10301-DPB10401 DPA10301-DPB10402 DPA10301-DPB110501 DPA10301-DPB110601 DPA10301-DPB11101 DPA10301-DPB11701 DPA10301-DPB11801 DPA10301-DPB12301 DPA10301-DPB13901 DPA10301-DPB14001; note = HLAs: DPA10301-DPB14901 DPA10301-DPB15501 DPA10301-DPB16501 DPA10301-DPB18001 DPA10401-DPB10101 DPA10401-DPB10201 DPA10401-DPB10202 DPA10401-DPB10301 DPA10401-DPB10501 DPA10401-DPB11301 DPA10401-DPB113301 DPA10401-DPB11401 DQA10102-DQB10501 DQA10103-DQB10501
PPIPVGEIYKRWIILGLNK

SEQ ID NO: 4988 - protein, 20 aa, Human immunodeficiency virus 1
  source 1..20: note = HLAs: DRB1_0101 DRB1_0405 DRB1_0410 DRB1_0701 DRB1_0801 DRB1_0802 DRB1_0804 DRB1_0806 DRB1_0809 DRB1_0813 DRB1_1001 DRB1_1101 DRB1_1102 DRB1_1104 DRB1_1301 DRB1_1304 DRB1_1305 DRB1_1406 DRB1_1501 DRB1_1502 DRB1_1503 DRB1_1601 DRB1_1602 DPA10103-DPB10101 DPA10103-DPB10201 DPA10103-DPB10202 DPA10103-DPB10301 DPA10103-DPB10401 DPA10103-DPB10501 DPA10103-DPB10601 DPA10103-DPB10901 DPA10103-DPB11001 DPA10103-DPB11101 DPA10103-DPB112401 DPA10103-DPB112601 DPA10103-DPB11301 DPA10103-DPB113101 DPA10103-DPB113301 DPA10103-DPB11401 DPA10103-DPB11501 DPA10103-DPB11601 DPA10103-DPB11701 DPA10103-DPB11801 DPA10103-DPB11901 DPA10103-DPB12001 DPA10103-DPB12101 DPA10103-DPB12301 DPA10103-DPB12901 DPA10103-DPB13001 DPA10103-DPB13101 DPA10103-DPB13401 DPA10103-DPB13901 DPA10103-DPB14001 DPA10103-DPB14101 DPA10103-DPB14801 DPA10103-DPB15001 DPA10103-DPB15501 DPA10103-DPB15901 DPA10104-DPB10101 DPA10104-DPB10301 DPA10104-DPB11001 DPA10104-DPB11301 DPA10104-DPB11501 DPA10105-DPB10101 DPA10105-DPB10301; note = HLAs: DPA10105-DPB10401 DPA10105-DPB11801 DPA10105-DPB15001 DPA10106-DPB10101 DPA10106-DPB11101 DPA10201-DPB10101 DPA10201-DPB10202 DPA10201-DPB10501 DPA10201-DPB10601 DPA10201-DPB110601 DPA10201-DPB11101 DPA10201-DPB11501 DPA10201-DPB11601 DPA10201-DPB11901 DPA10201-DPB13001 DPA10201-DPB15501 DPA10201-DPB19101 DPA10202-DPB10101 DPA10202-DPB10201 DPA10202-DPB10202 DPA10202-DPB10401 DPA10202-DPB10501 DPA10202-DPB110601 DPA10202-DPB11101 DPA10202-DPB11301 DPA10202-DPB113101 DPA10202-DPB11701 DPA10202-DPB11801 DPA10202-DPB11901 DPA10202-DPB12101 DPA10202-DPB13001 DPA10202-DPB13101 DPA10202-DPB13801 DPA10202-DPB15501 DPA10202-DPB16501 DPA10202-DPB18501 DPA10301-DPB10101 DPA10301-DPB10201 DPA10301-DPB10202 DPA10301-DPB10301 DPA10301-DPB10401 DPA10301-DPB10402 DPA10301-DPB10901 DPA10301-DPB110501 DPA10301-DPB110601 DPA10301-DPB11101 DPA10301-DPB11301 DPA10301-DPB11701 DPA10301-DPB11801 DPA10301-DPB12301 DPA10301-DPB13901 DPA10301-DPB14001 DPA10301-DPB14901 DPA10301-DPB15501; note = HLAs: DPA10301-DPB16501 DPA10301-DPB17501 DPA10301-DPB18001 DPA10401-DPB10101 DPA10401-DPB10201 DPA10401-DPB10202 DPA10401-DPB10301 DPA10401-DPB10402 DPA10401-DPB10501 DPA10401-DPB110501 DPA10401-DPB11301 DPA10401-DPB113301 DPA10401-DPB11401 DPA10401-DPB14901 DQA10102-DQB10501 DQA10103-DQB10501
PPIPVGEIYKRWIILGLNKI

SEQ ID NO: 4989 - protein, 21 aa, Human immunodeficiency virus 1
  source 1..21: note = HLAs: DRB1_0101 DRB1_0408 DRB1_0701 DRB1_0806 DRB1_0813 DRB1_1001 DRB1_1102 DRB1_1104 DRB1_1114 DRB1_1301 DRB1_1302 DRB1_1304 DRB1_1406 DRB1_1501 DRB1_1502 DRB1_1601 DRB1_1602 DPA10103-DPB10101 DPA10103-DPB10201 DPA10103-DPB10202 DPA10103-DPB10501 DPA10103-DPB10601 DPA10103-DPB11101 DPA10103-DPB11501 DPA10103-DPB11601 DPA10103-DPB11801 DPA10103-DPB11901 DPA10103-DPB12001 DPA10103-DPB13101 DPA10103-DPB13401 DPA10103-DPB14001 DPA10103-DPB14101 DPA10103-DPB14801 DPA10103-DPB15001 DPA10103-DPB15501 DPA10104-DPB10101 DPA10104-DPB11501 DPA10105-DPB10101 DPA10105-DPB11801 DPA10105-DPB15001 DPA10106-DPB10101 DPA10201-DPB10101 DPA10201-DPB110601 DPA10201-DPB11501 DPA10201-DPB11601 DPA10201-DPB11901 DPA10202-DPB10101 DPA10202-DPB10201 DPA10202-DPB10202 DPA10202-DPB10501 DPA10202-DPB110601 DPA10202-DPB11901 DPA10202-DPB13101 DPA10202-DPB13801 DPA10202-DPB15501 DPA10202-DPB16501 DPA10301-DPB10101 DPA10301-DPB10201 DPA10301-DPB10202 DPA10301-DPB10401 DPA10301-DPB10402 DPA10301-DPB110501; note = HLAs: DPA10301-DPB110601 DPA10301-DPB11101 DPA10301-DPB11701 DPA10301-DPB11801 DPA10301-DPB12301 DPA10301-DPB13901 DPA10301-DPB14001 DPA10301-DPB14901 DPA10301-DPB15501 DPA10301-DPB16501 DPA10301-DPB17501 DPA10301-DPB18001 DPA10401-DPB10101 DPA10401-DPB10201 DPA10401-DPB10202 DPA10401-DPB10301 DPA10401-DPB10501 DPA10401-DPB11301 DPA10401-DPB113301 DPA10401-DPB11401 DQA10102-DQB10501 DQA10103-DQB10501
PPIPVGEIYKRWIILGLNKIV

SEQ ID NO: 4990 - protein, 22 aa, Human immunodeficiency virus 1
  source 1..22: note = HLAs: DRB1_0101 DRB1_0102 DRB1_0404 DRB1_0405 DRB1_0408 DRB1_0410 DRB1_0701 DRB1_0801 DRB1_0802 DRB1_0804 DRB1_0806 DRB1_0809 DRB1_0813 DRB1_0901 DRB1_1001 DRB1_1101 DRB1_1102 DRB1_1103 DRB1_1104 DRB1_1114 DRB1_1201 DRB1_1301 DRB1_1302 DRB1_1304 DRB1_1305 DRB1_1312 DRB1_1401 DRB1_1402 DRB1_1403 DRB1_1404 DRB1_1405 DRB1_1406 DRB1_1454 DRB1_1501 DRB1_1502 DRB1_1503 DRB1_1601 DRB1_1602 DPA10103-DPB10101 DPA10103-DPB10201 DPA10103-DPB10202 DPA10103-DPB10301 DPA10103-DPB10501 DPA10103-DPB10601 DPA10103-DPB11101 DPA10103-DPB112401 DPA10103-DPB113101 DPA10103-DPB11501 DPA10103-DPB11601 DPA10103-DPB11701 DPA10103-DPB11801 DPA10103-DPB11901 DPA10103-DPB12001 DPA10103-DPB12101 DPA10103-DPB13001 DPA10103-DPB13101 DPA10103-DPB13401 DPA10103-DPB14001 DPA10103-DPB14101 DPA10103-DPB14801 DPA10103-DPB15001 DPA10103-DPB15501 DPA10104-DPB10101 DPA10104-DPB10301 DPA10104-DPB11501 DPA10105-DPB10101 DPA10105-DPB10301 DPA10105-DPB11801 DPA10105-DPB15001 DPA10106-DPB10101 DPA10201-DPB10101 DPA10201-DPB10501; note = HLAs: DPA10201-DPB110601 DPA10201-DPB11501 DPA10201-DPB11601 DPA10201-DPB11901 DPA10202-DPB10101 DPA10202-DPB10201 DPA10202-DPB10202 DPA10202-DPB10501 DPA10202-DPB110601 DPA10202-DPB11101 DPA10202-DPB11801 DPA10202-DPB11901 DPA10202-DPB13101 DPA10202-DPB13801 DPA10202-DPB15501 DPA10202-DPB16501 DPA10301-DPB10101 DPA10301-DPB10201 DPA10301-DPB10202 DPA10301-DPB10401 DPA10301-DPB10402 DPA10301-DPB110501 DPA10301-DPB110601 DPA10301-DPB11101 DPA10301-DPB11301 DPA10301-DPB11701 DPA10301-DPB11801 DPA10301-DPB12301 DPA10301-DPB13901 DPA10301-DPB14001 DPA10301-DPB14901 DPA10301-DPB15501 DPA10301-DPB16501 DPA10301-DPB17501 DPA10301-DPB18001 DPA10401-DPB10101 DPA10401-DPB10201 DPA10401-DPB10202 DPA10401-DPB10301 DPA10401-DPB10402 DPA10401-DPB10501 DPA10401-DPB110501 DPA10401-DPB11301 DPA10401-DPB113301 DPA10401-DPB11401 DPA10401-DPB14901 DQA10102-DQB10501 DQA10103-DQB10501
PPIPVGEIYKRWIILGLNKIVR

SEQ ID NO: 4991 - protein, 23 aa, Human immunodeficiency virus 1
  source 1..23: note = HLAs: DRB1_0101 DRB1_0102 DRB1_0404 DRB1_0405 DRB1_0408 DRB1_0410 DRB1_0701 DRB1_0801 DRB1_0802 DRB1_0803 DRB1_0804 DRB1_0806 DRB1_0809 DRB1_0813 DRB1_0901 DRB1_1001 DRB1_1101 DRB1_1102 DRB1_1103 DRB1_1104 DRB1_1114 DRB1_1201 DRB1_1202 DRB1_1301 DRB1_1302 DRB1_1303 DRB1_1304 DRB1_1305 DRB1_1312 DRB1_1401 DRB1_1402 DRB1_1403 DRB1_1404 DRB1_1405 DRB1_1406 DRB1_1407 DRB1_1418 DRB1_1454 DRB1_1501 DRB1_1502 DRB1_1503 DRB1_1601 DRB1_1602 DPA10103-DPB10101 DPA10103-DPB10201 DPA10103-DPB10202 DPA10103-DPB10301 DPA10103-DPB10501 DPA10103-DPB10601 DPA10103-DPB11101 DPA10103-DPB112401 DPA10103-DPB11301 DPA10103-DPB113101 DPA10103-DPB113301 DPA10103-DPB11401 DPA10103-DPB11501 DPA10103-DPB11601 DPA10103-DPB11701 DPA10103-DPB11801 DPA10103-DPB11901 DPA10103-DPB12001 DPA10103-DPB12101 DPA10103-DPB13001 DPA10103-DPB13101 DPA10103-DPB13401 DPA10103-DPB14001 DPA10103-DPB14101 DPA10103-DPB14801 DPA10103-DPB15001 DPA10103-DPB15501 DPA10104-DPB10101 DPA10104-DPB10301 DPA10104-DPB11301 DPA10104-DPB11501; note = HLAs: DPA10105-DPB10101 DPA10105-DPB10301 DPA10105-DPB11801 DPA10105-DPB15001 DPA10106-DPB10101 DPA10201-DPB10101 DPA10201-DPB10202 DPA10201-DPB10501 DPA10201-DPB110601 DPA10201-DPB11501 DPA10201-DPB11601 DPA10201-DPB11901 DPA10202-DPB10101 DPA10202-DPB10201 DPA10202-DPB10202 DPA10202-DPB10401 DPA10202-DPB10501 DPA10202-DPB110601 DPA10202-DPB11101 DPA10202-DPB11301 DPA10202-DPB11801 DPA10202-DPB11901 DPA10202-DPB12101 DPA10202-DPB13001 DPA10202-DPB13101 DPA10202-DPB13801 DPA10202-DPB15501 DPA10202-DPB16501 DPA10301-DPB10101 DPA10301-DPB10201 DPA10301-DPB10202 DPA10301-DPB10401 DPA10301-DPB10402 DPA10301-DPB10901 DPA10301-DPB110501 DPA10301-DPB110601 DPA10301-DPB11101 DPA10301-DPB11301 DPA10301-DPB11701 DPA10301-DPB11801 DPA10301-DPB12301 DPA10301-DPB13901 DPA10301-DPB14001 DPA10301-DPB14901 DPA10301-DPB15501 DPA10301-DPB16501 DPA10301-DPB17501 DPA10301-DPB18001 DPA10401-DPB10101 DPA10401-DPB10201 DPA10401-DPB10202 DPA10401-DPB10301 DPA10401-DPB10402 DPA10401-DPB10501; note = HLAs: DPA10401-DPB110501 DPA10401-DPB11301 DPA10401-DPB113301 DPA10401-DPB11401 DPA10401-DPB14901 DQA10102-DQB10501 DQA10102-DQB10503 DQA10103-DQB10501 DQA10103-DQB10609
PPIPVGEIYKRWIILGLNKIVRM

SEQ ID NO: 4992 - protein, 24 aa, Human immunodeficiency virus 1
  source 1..24: note = HLAs: DRB1_0101 DRB1_0102 DRB1_0401 DRB1_0404 DRB1_0405 DRB1_0408 DRB1_0410 DRB1_0701 DRB1_0801 DRB1_0802 DRB1_0803 DRB1_0804 DRB1_0806 DRB1_0809 DRB1_0813 DRB1_0901 DRB1_1001 DRB1_1101 DRB1_1102 DRB1_1103 DRB1_1104 DRB1_1114 DRB1_1201 DRB1_1202 DRB1_1301 DRB1_1302 DRB1_1303 DRB1_1304 DRB1_1305 DRB1_1312 DRB1_1401 DRB1_1402 DRB1_1403 DRB1_1404 DRB1_1405 DRB1_1406 DRB1_1407 DRB1_1418 DRB1_1454 DRB1_1501 DRB1_1502 DRB1_1503 DRB1_1601 DRB1_1602 DPA10103-DPB10101 DPA10103-DPB10201 DPA10103-DPB10202 DPA10103-DPB10301 DPA10103-DPB10401 DPA10103-DPB10501 DPA10103-DPB10601 DPA10103-DPB11101 DPA10103-DPB112401 DPA10103-DPB112601 DPA10103-DPB11301 DPA10103-DPB113101 DPA10103-DPB113301 DPA10103-DPB11401 DPA10103-DPB11501 DPA10103-DPB11601 DPA10103-DPB11701 DPA10103-DPB11801 DPA10103-DPB11901 DPA10103-DPB12001 DPA10103-DPB12101 DPA10103-DPB12301 DPA10103-DPB13001 DPA10103-DPB13101 DPA10103-DPB13401 DPA10103-DPB13901 DPA10103-DPB14001 DPA10103-DPB14101 DPA10103-DPB14801 DPA10103-DPB15001; note = HLAs: DPA10103-DPB15501 DPA10104-DPB10101 DPA10104-DPB10301 DPA10104-DPB11301 DPA10104-DPB11501 DPA10105-DPB10101 DPA10105-DPB10301 DPA10105-DPB10401 DPA10105-DPB11801 DPA10105-DPB15001 DPA10106-DPB10101 DPA10201-DPB10101 DPA10201-DPB10202 DPA10201-DPB10501 DPA10201-DPB110601 DPA10201-DPB11501 DPA10201-DPB11601 DPA10201-DPB11901 DPA10201-DPB15501 DPA10202-DPB10101 DPA10202-DPB10201 DPA10202-DPB10202 DPA10202-DPB10401 DPA10202-DPB10501 DPA10202-DPB110601 DPA10202-DPB11101 DPA10202-DPB11301 DPA10202-DPB11801 DPA10202-DPB11901 DPA10202-DPB12101 DPA10202-DPB13001 DPA10202-DPB13101 DPA10202-DPB13801 DPA10202-DPB15501 DPA10202-DPB16501 DPA10301-DPB10101 DPA10301-DPB10201 DPA10301-DPB10202 DPA10301-DPB10401 DPA10301-DPB10402 DPA10301-DPB10901 DPA10301-DPB110501 DPA10301-DPB110601 DPA10301-DPB11101 DPA10301-DPB11301 DPA10301-DPB11701 DPA10301-DPB11801 DPA10301-DPB12301 DPA10301-DPB13901 DPA10301-DPB14001 DPA10301-DPB14901 DPA10301-DPB15501 DPA10301-DPB16501 DPA10301-DPB17501 DPA10301-DPB18001; note = HLAs: DPA10401-DPB10101 DPA10401-DPB10201 DPA10401-DPB10202 DPA10401-DPB10301 DPA10401-DPB10402 DPA10401-DPB10501 DPA10401-DPB110501 DPA10401-DPB11301 DPA10401-DPB113301 DPA10401-DPB11401 DPA10401-DPB14901 DQA10102-DQB10501 DQA10102-DQB10503 DQA10103-DQB10501 DQA10103-DQB10609
PPIPVGEIYKRWIILGLNKIVRMY

SEQ ID NO: 4993 - protein, 25 aa, Human immunodeficiency virus 1
  source 1..25: note = HLAs: DRB1_0101 DRB1_0102 DRB1_0301 DRB1_0401 DRB1_0404 DRB1_0405 DRB1_0408 DRB1_0410 DRB1_0701 DRB1_0801 DRB1_0802 DRB1_0803 DRB1_0804 DRB1_0806 DRB1_0809 DRB1_0813 DRB1_0901 DRB1_1001 DRB1_1101 DRB1_1102 DRB1_1103 DRB1_1104 DRB1_1114 DRB1_1201 DRB1_1202 DRB1_1301 DRB1_1302 DRB1_1303 DRB1_1304 DRB1_1305 DRB1_1312 DRB1_1401 DRB1_1402 DRB1_1403 DRB1_1404 DRB1_1405 DRB1_1406 DRB1_1407 DRB1_1418 DRB1_1454 DRB1_1501 DRB1_1502 DRB1_1503 DRB1_1601 DRB1_1602 DPA10103-DPB10101 DPA10103-DPB10201 DPA10103-DPB10202 DPA10103-DPB10301 DPA10103-DPB10401 DPA10103-DPB10501 DPA10103-DPB10601 DPA10103-DPB11101 DPA10103-DPB112401 DPA10103-DPB112601 DPA10103-DPB11301 DPA10103-DPB113101 DPA10103-DPB113301 DPA10103-DPB11401 DPA10103-DPB11501 DPA10103-DPB11601 DPA10103-DPB11701 DPA10103-DPB11801 DPA10103-DPB11901 DPA10103-DPB12001 DPA10103-DPB12101 DPA10103-DPB12301 DPA10103-DPB12901 DPA10103-DPB13001 DPA10103-DPB13101 DPA10103-DPB13401 DPA10103-DPB13901 DPA10103-DPB14001 DPA10103-DPB14101 DPA10103-DPB14801; note = HLAs: DPA10103-DPB15001 DPA10103-DPB15501 DPA10103-DPB15901 DPA10104-DPB10101 DPA10104-DPB10301 DPA10104-DPB11301 DPA10104-DPB11501 DPA10105-DPB10101 DPA10105-DPB10301 DPA10105-DPB10401 DPA10105-DPB11801 DPA10105-DPB15001 DPA10106-DPB10101 DPA10201-DPB10101 DPA10201-DPB10202 DPA10201-DPB10501 DPA10201-DPB110601 DPA10201-DPB11501 DPA10201-DPB11601 DPA10201-DPB11801 DPA10201-DPB11901 DPA10201-DPB15501 DPA10202-DPB10101 DPA10202-DPB10201 DPA10202-DPB10202 DPA10202-DPB10401 DPA10202-DPB10501 DPA10202-DPB110601 DPA10202-DPB11101 DPA10202-DPB11301 DPA10202-DPB113101 DPA10202-DPB11701 DPA10202-DPB11801 DPA10202-DPB11901 DPA10202-DPB12101 DPA10202-DPB13001 DPA10202-DPB13101 DPA10202-DPB13801 DPA10202-DPB15501 DPA10202-DPB16501 DPA10202-DPB18501 DPA10301-DPB10101 DPA10301-DPB10201 DPA10301-DPB10202 DPA10301-DPB10401 DPA10301-DPB10402 DPA10301-DPB10901 DPA10301-DPB110501 DPA10301-DPB110601 DPA10301-DPB11101 DPA10301-DPB11301 DPA10301-DPB11701 DPA10301-DPB11801 DPA10301-DPB12301; note = HLAs: DPA10301-DPB13901 DPA10301-DPB14001 DPA10301-DPB14901 DPA10301-DPB15501 DPA10301-DPB16501 DPA10301-DPB17501 DPA10301-DPB18001 DPA10401-DPB10101 DPA10401-DPB10201 DPA10401-DPB10202 DPA10401-DPB10301 DPA10401-DPB10402 DPA10401-DPB10501 DPA10401-DPB110501 DPA10401-DPB11301 DPA10401-DPB113301 DPA10401-DPB11401 DPA10401-DPB14901 DQA10102-DQB10501 DQA10102-DQB10503 DQA10102-DQB10609 DQA10103-DQB10501 DQA10103-DQB10601 DQA10103-DQB10609
PPIPVGEIYKRWIILGLNKIVRMYS

SEQ ID NO: 4994 - protein, 14 aa, Human immunodeficiency virus 1
  source 1..14: note = HLAs: DRB1_0404
PQDLNTMLNTVGGH

SEQ ID NO: 4995 - protein, 15 aa, Human immunodeficiency virus 1
  source 1..15: note = HLAs: DRB1_0101 DRB1_0102 DRB1_0401 DRB1_0404 DRB1_0408 DRB1_0410 DRB1_1001
PQDLNTMLNTVGGHQ

SEQ ID NO: 4996 - protein, 16 aa, Human immunodeficiency virus 1
  source 1..16: note = HLAs: DRB1_0404 DRB1_0408 DRB1_1001 DQA10102-DQB10501
PQDLNTMLNTVGGHQA

SEQ ID NO: 4997 - protein, 17 aa, Human immunodeficiency virus 1
  source 1..17: note = HLAs: DRB1_0101 DRB1_0404 DRB1_0408 DRB1_1001 DQA10102-DQB10501 DQA10102-DQB10601 DQA10103-DQB10601
PQDLNTMLNTVGGHQAA

SEQ ID NO: 4998 - protein, 19 aa, Human immunodeficiency virus 1
  source 1..19: note = HLAs: DRB1_0101 DRB1_0404 DRB1_1001 DQA10102-DQB10501 DQA10102-DQB10601 DQA10103-DQB10601 DQA10201-DQB10301
PQDLNTMLNTVGGHQAAMQ

SEQ ID NO: 4999 - protein, 20 aa, Human immunodeficiency virus 1
  source 1..20: note = HLAs: DRB1_0101 DRB1_0404 DRB1_0408 DRB1_1001 DQA10102-DQB10501 DQA10102-DQB10601 DQA10102-DQB10602 DQA10103-DQB10501 DQA10103-DQB10601 DQA10103-DQB10602 DQA10103-DQB10609 DQA10201-DQB10301 DQA10201-DQB10303 DQA10505-DQB10402 DQA10506-DQB10303
PQDLNTMLNTVGGHQAAMQM

SEQ ID NO: 5000 - protein, 21 aa, Human immunodeficiency virus 1
  source 1..21: note = HLAs: DRB1_0101 DRB1_0404 DRB1_1001 DQA10102-DQB10501 DQA10102-DQB10601 DQA10103-DQB10601 DQA10201-DQB10301
PQDLNTMLNTVGGHQAAMQML

SEQ ID NO: 5001 - protein, 22 aa, Human immunodeficiency virus 1
  source 1..22: note = HLAs: DRB1_0101 DRB1_0404 DRB1_1001 DQA10102-DQB10501 DQA10102-DQB10601 DQA10103-DQB10601 DQA10103-DQB10609 DQA10201-DQB10301 DQA10201-DQB10303
PQDLNTMLNTVGGHQAAMQMLK

SEQ ID NO: 5002 - protein, 14 aa, Human immunodeficiency virus 1
  source 1..14: note = HLAs: DRB1_1001 DQA10103-DQB10601 DQA10201-DQB10301 DQA10501-DQB10301 DQA10501-DQB10319 DQA10503-DQB10301 DQA10505-DQB10301 DQA10505-DQB10309 DQA10505-DQB10319 DQA10508-DQB10301 DQA10509-DQB10301
PQGWKGSPAIFQSS

SEQ ID NO: 5003 - protein, 15 aa, Human immunodeficiency virus 1
  source 1..15: note = HLAs: DRB1_0101 DRB1_0401 DRB1_0408 DRB1_0701 DRB1_0901 DRB1_1001 DQA10102-DQB10601 DQA10103-DQB10601 DQA10201-DQB10301 DQA10301-DQB10301 DQA10302-DQB10301 DQA10303-DQB10301 DQA10501-DQB10301 DQA10501-DQB10319 DQA10503-DQB10301 DQA10505-DQB10301 DQA10505-DQB10309 DQA10505-DQB10319 DQA10505-DQB10402 DQA10506-DQB10303 DQA10508-DQB10301 DQA10509-DQB10301 DQA10601-DQB10301
PQGWKGSPAIFQSSM

SEQ ID NO: 5004 - protein, 17 aa, Human immunodeficiency virus 1
  source 1..17: note = HLAs: DRB1_1104 DRB1_1406
PQSQGVVESMNKELKKI

SEQ ID NO: 5005 - protein, 19 aa, Human immunodeficiency virus 1
  source 1..19: note = HLAs: DRB1_1103 DRB1_1104 DRB1_1304 DRB1_1406
PQSQGVVESMNKELKKIIG

SEQ ID NO: 5006 - protein, 20 aa, Human immunodeficiency virus 1
  source 1..20: note = HLAs: DRB1_0804 DRB1_0806 DRB1_1101 DRB1_1102 DRB1_1103 DRB1_1104 DRB1_1114 DRB1_1301 DRB1_1302 DRB1_1304 DRB1_1305 DRB1_1406
PQSQGVVESMNKELKKIIGQ

SEQ ID NO: 5007 - protein, 21 aa, Human immunodeficiency virus 1
  source 1..21: note = HLAs: DRB1_0806 DRB1_1101 DRB1_1102 DRB1_1103 DRB1_1104 DRB1_1301 DRB1_1304 DRB1_1305 DRB1_1406
PQSQGVVESMNKELKKIIGQV

SEQ ID NO: 5008 - protein, 22 aa, Human immunodeficiency virus 1
  source 1..22: note = HLAs: DRB1_0804 DRB1_0806 DRB1_1101 DRB1_1102 DRB1_1103 DRB1_1104 DRB1_1301 DRB1_1304 DRB1_1305 DRB1_1406
PQSQGVVESMNKELKKIIGQVR

SEQ ID NO: 5009 - protein, 13 aa, Human immunodeficiency virus 1
  source 1..13: note = HLAs: DQA10201-DQB10301
PRGSDIAGTTSTL

SEQ ID NO: 5010 - protein, 14 aa, Human immunodeficiency virus 1
  source 1..14: note = HLAs: DQA10201-DQB10301 DQA10501-DQB10301 DQA10501-DQB10319 DQA10503-DQB10301 DQA10505-DQB10301 DQA10505-DQB10309 DQA10505-DQB10319 DQA10508-DQB10301 DQA10509-DQB10301 DQA10601-DQB10301
PRGSDIAGTTSTLQ

SEQ ID NO: 5011 - protein, 15 aa, Human immunodeficiency virus 1
  source 1..15: note = HLAs: DQA10102-DQB10601 DQA10201-DQB10301 DQA10201-DQB10303 DQA10301-DQB10301 DQA10302-DQB10301 DQA10303-DQB10301 DQA10501-DQB10301 DQA10501-DQB10319 DQA10503-DQB10301 DQA10505-DQB10301 DQA10505-DQB10309 DQA10505-DQB10319 DQA10506-DQB10303 DQA10508-DQB10301 DQA10509-DQB10301 DQA10601-DQB10301
PRGSDIAGTTSTLQE

SEQ ID NO: 5012 - protein, 16 aa, Human immunodeficiency virus 1
  source 1..16: note = HLAs: DQA10102-DQB10601 DQA10103-DQB10601 DQA10201-DQB10301 DQA10301-DQB10301 DQA10302-DQB10301 DQA10303-DQB10301 DQA10401-DQB10301 DQA10401-DQB10319 DQA10501-DQB10301 DQA10501-DQB10319 DQA10503-DQB10301 DQA10505-DQB10301 DQA10505-DQB10309 DQA10505-DQB10319 DQA10508-DQB10301 DQA10509-DQB10301 DQA10601-DQB10301
PRGSDIAGTTSTLQEQ

SEQ ID NO: 5013 - protein, 17 aa, Human immunodeficiency virus 1
  source 1..17: note = HLAs: DQA10102-DQB10601 DQA10103-DQB10601 DQA10201-DQB10301 DQA10501-DQB10301 DQA10501-DQB10319 DQA10503-DQB10301 DQA10505-DQB10301 DQA10505-DQB10309 DQA10505-DQB10319 DQA10508-DQB10301 DQA10509-DQB10301 DQA10601-DQB10301
PRGSDIAGTTSTLQEQI

SEQ ID NO: 5014 - protein, 15 aa, Human immunodeficiency virus 1
  source 1..15: note = HLAs: DRB1_0301 DRB1_1102 DRB1_1103 DRB1_1104 DRB1_1114 DRB1_1301 DRB1_1302 DRB1_1304 DRB1_1406
PRRKAKIIRDYGKQM

SEQ ID NO: 5015 - protein, 16 aa, Human immunodeficiency virus 1
  source 1..16: note = HLAs: DRB1_0301 DRB1_0806 DRB1_1102 DRB1_1103 DRB1_1104 DRB1_1114 DRB1_1301 DRB1_1302 DRB1_1304 DRB1_1406 DQA10102-DQB10501
PRRKAKIIRDYGKQMA

SEQ ID NO: 5016 - protein, 17 aa, Human immunodeficiency virus 1
  source 1..17: note = HLAs: DRB1_0301 DRB1_0806 DRB1_1102 DRB1_1103 DRB1_1104 DRB1_1114 DRB1_1301 DRB1_1302 DRB1_1304 DRB1_1406 DRB1_1501
PRRKAKIIRDYGKQMAG

SEQ ID NO: 5017 - protein, 18 aa, Human immunodeficiency virus 1
  source 1..18: note = HLAs: DRB1_0301 DRB1_1103
PRRKAKIIRDYGKQMAGD

SEQ ID NO: 5018 - protein, 19 aa, Human immunodeficiency virus 1
  source 1..19: note = HLAs: DRB1_0301 DRB1_1102 DRB1_1103 DRB1_1104 DRB1_1114 DRB1_1301 DRB1_1302 DRB1_1304 DRB1_1406
PRRKAKIIRDYGKQMAGDD

SEQ ID NO: 5019 - protein, 20 aa, Human immunodeficiency virus 1
  source 1..20: note = HLAs: DRB1_0301 DRB1_0804 DRB1_0806 DRB1_1102 DRB1_1103 DRB1_1104 DRB1_1114 DRB1_1301 DRB1_1302 DRB1_1304 DRB1_1406 DRB1_1501 DPA10103-DPB15001 DPA10105-DPB15001 DQA10102-DQB10501
PRRKAKIIRDYGKQMAGDDC

SEQ ID NO: 5020 - protein, 21 aa, Human immunodeficiency virus 1
  source 1..21: note = HLAs: DRB1_0301 DRB1_0806 DRB1_1102 DRB1_1103 DRB1_1104 DRB1_1114 DRB1_1301 DRB1_1302 DRB1_1304 DRB1_1406
PRRKAKIIRDYGKQMAGDDCV

SEQ ID NO: 5021 - protein, 22 aa, Human immunodeficiency virus 1
  source 1..22: note = HLAs: DRB1_0301 DRB1_0806 DRB1_1102 DRB1_1103 DRB1_1104 DRB1_1114 DRB1_1301 DRB1_1302 DRB1_1304 DRB1_1406 DQA10102-DQB10501
PRRKAKIIRDYGKQMAGDDCVA

SEQ ID NO: 5022 - protein, 23 aa, Human immunodeficiency virus 1
  source 1..23: note = HLAs: DRB1_0301 DRB1_0806 DRB1_1102 DRB1_1103 DRB1_1104 DRB1_1114 DRB1_1301 DRB1_1302 DRB1_1304 DRB1_1406 DQA10102-DQB10501
PRRKAKIIRDYGKQMAGDDCVAG

SEQ ID NO: 5023 - protein, 24 aa, Human immunodeficiency virus 1
  source 1..24: note = HLAs: DRB1_0301 DRB1_0806 DRB1_1102 DRB1_1103 DRB1_1104 DRB1_1114 DRB1_1301 DRB1_1302 DRB1_1304 DRB1_1406 DQA10102-DQB10501
PRRKAKIIRDYGKQMAGDDCVAGR

SEQ ID NO: 5024 - protein, 25 aa, Human immunodeficiency virus 1
  source 1..25: note = HLAs: DRB1_0301 DRB1_0806 DRB1_1102 DRB1_1103 DRB1_1104 DRB1_1114 DRB1_1301 DRB1_1302 DRB1_1304 DRB1_1406 DQA10102-DQB10501
PRRKAKIIRDYGKQMAGDDCVAGRQ

SEQ ID NO: 5025 - protein, 19 aa, Human immunodeficiency virus 1
  source 1..19: note = HLAs: DRB1_0401 DRB1_0404 DRB1_0408 DRB1_0410 DRB1_1001 DQA10102-DQB10501
PSINNETPGIRYQYNVLPQ

SEQ ID NO: 5026 - protein, 20 aa, Human immunodeficiency virus 1
  source 1..20: note = HLAs: DRB1_0101 DRB1_0401 DRB1_0404 DRB1_0405 DRB1_0408 DRB1_0410 DRB1_0802 DRB1_0809 DRB1_0813 DRB1_1001 DRB1_1114 DRB1_1302 DRB1_1406 DRB1_1501 DRB1_1502 DRB1_1602 DPA10301-DPB10101 DPA10301-DPB10201 DPA10301-DPB10202 DPA10301-DPB110601 DPA10401-DPB10101 DQA10102-DQB10501 DQA10102-DQB10503 DQA10103-DQB10501
PSINNETPGIRYQYNVLPQG

SEQ ID NO: 5027 - protein, 21 aa, Human immunodeficiency virus 1
  source 1..21: note = HLAs: DRB1_0101 DRB1_0401 DRB1_0404 DRB1_0405 DRB1_0408 DRB1_0410 DRB1_0813 DRB1_1001 DRB1_1114 DRB1_1302 DRB1_1406 DRB1_1501 DRB1_1602 DPA10301-DPB10101 DPA10401-DPB10101 DQA10102-DQB10501 DQA10103-DQB10501
PSINNETPGIRYQYNVLPQGW

SEQ ID NO: 5028 - protein, 22 aa, Human immunodeficiency virus 1
  source 1..22: note = HLAs: DRB1_0101 DRB1_0401 DRB1_0404 DRB1_0405 DRB1_0408 DRB1_0410 DRB1_0802 DRB1_0809 DRB1_0813 DRB1_1001 DRB1_1102 DRB1_1114 DRB1_1301 DRB1_1302 DRB1_1304 DRB1_1402 DRB1_1406 DRB1_1501 DRB1_1602 DPA10301-DPB10101 DPA10301-DPB10201 DPA10301-DPB10202 DPA10301-DPB110601 DPA10401-DPB10101 DQA10102-DQB10501 DQA10102-DQB10503 DQA10103-DQB10501
PSINNETPGIRYQYNVLPQGWK

SEQ ID NO: 5029 - protein, 23 aa, Human immunodeficiency virus 1
  source 1..23: note = HLAs: DRB1_0101 DRB1_0102 DRB1_0401 DRB1_0404 DRB1_0405 DRB1_0408 DRB1_0410 DRB1_0801 DRB1_0802 DRB1_0809 DRB1_0813 DRB1_1001 DRB1_1101 DRB1_1102 DRB1_1114 DRB1_1301 DRB1_1302 DRB1_1304 DRB1_1305 DRB1_1402 DRB1_1406 DRB1_1501 DRB1_1502 DRB1_1602 DPA10301-DPB10101 DPA10301-DPB10201 DPA10301-DPB10202 DPA10301-DPB110601 DPA10401-DPB10101 DQA10102-DQB10501 DQA10102-DQB10503 DQA10103-DQB10501
PSINNETPGIRYQYNVLPQGWKG

SEQ ID NO: 5030 - protein, 24 aa, Human immunodeficiency virus 1
  source 1..24: note = HLAs: DRB1_0101 DRB1_0102 DRB1_0401 DRB1_0404 DRB1_0405 DRB1_0408 DRB1_0410 DRB1_0801 DRB1_0802 DRB1_0806 DRB1_0809 DRB1_0813 DRB1_1001 DRB1_1101 DRB1_1102 DRB1_1104 DRB1_1114 DRB1_1301 DRB1_1302 DRB1_1304 DRB1_1305 DRB1_1402 DRB1_1406 DRB1_1501 DRB1_1502 DRB1_1601 DRB1_1602 DPA10301-DPB10101 DPA10301-DPB10201 DPA10301-DPB10202 DPA10301-DPB110601 DPA10301-DPB11801 DPA10401-DPB10101 DQA10102-DQB10501 DQA10102-DQB10503 DQA10103-DQB10501
PSINNETPGIRYQYNVLPQGWKGS

SEQ ID NO: 5031 - protein, 25 aa, Human immunodeficiency virus 1
  source 1..25: note = HLAs: DRB1_0101 DRB1_0102 DRB1_0401 DRB1_0404 DRB1_0405 DRB1_0408 DRB1_0410 DRB1_0801 DRB1_0802 DRB1_0806 DRB1_0809 DRB1_0813 DRB1_1001 DRB1_1101 DRB1_1102 DRB1_1104 DRB1_1114 DRB1_1301 DRB1_1302 DRB1_1304 DRB1_1305 DRB1_1402 DRB1_1406 DRB1_1501 DRB1_1502 DRB1_1601 DRB1_1602 DPA10301-DPB10101 DPA10301-DPB10201 DPA10301-DPB10202 DPA10301-DPB110601 DPA10301-DPB11801 DPA10401-DPB10101 DQA10102-DQB10501 DQA10102-DQB10503 DQA10103-DQB10501
PSINNETPGIRYQYNVLPQGWKGSP

SEQ ID NO: 5032 - protein, 13 aa, Human immunodeficiency virus 1
  source 1..13: note = HLAs: DRB1_1103 DRB1_1104
PVFAIKKKDSTKW

SEQ ID NO: 5033 - protein, 14 aa, Human immunodeficiency virus 1
  source 1..14: note = HLAs: DRB1_0804 DRB1_0806 DRB1_1101 DRB1_1102 DRB1_1103 DRB1_1104 DRB1_1301 DRB1_1304 DRB1_1305
PVFAIKKKDSTKWR

SEQ ID NO: 5034 - protein, 15 aa, Human immunodeficiency virus 1
  source 1..15: note = HLAs: DRB1_0801 DRB1_0804 DRB1_0806 DRB1_1101 DRB1_1102 DRB1_1103 DRB1_1104 DRB1_1301 DRB1_1304 DRB1_1305 DRB1_1406
PVFAIKKKDSTKWRK

SEQ ID NO: 5035 - protein, 16 aa, Human immunodeficiency virus 1
  source 1..16: note = HLAs: DRB1_0804 DRB1_0806 DRB1_1101 DRB1_1102 DRB1_1103 DRB1_1104 DRB1_1301 DRB1_1304 DRB1_1305 DRB1_1406
PVFAIKKKDSTKWRKL

SEQ ID NO: 5036 - protein, 17 aa, Human immunodeficiency virus 1
  source 1..17: note = HLAs: DRB1_0804 DRB1_0806 DRB1_1101 DRB1_1102 DRB1_1103 DRB1_1104 DRB1_1301 DRB1_1304 DRB1_1305 DRB1_1406
PVFAIKKKDSTKWRKLV

SEQ ID NO: 5037 - protein, 18 aa, Human immunodeficiency virus 1
  source 1..18: note = HLAs: DRB1_1103 DRB1_1104
PVFAIKKKDSTKWRKLVD

SEQ ID NO: 5038 - protein, 19 aa, Human immunodeficiency virus 1
  source 1..19: note = HLAs: DRB1_0804 DRB1_0806 DRB1_1101 DRB1_1102 DRB1_1103 DRB1_1104 DRB1_1301 DRB1_1304 DRB1_1305
PVFAIKKKDSTKWRKLVDF

SEQ ID NO: 5039 - protein, 20 aa, Human immunodeficiency virus 1
  source 1..20: note = HLAs: DRB1_0801 DRB1_0804 DRB1_0806 DRB1_1101 DRB1_1102 DRB1_1103 DRB1_1104 DRB1_1301 DRB1_1304 DRB1_1305 DRB1_1406 DPA10202-DPB110601 DPA10202-DPB11901 DPA10202-DPB13101 DPA10301-DPB110601
PVFAIKKKDSTKWRKLVDFR

SEQ ID NO: 5040 - protein, 21 aa, Human immunodeficiency virus 1
  source 1..21: note = HLAs: DRB1_0804 DRB1_0806 DRB1_1101 DRB1_1102 DRB1_1103 DRB1_1104 DRB1_1301 DRB1_1304 DRB1_1305 DPA10202-DPB13101
PVFAIKKKDSTKWRKLVDFRE

SEQ ID NO: 5041 - protein, 22 aa, Human immunodeficiency virus 1
  source 1..22: note = HLAs: DRB1_0410 DRB1_0804 DRB1_0806 DRB1_1101 DRB1_1102 DRB1_1103 DRB1_1104 DRB1_1301 DRB1_1304 DRB1_1305 DRB1_1406 DPA10103-DPB10101 DPA10103-DPB10201 DPA10103-DPB10202 DPA10103-DPB11501 DPA10103-DPB11601 DPA10103-DPB11901 DPA10103-DPB13101 DPA10103-DPB13401 DPA10103-DPB14801 DPA10103-DPB15001 DPA10104-DPB10101 DPA10104-DPB11501 DPA10105-DPB10101 DPA10105-DPB15001 DPA10201-DPB110601 DPA10201-DPB11601 DPA10201-DPB11901 DPA10202-DPB10101 DPA10202-DPB10501 DPA10202-DPB110601 DPA10202-DPB11901 DPA10202-DPB13101 DPA10202-DPB13801 DPA10202-DPB16501 DPA10301-DPB10101 DPA10301-DPB10201 DPA10301-DPB10202 DPA10301-DPB10401 DPA10301-DPB110601 DPA10301-DPB11801 DPA10301-DPB12301 DPA10301-DPB13901 DPA10301-DPB14001 DPA10301-DPB16501 DPA10401-DPB10101 DPA10401-DPB10201 DPA10401-DPB10202 DPA10401-DPB10501
PVFAIKKKDSTKWRKLVDFREL

SEQ ID NO: 5042 - protein, 23 aa, Human immunodeficiency virus 1
  source 1..23: note = HLAs: DRB1_0405 DRB1_0410 DRB1_0801 DRB1_0804 DRB1_0806 DRB1_1101 DRB1_1102 DRB1_1103 DRB1_1104 DRB1_1301 DRB1_1304 DRB1_1305 DRB1_1406 DPA10103-DPB10101 DPA10103-DPB10201 DPA10103-DPB10202 DPA10103-DPB10501 DPA10103-DPB11501 DPA10103-DPB11601 DPA10103-DPB11901 DPA10103-DPB13101 DPA10103-DPB13401 DPA10103-DPB14001 DPA10103-DPB14101 DPA10103-DPB14801 DPA10103-DPB15001 DPA10104-DPB10101 DPA10104-DPB11501 DPA10105-DPB10101 DPA10105-DPB15001 DPA10201-DPB110601 DPA10201-DPB11501 DPA10201-DPB11601 DPA10201-DPB11901 DPA10202-DPB10101 DPA10202-DPB10501 DPA10202-DPB110601 DPA10202-DPB11901 DPA10202-DPB13101 DPA10202-DPB13801 DPA10202-DPB16501 DPA10301-DPB10101 DPA10301-DPB10201 DPA10301-DPB10202 DPA10301-DPB10401 DPA10301-DPB110601 DPA10301-DPB11801 DPA10301-DPB12301 DPA10301-DPB13901 DPA10301-DPB14001 DPA10301-DPB16501 DPA10401-DPB10101 DPA10401-DPB10201 DPA10401-DPB10202 DPA10401-DPB10501
PVFAIKKKDSTKWRKLVDFRELN

SEQ ID NO: 5043 - protein, 24 aa, Human immunodeficiency virus 1
  source 1..24: note = HLAs: DRB1_0405 DRB1_0410 DRB1_0801 DRB1_0804 DRB1_0806 DRB1_1001 DRB1_1101 DRB1_1102 DRB1_1103 DRB1_1104 DRB1_1301 DRB1_1304 DRB1_1305 DRB1_1406 DPA10103-DPB10101 DPA10103-DPB10201 DPA10103-DPB10202 DPA10103-DPB10501 DPA10103-DPB11501 DPA10103-DPB11601 DPA10103-DPB11901 DPA10103-DPB13101 DPA10103-DPB13401 DPA10103-DPB14001 DPA10103-DPB14101 DPA10103-DPB14801 DPA10103-DPB15001 DPA10104-DPB10101 DPA10104-DPB11501 DPA10105-DPB10101 DPA10105-DPB15001 DPA10106-DPB10101 DPA10201-DPB10101 DPA10201-DPB110601 DPA10201-DPB11501 DPA10201-DPB11601 DPA10201-DPB11901 DPA10202-DPB10101 DPA10202-DPB10202 DPA10202-DPB10501 DPA10202-DPB110601 DPA10202-DPB11901 DPA10202-DPB13101 DPA10202-DPB13801 DPA10202-DPB16501 DPA10301-DPB10101 DPA10301-DPB10201 DPA10301-DPB10202 DPA10301-DPB10401 DPA10301-DPB110601 DPA10301-DPB11801 DPA10301-DPB12301 DPA10301-DPB13901 DPA10301-DPB14001 DPA10301-DPB15501 DPA10301-DPB16501 DPA10401-DPB10101 DPA10401-DPB10201 DPA10401-DPB10202 DPA10401-DPB10501
PVFAIKKKDSTKWRKLVDFRELNK

SEQ ID NO: 5044 - protein, 25 aa, Human immunodeficiency virus 1
  source 1..25: note = HLAs: DRB1_0405 DRB1_0410 DRB1_0801 DRB1_0804 DRB1_0806 DRB1_1001 DRB1_1101 DRB1_1102 DRB1_1103 DRB1_1104 DRB1_1301 DRB1_1304 DRB1_1305 DRB1_1406 DPA10103-DPB10101 DPA10103-DPB10201 DPA10103-DPB10202 DPA10103-DPB10501 DPA10103-DPB11501 DPA10103-DPB11601 DPA10103-DPB11801 DPA10103-DPB11901 DPA10103-DPB13101 DPA10103-DPB13401 DPA10103-DPB14001 DPA10103-DPB14101 DPA10103-DPB14801 DPA10103-DPB15001 DPA10104-DPB10101 DPA10104-DPB11501 DPA10105-DPB10101 DPA10105-DPB11801 DPA10105-DPB15001 DPA10106-DPB10101 DPA10201-DPB10101 DPA10201-DPB10501 DPA10201-DPB110601 DPA10201-DPB11501 DPA10201-DPB11601 DPA10201-DPB11901 DPA10201-DPB13401 DPA10202-DPB10101 DPA10202-DPB10201 DPA10202-DPB10202 DPA10202-DPB10501 DPA10202-DPB110601 DPA10202-DPB11801 DPA10202-DPB11901 DPA10202-DPB13101 DPA10202-DPB13801 DPA10202-DPB15501 DPA10202-DPB16501 DPA10301-DPB10101 DPA10301-DPB10201 DPA10301-DPB10202 DPA10301-DPB10401 DPA10301-DPB10402 DPA10301-DPB110501 DPA10301-DPB110601 DPA10301-DPB11801 DPA10301-DPB12301; note = HLAs: DPA10301-DPB13901 DPA10301-DPB14001 DPA10301-DPB14901 DPA10301-DPB15501 DPA10301-DPB16501 DPA10301-DPB18001 DPA10401-DPB10101 DPA10401-DPB10201 DPA10401-DPB10202 DPA10401-DPB10501
PVFAIKKKDSTKWRKLVDFRELNKR

SEQ ID NO: 5045 - protein, 14 aa, Human immunodeficiency virus 1
  source 1..14: note = HLAs: DPA10103-DPB10201 DPA10103-DPB10202 DPA10103-DPB11501 DPA10103-DPB14801 DPA10104-DPB11501 DPA10301-DPB10201 DPA10301-DPB10202 DPA10301-DPB110601 DPA10301-DPB14001 DPA10401-DPB10201 DPA10401-DPB10202
PVGEIYKRWIILGL

SEQ ID NO: 5046 - protein, 15 aa, Human immunodeficiency virus 1
  source 1..15: note = HLAs: DRB1_0101 DRB1_0410 DRB1_0801 DRB1_0804 DRB1_0806 DRB1_1001 DRB1_1102 DRB1_1103 DRB1_1104 DRB1_1301 DRB1_1304 DRB1_1406 DRB1_1501 DRB1_1503 DRB1_1601 DPA10103-DPB10101 DPA10103-DPB10201 DPA10103-DPB10202 DPA10103-DPB10501 DPA10103-DPB10601 DPA10103-DPB11101 DPA10103-DPB11501 DPA10103-DPB11601 DPA10103-DPB11801 DPA10103-DPB11901 DPA10103-DPB12001 DPA10103-DPB13101 DPA10103-DPB13401 DPA10103-DPB14001 DPA10103-DPB14101 DPA10103-DPB14801 DPA10103-DPB15001 DPA10103-DPB15501 DPA10104-DPB10101 DPA10104-DPB11501 DPA10105-DPB10101 DPA10105-DPB11801 DPA10105-DPB15001 DPA10201-DPB110601 DPA10201-DPB11501 DPA10201-DPB11601 DPA10201-DPB11901 DPA10202-DPB10101 DPA10202-DPB10202 DPA10202-DPB110601 DPA10202-DPB11901 DPA10202-DPB16501 DPA10301-DPB10101 DPA10301-DPB10201 DPA10301-DPB10202 DPA10301-DPB10401 DPA10301-DPB10402 DPA10301-DPB110501 DPA10301-DPB110601 DPA10301-DPB11801 DPA10301-DPB12301 DPA10301-DPB13901 DPA10301-DPB14001 DPA10301-DPB14901 DPA10301-DPB15501 DPA10301-DPB16501; note = HLAs: DPA10301-DPB18001 DPA10401-DPB10101 DPA10401-DPB10201 DPA10401-DPB10202 DPA10401-DPB10301 DPA10401-DPB10501 DQA10102-DQB10501 DQA10103-DQB10501
PVGEIYKRWIILGLN

SEQ ID NO: 5047 - protein, 16 aa, Human immunodeficiency virus 1
  source 1..16: note = HLAs: DRB1_0801 DRB1_0804 DRB1_0806 DRB1_1001 DRB1_1104 DRB1_1304 DRB1_1501 DRB1_1601 DPA10103-DPB10101 DPA10103-DPB10201 DPA10103-DPB10202 DPA10103-DPB10301 DPA10103-DPB10501 DPA10103-DPB10601 DPA10103-DPB11101 DPA10103-DPB112401 DPA10103-DPB11301 DPA10103-DPB113101 DPA10103-DPB113301 DPA10103-DPB11401 DPA10103-DPB11501 DPA10103-DPB11601 DPA10103-DPB11701 DPA10103-DPB11801 DPA10103-DPB11901 DPA10103-DPB12001 DPA10103-DPB12101 DPA10103-DPB12901 DPA10103-DPB13001 DPA10103-DPB13101 DPA10103-DPB13401 DPA10103-DPB14001 DPA10103-DPB14101 DPA10103-DPB14801 DPA10103-DPB15001 DPA10103-DPB15501 DPA10104-DPB10101 DPA10104-DPB10301 DPA10104-DPB11301 DPA10104-DPB11501 DPA10105-DPB10101 DPA10105-DPB10301 DPA10105-DPB11801 DPA10105-DPB15001 DPA10106-DPB10101 DPA10201-DPB10101 DPA10201-DPB110601 DPA10201-DPB11501 DPA10201-DPB11601 DPA10201-DPB11901 DPA10202-DPB10101 DPA10202-DPB10201 DPA10202-DPB10202 DPA10202-DPB10501 DPA10202-DPB110601 DPA10202-DPB11101 DPA10202-DPB11901 DPA10202-DPB13101; note = HLAs: DPA10202-DPB13801 DPA10202-DPB15501 DPA10202-DPB16501 DPA10301-DPB10101 DPA10301-DPB10201 DPA10301-DPB10202 DPA10301-DPB10301 DPA10301-DPB10401 DPA10301-DPB10402 DPA10301-DPB110501 DPA10301-DPB110601 DPA10301-DPB11101 DPA10301-DPB11301 DPA10301-DPB11701 DPA10301-DPB11801 DPA10301-DPB12301 DPA10301-DPB13901 DPA10301-DPB14001 DPA10301-DPB14901 DPA10301-DPB15501 DPA10301-DPB16501 DPA10301-DPB17501 DPA10301-DPB18001 DPA10401-DPB10101 DPA10401-DPB10201 DPA10401-DPB10202 DPA10401-DPB10301 DPA10401-DPB10501 DPA10401-DPB11301 DPA10401-DPB113301 DPA10401-DPB11401 DQA10102-DQB10501 DQA10103-DQB10501
PVGEIYKRWIILGLNK

SEQ ID NO: 5048 - protein, 17 aa, Human immunodeficiency virus 1
  source 1..17: note = HLAs: DRB1_0101 DRB1_0404 DRB1_0405 DRB1_0408 DRB1_0410 DRB1_0701 DRB1_0801 DRB1_0802 DRB1_0804 DRB1_0806 DRB1_0809 DRB1_0813 DRB1_0901 DRB1_1001 DRB1_1101 DRB1_1102 DRB1_1103 DRB1_1104 DRB1_1114 DRB1_1301 DRB1_1302 DRB1_1304 DRB1_1305 DRB1_1406 DRB1_1501 DRB1_1502 DRB1_1503 DRB1_1601 DRB1_1602 DPA10103-DPB10101 DPA10103-DPB10201 DPA10103-DPB10202 DPA10103-DPB10301 DPA10103-DPB10401 DPA10103-DPB10501 DPA10103-DPB10601 DPA10103-DPB11101 DPA10103-DPB112401 DPA10103-DPB112601 DPA10103-DPB11301 DPA10103-DPB113101 DPA10103-DPB113301 DPA10103-DPB11401 DPA10103-DPB11501 DPA10103-DPB11601 DPA10103-DPB11701 DPA10103-DPB11801 DPA10103-DPB11901 DPA10103-DPB12001 DPA10103-DPB12101 DPA10103-DPB12301 DPA10103-DPB12901 DPA10103-DPB13001 DPA10103-DPB13101 DPA10103-DPB13401 DPA10103-DPB13901 DPA10103-DPB14001 DPA10103-DPB14101 DPA10103-DPB14801 DPA10103-DPB15001 DPA10103-DPB15501 DPA10103-DPB15901 DPA10104-DPB10101 DPA10104-DPB10301 DPA10104-DPB11301 DPA10104-DPB11501 DPA10105-DPB10101; note = HLAs: DPA10105-DPB10301 DPA10105-DPB10401 DPA10105-DPB11801 DPA10105-DPB15001 DPA10106-DPB10101 DPA10106-DPB11101 DPA10201-DPB10101 DPA10201-DPB10201 DPA10201-DPB10202 DPA10201-DPB10301 DPA10201-DPB10501 DPA10201-DPB10601 DPA10201-DPB110601 DPA10201-DPB11101 DPA10201-DPB11501 DPA10201-DPB11601 DPA10201-DPB11901 DPA10201-DPB13001 DPA10201-DPB14501 DPA10201-DPB15501 DPA10201-DPB19101 DPA10202-DPB10101 DPA10202-DPB10201 DPA10202-DPB10202 DPA10202-DPB10301 DPA10202-DPB10401 DPA10202-DPB10501 DPA10202-DPB110001 DPA10202-DPB110601 DPA10202-DPB11101 DPA10202-DPB11301 DPA10202-DPB113101 DPA10202-DPB11701 DPA10202-DPB11801 DPA10202-DPB11901 DPA10202-DPB12101 DPA10202-DPB12901 DPA10202-DPB13001 DPA10202-DPB13101 DPA10202-DPB13801 DPA10202-DPB14501 DPA10202-DPB15501 DPA10202-DPB16501 DPA10202-DPB18501 DPA10301-DPB10101 DPA10301-DPB10201 DPA10301-DPB10202 DPA10301-DPB10301 DPA10301-DPB10401 DPA10301-DPB10402 DPA10301-DPB10901 DPA10301-DPB110501 DPA10301-DPB110601 DPA10301-DPB11101; note = HLAs: DPA10301-DPB11301 DPA10301-DPB11701 DPA10301-DPB11801 DPA10301-DPB12301 DPA10301-DPB13901 DPA10301-DPB14001 DPA10301-DPB14901 DPA10301-DPB15501 DPA10301-DPB16501 DPA10301-DPB17501 DPA10301-DPB18001 DPA10401-DPB10101 DPA10401-DPB10201 DPA10401-DPB10202 DPA10401-DPB10301 DPA10401-DPB10402 DPA10401-DPB10501 DPA10401-DPB110501 DPA10401-DPB11301 DPA10401-DPB113301 DPA10401-DPB11401 DPA10401-DPB14901 DQA10102-DQB10501 DQA10103-DQB10501
PVGEIYKRWIILGLNKI

SEQ ID NO: 5049 - protein, 18 aa, Human immunodeficiency virus 1
  source 1..18: note = HLAs: DRB1_0101 DRB1_0405 DRB1_0408 DRB1_0701 DRB1_0813 DRB1_0901 DRB1_1001 DRB1_1102 DRB1_1114 DRB1_1301 DRB1_1302 DRB1_1406 DRB1_1501 DRB1_1502 DRB1_1601 DRB1_1602 DPA10103-DPB10101 DPA10103-DPB10201 DPA10103-DPB10202 DPA10103-DPB10301 DPA10103-DPB10401 DPA10103-DPB10501 DPA10103-DPB10601 DPA10103-DPB11101 DPA10103-DPB112401 DPA10103-DPB112601 DPA10103-DPB11501 DPA10103-DPB11601 DPA10103-DPB11801 DPA10103-DPB11901 DPA10103-DPB12001 DPA10103-DPB12301 DPA10103-DPB13101 DPA10103-DPB13401 DPA10103-DPB13901 DPA10103-DPB14001 DPA10103-DPB14101 DPA10103-DPB14801 DPA10103-DPB15001 DPA10103-DPB15501 DPA10104-DPB10101 DPA10104-DPB10301 DPA10104-DPB11501 DPA10105-DPB10101 DPA10105-DPB10301 DPA10105-DPB10401 DPA10105-DPB11801 DPA10105-DPB15001 DPA10106-DPB10101 DPA10201-DPB10101 DPA10201-DPB10202 DPA10201-DPB110601 DPA10201-DPB11501 DPA10201-DPB11601 DPA10201-DPB11901 DPA10202-DPB10101 DPA10202-DPB10201 DPA10202-DPB10202 DPA10202-DPB10501 DPA10202-DPB110601 DPA10202-DPB11101 DPA10202-DPB11901; note = HLAs: DPA10202-DPB13101 DPA10202-DPB13801 DPA10202-DPB15501 DPA10202-DPB16501 DPA10301-DPB10101 DPA10301-DPB10201 DPA10301-DPB10202 DPA10301-DPB10401 DPA10301-DPB10402 DPA10301-DPB110501 DPA10301-DPB110601 DPA10301-DPB11101 DPA10301-DPB11301 DPA10301-DPB11701 DPA10301-DPB11801 DPA10301-DPB12301 DPA10301-DPB13901 DPA10301-DPB14001 DPA10301-DPB14901 DPA10301-DPB15501 DPA10301-DPB16501 DPA10301-DPB17501 DPA10301-DPB18001 DPA10401-DPB10101 DPA10401-DPB10201 DPA10401-DPB10202 DPA10401-DPB10301 DPA10401-DPB10402 DPA10401-DPB10501 DPA10401-DPB110501 DPA10401-DPB11301 DPA10401-DPB113301 DPA10401-DPB11401 DPA10401-DPB14901 DQA10102-DQB10501 DQA10103-DQB10501
PVGEIYKRWIILGLNKIV

SEQ ID NO: 5050 - protein, 19 aa, Human immunodeficiency virus 1
  source 1..19: note = HLAs: DRB1_0101 DRB1_0102 DRB1_0401 DRB1_0404 DRB1_0405 DRB1_0408 DRB1_0410 DRB1_0701 DRB1_0801 DRB1_0802 DRB1_0803 DRB1_0804 DRB1_0806 DRB1_0809 DRB1_0813 DRB1_0901 DRB1_1001 DRB1_1101 DRB1_1102 DRB1_1103 DRB1_1104 DRB1_1114 DRB1_1201 DRB1_1202 DRB1_1301 DRB1_1302 DRB1_1303 DRB1_1304 DRB1_1305 DRB1_1312 DRB1_1401 DRB1_1402 DRB1_1403 DRB1_1404 DRB1_1405 DRB1_1406 DRB1_1407 DRB1_1454 DRB1_1501 DRB1_1502 DRB1_1503 DRB1_1601 DRB1_1602 DPA10103-DPB10101 DPA10103-DPB10201 DPA10103-DPB10202 DPA10103-DPB10301 DPA10103-DPB10401 DPA10103-DPB10501 DPA10103-DPB10601 DPA10103-DPB10901 DPA10103-DPB11001 DPA10103-DPB11101 DPA10103-DPB112401 DPA10103-DPB112601 DPA10103-DPB11301 DPA10103-DPB113101 DPA10103-DPB113301 DPA10103-DPB11401 DPA10103-DPB11501 DPA10103-DPB11601 DPA10103-DPB11701 DPA10103-DPB11801 DPA10103-DPB11901 DPA10103-DPB12001 DPA10103-DPB12101 DPA10103-DPB12301 DPA10103-DPB12901 DPA10103-DPB13001 DPA10103-DPB13101 DPA10103-DPB13401 DPA10103-DPB13901 DPA10103-DPB14001 DPA10103-DPB14101; note = HLAs: DPA10103-DPB14801 DPA10103-DPB15001 DPA10103-DPB15501 DPA10103-DPB15901 DPA10104-DPB10101 DPA10104-DPB10301 DPA10104-DPB11001 DPA10104-DPB11301 DPA10104-DPB11501 DPA10105-DPB10101 DPA10105-DPB10301 DPA10105-DPB10401 DPA10105-DPB11801 DPA10105-DPB15001 DPA10106-DPB10101 DPA10106-DPB11101 DPA10201-DPB10101 DPA10201-DPB10201 DPA10201-DPB10202 DPA10201-DPB10501 DPA10201-DPB110601 DPA10201-DPB11101 DPA10201-DPB11301 DPA10201-DPB113301 DPA10201-DPB11501 DPA10201-DPB11601 DPA10201-DPB11801 DPA10201-DPB11901 DPA10201-DPB13001 DPA10201-DPB15501 DPA10201-DPB19101 DPA10202-DPB10101 DPA10202-DPB10201 DPA10202-DPB10202 DPA10202-DPB10401 DPA10202-DPB10501 DPA10202-DPB110001 DPA10202-DPB110601 DPA10202-DPB11101 DPA10202-DPB11301 DPA10202-DPB113101 DPA10202-DPB11701 DPA10202-DPB11801 DPA10202-DPB11901 DPA10202-DPB12101 DPA10202-DPB12901 DPA10202-DPB13001 DPA10202-DPB13101 DPA10202-DPB13801 DPA10202-DPB15501 DPA10202-DPB16501 DPA10202-DPB18501 DPA10301-DPB10101 DPA10301-DPB10201; note = HLAs: DPA10301-DPB10202 DPA10301-DPB10301 DPA10301-DPB10401 DPA10301-DPB10402 DPA10301-DPB10901 DPA10301-DPB110501 DPA10301-DPB110601 DPA10301-DPB11101 DPA10301-DPB11301 DPA10301-DPB11701 DPA10301-DPB11801 DPA10301-DPB12301 DPA10301-DPB13901 DPA10301-DPB14001 DPA10301-DPB14901 DPA10301-DPB15501 DPA10301-DPB16501 DPA10301-DPB17501 DPA10301-DPB18001 DPA10401-DPB10101 DPA10401-DPB10201 DPA10401-DPB10202 DPA10401-DPB10301 DPA10401-DPB10402 DPA10401-DPB10501 DPA10401-DPB110501 DPA10401-DPB11301 DPA10401-DPB113301 DPA10401-DPB11401 DPA10401-DPB14901 DQA10102-DQB10501 DQA10102-DQB10503 DQA10103-DQB10501 DQA10103-DQB10609
PVGEIYKRWIILGLNKIVR

SEQ ID NO: 5051 - protein, 20 aa, Human immunodeficiency virus 1
  source 1..20: note = HLAs: DRB1_0101 DRB1_0102 DRB1_0103 DRB1_0401 DRB1_0402 DRB1_0404 DRB1_0405 DRB1_0408 DRB1_0410 DRB1_0701 DRB1_0801 DRB1_0802 DRB1_0803 DRB1_0804 DRB1_0806 DRB1_0809 DRB1_0813 DRB1_0901 DRB1_1001 DRB1_1101 DRB1_1102 DRB1_1103 DRB1_1104 DRB1_1114 DRB1_1201 DRB1_1202 DRB1_1301 DRB1_1302 DRB1_1303 DRB1_1304 DRB1_1305 DRB1_1312 DRB1_1401 DRB1_1402 DRB1_1403 DRB1_1404 DRB1_1405 DRB1_1406 DRB1_1407 DRB1_1418 DRB1_1454 DRB1_1501 DRB1_1502 DRB1_1503 DRB1_1601 DRB1_1602 DPA10103-DPB10101 DPA10103-DPB10201 DPA10103-DPB10202 DPA10103-DPB10301 DPA10103-DPB10401 DPA10103-DPB10402 DPA10103-DPB10501 DPA10103-DPB10601 DPA10103-DPB10901 DPA10103-DPB11001 DPA10103-DPB110501 DPA10103-DPB11101 DPA10103-DPB112401 DPA10103-DPB112601 DPA10103-DPB11301 DPA10103-DPB113101 DPA10103-DPB113301 DPA10103-DPB11401 DPA10103-DPB11501 DPA10103-DPB11601 DPA10103-DPB11701 DPA10103-DPB11801 DPA10103-DPB11901 DPA10103-DPB12001 DPA10103-DPB12101 DPA10103-DPB12301 DPA10103-DPB12901 DPA10103-DPB13001 DPA10103-DPB13101; note = HLAs: DPA10103-DPB13401 DPA10103-DPB13901 DPA10103-DPB14001 DPA10103-DPB14101 DPA10103-DPB14801 DPA10103-DPB14901 DPA10103-DPB15001 DPA10103-DPB15101 DPA10103-DPB15501 DPA10103-DPB15901 DPA10103-DPB18001 DPA10104-DPB10101 DPA10104-DPB10301 DPA10104-DPB11001 DPA10104-DPB11301 DPA10104-DPB11501 DPA10105-DPB10101 DPA10105-DPB10301 DPA10105-DPB10401 DPA10105-DPB11801 DPA10105-DPB15001 DPA10106-DPB10101 DPA10106-DPB11101 DPA10201-DPB10101 DPA10201-DPB10201 DPA10201-DPB10202 DPA10201-DPB10501 DPA10201-DPB10601 DPA10201-DPB10901 DPA10201-DPB110601 DPA10201-DPB11101 DPA10201-DPB11301 DPA10201-DPB113101 DPA10201-DPB113301 DPA10201-DPB11501 DPA10201-DPB11601 DPA10201-DPB11701 DPA10201-DPB11801 DPA10201-DPB11901 DPA10201-DPB13001 DPA10201-DPB13401 DPA10201-DPB15501 DPA10201-DPB19101 DPA10202-DPB10101 DPA10202-DPB10201 DPA10202-DPB10202 DPA10202-DPB10301 DPA10202-DPB10401 DPA10202-DPB10402 DPA10202-DPB10501 DPA10202-DPB10901 DPA10202-DPB110001 DPA10202-DPB110501 DPA10202-DPB110601; note = HLAs: DPA10202-DPB11101 DPA10202-DPB11301 DPA10202-DPB113101 DPA10202-DPB11701 DPA10202-DPB11801 DPA10202-DPB11901 DPA10202-DPB12101 DPA10202-DPB12901 DPA10202-DPB13001 DPA10202-DPB13101 DPA10202-DPB13801 DPA10202-DPB14501 DPA10202-DPB15501 DPA10202-DPB16501 DPA10202-DPB18501 DPA10301-DPB10101 DPA10301-DPB10201 DPA10301-DPB10202 DPA10301-DPB10301 DPA10301-DPB10401 DPA10301-DPB10402 DPA10301-DPB10901 DPA10301-DPB110501 DPA10301-DPB110601 DPA10301-DPB11101 DPA10301-DPB11301 DPA10301-DPB11701 DPA10301-DPB11801 DPA10301-DPB12301 DPA10301-DPB13901 DPA10301-DPB14001 DPA10301-DPB14901 DPA10301-DPB15501 DPA10301-DPB16501 DPA10301-DPB17501 DPA10301-DPB18001 DPA10401-DPB10101 DPA10401-DPB10201 DPA10401-DPB10202 DPA10401-DPB10301 DPA10401-DPB10402 DPA10401-DPB10501 DPA10401-DPB110501 DPA10401-DPB11301 DPA10401-DPB113301 DPA10401-DPB11401 DPA10401-DPB14901 DQA10102-DQB10501 DQA10102-DQB10503 DQA10102-DQB10609 DQA10103-DQB10501 DQA10103-DQB10503 DQA10103-DQB10601 DQA10103-DQB10602; note = HLAs: DQA10103-DQB10608 DQA10103-DQB10609
PVGEIYKRWIILGLNKIVRM

SEQ ID NO: 5052 - protein, 21 aa, Human immunodeficiency virus 1
  source 1..21: note = HLAs: DRB1_0101 DRB1_0102 DRB1_0401 DRB1_0404 DRB1_0405 DRB1_0408 DRB1_0410 DRB1_0701 DRB1_0801 DRB1_0802 DRB1_0803 DRB1_0804 DRB1_0806 DRB1_0809 DRB1_0813 DRB1_0901 DRB1_1001 DRB1_1101 DRB1_1102 DRB1_1103 DRB1_1104 DRB1_1114 DRB1_1201 DRB1_1202 DRB1_1301 DRB1_1302 DRB1_1303 DRB1_1304 DRB1_1305 DRB1_1312 DRB1_1401 DRB1_1402 DRB1_1403 DRB1_1404 DRB1_1405 DRB1_1406 DRB1_1407 DRB1_1418 DRB1_1454 DRB1_1501 DRB1_1502 DRB1_1503 DRB1_1601 DRB1_1602 DPA10103-DPB10101 DPA10103-DPB10201 DPA10103-DPB10202 DPA10103-DPB10301 DPA10103-DPB10501 DPA10103-DPB10601 DPA10103-DPB11101 DPA10103-DPB112401 DPA10103-DPB11301 DPA10103-DPB113101 DPA10103-DPB113301 DPA10103-DPB11401 DPA10103-DPB11501 DPA10103-DPB11601 DPA10103-DPB11701 DPA10103-DPB11801 DPA10103-DPB11901 DPA10103-DPB12001 DPA10103-DPB12101 DPA10103-DPB13001 DPA10103-DPB13101 DPA10103-DPB13401 DPA10103-DPB14001 DPA10103-DPB14101 DPA10103-DPB14801 DPA10103-DPB15001 DPA10103-DPB15501 DPA10104-DPB10101 DPA10104-DPB10301 DPA10104-DPB11301; note = HLAs: DPA10104-DPB11501 DPA10105-DPB10101 DPA10105-DPB10301 DPA10105-DPB11801 DPA10105-DPB15001 DPA10106-DPB10101 DPA10201-DPB10101 DPA10201-DPB10501 DPA10201-DPB110601 DPA10201-DPB11501 DPA10201-DPB11601 DPA10201-DPB11901 DPA10202-DPB10101 DPA10202-DPB10201 DPA10202-DPB10202 DPA10202-DPB10501 DPA10202-DPB110601 DPA10202-DPB11101 DPA10202-DPB11301 DPA10202-DPB11801 DPA10202-DPB11901 DPA10202-DPB12101 DPA10202-DPB13001 DPA10202-DPB13101 DPA10202-DPB13801 DPA10202-DPB15501 DPA10202-DPB16501 DPA10301-DPB10101 DPA10301-DPB10201 DPA10301-DPB10202 DPA10301-DPB10401 DPA10301-DPB10402 DPA10301-DPB10901 DPA10301-DPB110501 DPA10301-DPB110601 DPA10301-DPB11101 DPA10301-DPB11301 DPA10301-DPB11701 DPA10301-DPB11801 DPA10301-DPB12301 DPA10301-DPB13901 DPA10301-DPB14001 DPA10301-DPB14901 DPA10301-DPB15501 DPA10301-DPB16501 DPA10301-DPB17501 DPA10301-DPB18001 DPA10401-DPB10101 DPA10401-DPB10201 DPA10401-DPB10202 DPA10401-DPB10301 DPA10401-DPB10402 DPA10401-DPB10501 DPA10401-DPB110501; note = HLAs: DPA10401-DPB11301 DPA10401-DPB113301 DPA10401-DPB11401 DPA10401-DPB14901 DQA10102-DQB10501 DQA10102-DQB10503 DQA10103-DQB10501 DQA10103-DQB10609
PVGEIYKRWIILGLNKIVRMY

SEQ ID NO: 5053 - protein, 22 aa, Human immunodeficiency virus 1
  source 1..22: note = HLAs: DRB1_0101 DRB1_0102 DRB1_0301 DRB1_0401 DRB1_0404 DRB1_0405 DRB1_0408 DRB1_0410 DRB1_0701 DRB1_0801 DRB1_0802 DRB1_0803 DRB1_0804 DRB1_0806 DRB1_0809 DRB1_0813 DRB1_0901 DRB1_1001 DRB1_1101 DRB1_1102 DRB1_1103 DRB1_1104 DRB1_1114 DRB1_1201 DRB1_1202 DRB1_1301 DRB1_1302 DRB1_1303 DRB1_1304 DRB1_1305 DRB1_1312 DRB1_1401 DRB1_1402 DRB1_1403 DRB1_1404 DRB1_1405 DRB1_1406 DRB1_1407 DRB1_1418 DRB1_1454 DRB1_1501 DRB1_1502 DRB1_1503 DRB1_1601 DRB1_1602 DPA10103-DPB10101 DPA10103-DPB10201 DPA10103-DPB10202 DPA10103-DPB10301 DPA10103-DPB10501 DPA10103-DPB10601 DPA10103-DPB11101 DPA10103-DPB112401 DPA10103-DPB11301 DPA10103-DPB113101 DPA10103-DPB113301 DPA10103-DPB11401 DPA10103-DPB11501 DPA10103-DPB11601 DPA10103-DPB11701 DPA10103-DPB11801 DPA10103-DPB11901 DPA10103-DPB12001 DPA10103-DPB12101 DPA10103-DPB13001 DPA10103-DPB13101 DPA10103-DPB13401 DPA10103-DPB14001 DPA10103-DPB14101 DPA10103-DPB14801 DPA10103-DPB15001 DPA10103-DPB15501 DPA10104-DPB10101 DPA10104-DPB10301 DPA10104-DPB11301; note = HLAs: DPA10104-DPB11501 DPA10105-DPB10101 DPA10105-DPB10301 DPA10105-DPB11801 DPA10105-DPB15001 DPA10106-DPB10101 DPA10201-DPB10101 DPA10201-DPB10501 DPA10201-DPB110601 DPA10201-DPB11501 DPA10201-DPB11601 DPA10201-DPB11901 DPA10201-DPB15501 DPA10202-DPB10101 DPA10202-DPB10201 DPA10202-DPB10202 DPA10202-DPB10501 DPA10202-DPB110601 DPA10202-DPB11101 DPA10202-DPB11301 DPA10202-DPB11801 DPA10202-DPB11901 DPA10202-DPB12101 DPA10202-DPB13001 DPA10202-DPB13101 DPA10202-DPB13801 DPA10202-DPB15501 DPA10202-DPB16501 DPA10301-DPB10101 DPA10301-DPB10201 DPA10301-DPB10202 DPA10301-DPB10401 DPA10301-DPB10402 DPA10301-DPB10901 DPA10301-DPB110501 DPA10301-DPB110601 DPA10301-DPB11101 DPA10301-DPB11301 DPA10301-DPB11701 DPA10301-DPB11801 DPA10301-DPB12301 DPA10301-DPB13901 DPA10301-DPB14001 DPA10301-DPB14901 DPA10301-DPB15501 DPA10301-DPB16501 DPA10301-DPB17501 DPA10301-DPB18001 DPA10401-DPB10101 DPA10401-DPB10201 DPA10401-DPB10202 DPA10401-DPB10301 DPA10401-DPB10402 DPA10401-DPB10501; note = HLAs: DPA10401-DPB110501 DPA10401-DPB11301 DPA10401-DPB113301 DPA10401-DPB11401 DPA10401-DPB14901 DQA10102-DQB10501 DQA10102-DQB10503 DQA10103-DQB10501 DQA10103-DQB10609
PVGEIYKRWIILGLNKIVRMYS

SEQ ID NO: 5054 - protein, 23 aa, Human immunodeficiency virus 1
  source 1..23: note = HLAs: DRB1_0101 DRB1_0102 DRB1_0301 DRB1_0401 DRB1_0404 DRB1_0405 DRB1_0408 DRB1_0410 DRB1_0701 DRB1_0801 DRB1_0802 DRB1_0803 DRB1_0804 DRB1_0806 DRB1_0809 DRB1_0813 DRB1_0901 DRB1_1001 DRB1_1101 DRB1_1102 DRB1_1103 DRB1_1104 DRB1_1114 DRB1_1201 DRB1_1202 DRB1_1301 DRB1_1302 DRB1_1303 DRB1_1304 DRB1_1305 DRB1_1312 DRB1_1401 DRB1_1402 DRB1_1403 DRB1_1404 DRB1_1405 DRB1_1406 DRB1_1407 DRB1_1418 DRB1_1454 DRB1_1501 DRB1_1502 DRB1_1503 DRB1_1601 DRB1_1602 DPA10103-DPB10101 DPA10103-DPB10201 DPA10103-DPB10202 DPA10103-DPB10301 DPA10103-DPB10501 DPA10103-DPB10601 DPA10103-DPB11101 DPA10103-DPB112401 DPA10103-DPB11301 DPA10103-DPB113101 DPA10103-DPB113301 DPA10103-DPB11401 DPA10103-DPB11501 DPA10103-DPB11601 DPA10103-DPB11701 DPA10103-DPB11801 DPA10103-DPB11901 DPA10103-DPB12001 DPA10103-DPB12101 DPA10103-DPB12901 DPA10103-DPB13001 DPA10103-DPB13101 DPA10103-DPB13401 DPA10103-DPB14001 DPA10103-DPB14101 DPA10103-DPB14801 DPA10103-DPB15001 DPA10103-DPB15501 DPA10104-DPB10101 DPA10104-DPB10301; note = HLAs: DPA10104-DPB11301 DPA10104-DPB11501 DPA10105-DPB10101 DPA10105-DPB10301 DPA10105-DPB11801 DPA10105-DPB15001 DPA10106-DPB10101 DPA10201-DPB10101 DPA10201-DPB10202 DPA10201-DPB10501 DPA10201-DPB110601 DPA10201-DPB11501 DPA10201-DPB11601 DPA10201-DPB11901 DPA10201-DPB15501 DPA10202-DPB10101 DPA10202-DPB10201 DPA10202-DPB10202 DPA10202-DPB10401 DPA10202-DPB10501 DPA10202-DPB110601 DPA10202-DPB11101 DPA10202-DPB11301 DPA10202-DPB113101 DPA10202-DPB11701 DPA10202-DPB11801 DPA10202-DPB11901 DPA10202-DPB12101 DPA10202-DPB13001 DPA10202-DPB13101 DPA10202-DPB13801 DPA10202-DPB15501 DPA10202-DPB16501 DPA10202-DPB18501 DPA10301-DPB10101 DPA10301-DPB10201 DPA10301-DPB10202 DPA10301-DPB10401 DPA10301-DPB10402 DPA10301-DPB10901 DPA10301-DPB110501 DPA10301-DPB110601 DPA10301-DPB11101 DPA10301-DPB11301 DPA10301-DPB11701 DPA10301-DPB11801 DPA10301-DPB12301 DPA10301-DPB13901 DPA10301-DPB14001 DPA10301-DPB14901 DPA10301-DPB15501 DPA10301-DPB16501 DPA10301-DPB17501 DPA10301-DPB18001; note = HLAs: DPA10401-DPB10101 DPA10401-DPB10201 DPA10401-DPB10202 DPA10401-DPB10301 DPA10401-DPB10402 DPA10401-DPB10501 DPA10401-DPB110501 DPA10401-DPB11301 DPA10401-DPB113301 DPA10401-DPB11401 DPA10401-DPB14901 DQA10102-DQB10501 DQA10102-DQB10503 DQA10102-DQB10609 DQA10103-DQB10501 DQA10103-DQB10503 DQA10103-DQB10601 DQA10103-DQB10602 DQA10103-DQB10608 DQA10103-DQB10609
PVGEIYKRWIILGLNKIVRMYSP

SEQ ID NO: 5055 - protein, 15 aa, Human immunodeficiency virus 1
  source 1..15: note = HLAs: DQA10201-DQB10301
PYNPQSQGVVESMNK

SEQ ID NO: 5056 - protein, 16 aa, Human immunodeficiency virus 1
  source 1..16: note = HLAs: DQA10201-DQB10301
PYNPQSQGVVESMNKE

SEQ ID NO: 5057 - protein, 17 aa, Human immunodeficiency virus 1
  source 1..17: note = HLAs: DQA10201-DQB10301
PYNPQSQGVVESMNKEL

SEQ ID NO: 5058 - protein, 20 aa, Human immunodeficiency virus 1
  source 1..20: note = HLAs: DRB1_1104 DRB1_1114 DRB1_1302 DRB1_1406 DQA10201-DQB10301
PYNPQSQGVVESMNKELKKI

SEQ ID NO: 5059 - protein, 21 aa, Human immunodeficiency virus 1
  source 1..21: note = HLAs: DRB1_1103 DRB1_1104 DRB1_1304 DRB1_1406
PYNPQSQGVVESMNKELKKII

SEQ ID NO: 5060 - protein, 22 aa, Human immunodeficiency virus 1
  source 1..22: note = HLAs: DRB1_1102 DRB1_1103 DRB1_1104 DRB1_1301 DRB1_1304 DRB1_1406
PYNPQSQGVVESMNKELKKIIG

SEQ ID NO: 5061 - protein, 23 aa, Human immunodeficiency virus 1
  source 1..23: note = HLAs: DRB1_0806 DRB1_1102 DRB1_1103 DRB1_1104 DRB1_1301 DRB1_1304 DRB1_1406
PYNPQSQGVVESMNKELKKIIGQ

SEQ ID NO: 5062 - protein, 24 aa, Human immunodeficiency virus 1
  source 1..24: note = HLAs: DRB1_0806 DRB1_1101 DRB1_1102 DRB1_1103 DRB1_1104 DRB1_1301 DRB1_1304 DRB1_1305 DRB1_1406
PYNPQSQGVVESMNKELKKIIGQV

SEQ ID NO: 5063 - protein, 25 aa, Human immunodeficiency virus 1
  source 1..25: note = HLAs: DRB1_0804 DRB1_0806 DRB1_1101 DRB1_1102 DRB1_1103 DRB1_1104 DRB1_1301 DRB1_1304 DRB1_1305 DRB1_1406
PYNPQSQGVVESMNKELKKIIGQVR

SEQ ID NO: 5064 - protein, 14 aa, Human immunodeficiency virus 1
  source 1..14: note = HLAs: DRB1_1104
PYNTPVFAIKKKDS

SEQ ID NO: 5065 - protein, 15 aa, Human immunodeficiency virus 1
  source 1..15: note = HLAs: DRB1_0804 DRB1_0806 DRB1_1101 DRB1_1102 DRB1_1103 DRB1_1104 DRB1_1301 DRB1_1304 DRB1_1305 DRB1_1406
PYNTPVFAIKKKDST

SEQ ID NO: 5066 - protein, 16 aa, Human immunodeficiency virus 1
  source 1..16: note = HLAs: DRB1_0804 DRB1_0806 DRB1_1101 DRB1_1103 DRB1_1104 DRB1_1305
PYNTPVFAIKKKDSTK

SEQ ID NO: 5067 - protein, 17 aa, Human immunodeficiency virus 1
  source 1..17: note = HLAs: DRB1_0804 DRB1_0806 DRB1_1101 DRB1_1102 DRB1_1103 DRB1_1104 DRB1_1301 DRB1_1304 DRB1_1305 DRB1_1406
PYNTPVFAIKKKDSTKW

SEQ ID NO: 5068 - protein, 18 aa, Human immunodeficiency virus 1
  source 1..18: note = HLAs: DRB1_1101 DRB1_1103 DRB1_1104 DRB1_1305
PYNTPVFAIKKKDSTKWR

SEQ ID NO: 5069 - protein, 19 aa, Human immunodeficiency virus 1
  source 1..19: note = HLAs: DRB1_0804 DRB1_0806 DRB1_1101 DRB1_1102 DRB1_1103 DRB1_1104 DRB1_1301 DRB1_1304 DRB1_1305 DRB1_1406
PYNTPVFAIKKKDSTKWRK

SEQ ID NO: 5070 - protein, 20 aa, Human immunodeficiency virus 1
  source 1..20: note = HLAs: DRB1_0801 DRB1_0802 DRB1_0804 DRB1_0806 DRB1_0809 DRB1_1101 DRB1_1102 DRB1_1103 DRB1_1104 DRB1_1301 DRB1_1304 DRB1_1305 DRB1_1406 DPA10103-DPB15001 DPA10105-DPB15001 DPA10202-DPB13101
PYNTPVFAIKKKDSTKWRKL

SEQ ID NO: 5071 - protein, 21 aa, Human immunodeficiency virus 1
  source 1..21: note = HLAs: DRB1_0801 DRB1_0804 DRB1_0806 DRB1_1101 DRB1_1102 DRB1_1103 DRB1_1104 DRB1_1301 DRB1_1304 DRB1_1305 DRB1_1406
PYNTPVFAIKKKDSTKWRKLV

SEQ ID NO: 5072 - protein, 22 aa, Human immunodeficiency virus 1
  source 1..22: note = HLAs: DRB1_0801 DRB1_0804 DRB1_0806 DRB1_1101 DRB1_1102 DRB1_1103 DRB1_1104 DRB1_1301 DRB1_1304 DRB1_1305 DRB1_1406
PYNTPVFAIKKKDSTKWRKLVD

SEQ ID NO: 5073 - protein, 23 aa, Human immunodeficiency virus 1
  source 1..23: note = HLAs: DRB1_0801 DRB1_0804 DRB1_0806 DRB1_1101 DRB1_1102 DRB1_1103 DRB1_1104 DRB1_1301 DRB1_1304 DRB1_1305 DRB1_1406 DPA10103-DPB11501 DPA10104-DPB11501
PYNTPVFAIKKKDSTKWRKLVDF

SEQ ID NO: 5074 - protein, 24 aa, Human immunodeficiency virus 1
  source 1..24: note = HLAs: DRB1_0801 DRB1_0804 DRB1_0806 DRB1_1101 DRB1_1102 DRB1_1103 DRB1_1104 DRB1_1301 DRB1_1304 DRB1_1305 DRB1_1406 DPA10103-DPB11501 DPA10104-DPB11501
PYNTPVFAIKKKDSTKWRKLVDFR

SEQ ID NO: 5075 - protein, 25 aa, Human immunodeficiency virus 1
  source 1..25: note = HLAs: DRB1_0801 DRB1_0804 DRB1_0806 DRB1_1101 DRB1_1102 DRB1_1103 DRB1_1104 DRB1_1301 DRB1_1304 DRB1_1305 DRB1_1406 DPA10103-DPB11501 DPA10104-DPB11501 DPA10202-DPB13101 DPA10301-DPB110601 DPA10401-DPB10101
PYNTPVFAIKKKDSTKWRKLVDFRE

SEQ ID NO: 5076 - protein, 15 aa, Human immunodeficiency virus 1
  source 1..15: note = HLAs: DRB1_1001 DQA10102-DQB10501 DQA10102-DQB10609
QAAMQMLKDTINEEA

SEQ ID NO: 5077 - protein, 16 aa, Human immunodeficiency virus 1
  source 1..16: note = HLAs: DQA10102-DQB10501 DQA10102-DQB10503 DQA10102-DQB10609
QAAMQMLKDTINEEAA

SEQ ID NO: 5078 - protein, 17 aa, Human immunodeficiency virus 1
  source 1..17: note = HLAs: DRB1_1001 DQA10102-DQB10501 DQA10102-DQB10609
QAAMQMLKDTINEEAAE

SEQ ID NO: 5079 - protein, 19 aa, Human immunodeficiency virus 1
  source 1..19: note = HLAs: DPA10301-DPB10101 DQA10102-DQB10501 DQA10102-DQB10609
QAAMQMLKDTINEEAAEWD

SEQ ID NO: 5080 - protein, 20 aa, Human immunodeficiency virus 1
  source 1..20: note = HLAs: DRB1_1001 DPA10301-DPB10101 DPA10401-DPB10101 DQA10102-DQB10501 DQA10102-DQB10503 DQA10102-DQB10609 DQA10103-DQB10501 DQA10103-DQB10609
QAAMQMLKDTINEEAAEWDR

SEQ ID NO: 5081 - protein, 14 aa, Human immunodeficiency virus 1
  source 1..14: note = HLAs: DRB1_1001 DPA10103-DPB11501 DPA10104-DPB11501 DPA10301-DPB10101 DPA10301-DPB10201 DPA10301-DPB10202 DPA10301-DPB11801 DPA10401-DPB10101 DQA10102-DQB10501 DQA10102-DQB10601 DQA10102-DQB10602 DQA10102-DQB10609 DQA10102-DQB10611 DQA10103-DQB10601 DQA10103-DQB10609 DQA10201-DQB10301
QAEHLKTAVQMAVF

SEQ ID NO: 5082 - protein, 15 aa, Human immunodeficiency virus 1
  source 1..15: note = HLAs: DRB1_0101 DRB1_0102 DRB1_0404 DRB1_0410 DRB1_0701 DRB1_0813 DRB1_0901 DRB1_1001 DRB1_1102 DRB1_1114 DRB1_1301 DRB1_1302 DRB1_1304 DRB1_1401 DRB1_1404 DRB1_1406 DRB1_1454 DPA10103-DPB10101 DPA10103-DPB11501 DPA10103-DPB15001 DPA10104-DPB10101 DPA10104-DPB11501 DPA10105-DPB10101 DPA10105-DPB15001 DPA10202-DPB10101 DPA10301-DPB10101 DPA10301-DPB10201 DPA10301-DPB10202 DPA10301-DPB10401 DPA10301-DPB110601 DPA10301-DPB11801 DPA10301-DPB12301 DPA10301-DPB13901 DPA10301-DPB14001 DPA10301-DPB16501 DPA10401-DPB10101 DPA10401-DPB10201 DPA10401-DPB10202 DPA10401-DPB10301 DPA10401-DPB11401 DQA10102-DQB10501 DQA10102-DQB10601 DQA10102-DQB10602 DQA10102-DQB10609 DQA10102-DQB10611 DQA10103-DQB10501 DQA10103-DQB10601 DQA10103-DQB10602 DQA10103-DQB10609 DQA10201-DQB10301 DQA10201-DQB10303 DQA10505-DQB10402
QAEHLKTAVQMAVFI

SEQ ID NO: 5083 - protein, 16 aa, Human immunodeficiency virus 1
  source 1..16: note = HLAs: DRB1_0101 DRB1_0701 DRB1_0901 DRB1_1001 DRB1_1406 DPA10103-DPB10101 DPA10103-DPB11501 DPA10103-DPB15001 DPA10104-DPB10101 DPA10104-DPB11501 DPA10105-DPB10101 DPA10105-DPB15001 DPA10202-DPB10101 DPA10301-DPB10101 DPA10301-DPB10201 DPA10301-DPB10202 DPA10301-DPB10401 DPA10301-DPB110601 DPA10301-DPB11801 DPA10301-DPB12301 DPA10301-DPB13901 DPA10301-DPB14001 DPA10301-DPB16501 DPA10401-DPB10101 DPA10401-DPB10201 DPA10401-DPB10202 DPA10401-DPB10301 DPA10401-DPB10501 DPA10401-DPB11401 DQA10102-DQB10501 DQA10102-DQB10503 DQA10102-DQB10601 DQA10102-DQB10602 DQA10102-DQB10609 DQA10102-DQB10611 DQA10103-DQB10501 DQA10103-DQB10601 DQA10103-DQB10602 DQA10103-DQB10609 DQA10201-DQB10301 DQA10201-DQB10303
QAEHLKTAVQMAVFIH

SEQ ID NO: 5084 - protein, 17 aa, Human immunodeficiency virus 1
  source 1..17: note = HLAs: DRB1_0101 DRB1_0404 DRB1_0701 DRB1_0813 DRB1_0901 DRB1_1001 DRB1_1406 DPA10103-DPB10101 DPA10103-DPB10201 DPA10103-DPB10202 DPA10103-DPB10401 DPA10103-DPB10501 DPA10103-DPB112601 DPA10103-DPB11501 DPA10103-DPB11601 DPA10103-DPB11801 DPA10103-DPB11901 DPA10103-DPB12301 DPA10103-DPB13101 DPA10103-DPB13401 DPA10103-DPB13901 DPA10103-DPB14001 DPA10103-DPB14801 DPA10103-DPB15001 DPA10104-DPB10101 DPA10104-DPB11501 DPA10105-DPB10101 DPA10105-DPB10401 DPA10105-DPB11801 DPA10105-DPB15001 DPA10106-DPB10101 DPA10201-DPB10101 DPA10201-DPB110601 DPA10201-DPB11501 DPA10201-DPB11901 DPA10202-DPB10101 DPA10202-DPB10201 DPA10202-DPB10202 DPA10202-DPB10501 DPA10202-DPB10901 DPA10202-DPB110601 DPA10202-DPB11101 DPA10202-DPB11301 DPA10202-DPB11801 DPA10202-DPB11901 DPA10202-DPB13101 DPA10202-DPB13801 DPA10202-DPB15501 DPA10202-DPB16501 DPA10301-DPB10101 DPA10301-DPB10201 DPA10301-DPB10202 DPA10301-DPB10401 DPA10301-DPB10402 DPA10301-DPB110501 DPA10301-DPB110601 DPA10301-DPB11101 DPA10301-DPB11301; note = HLAs: DPA10301-DPB11801 DPA10301-DPB12301 DPA10301-DPB13901 DPA10301-DPB14001 DPA10301-DPB14901 DPA10301-DPB15501 DPA10301-DPB16501 DPA10301-DPB17501 DPA10301-DPB18001 DPA10401-DPB10101 DPA10401-DPB10201 DPA10401-DPB10202 DPA10401-DPB10301 DPA10401-DPB10402 DPA10401-DPB10501 DPA10401-DPB110501 DPA10401-DPB11301 DPA10401-DPB113301 DPA10401-DPB11401 DPA10401-DPB14901 DQA10102-DQB10501 DQA10102-DQB10601 DQA10102-DQB10602 DQA10102-DQB10609 DQA10102-DQB10611 DQA10103-DQB10501 DQA10103-DQB10601 DQA10103-DQB10602 DQA10103-DQB10609 DQA10201-DQB10301 DQA10201-DQB10303
QAEHLKTAVQMAVFIHN

SEQ ID NO: 5085 - protein, 18 aa, Human immunodeficiency virus 1
  source 1..18: note = HLAs: DRB1_1001 DPA10103-DPB10101 DPA10103-DPB10201 DPA10103-DPB10202 DPA10103-DPB11501 DPA10103-DPB11901 DPA10103-DPB14801 DPA10103-DPB15001 DPA10104-DPB10101 DPA10104-DPB11501 DPA10105-DPB10101 DPA10105-DPB15001 DPA10201-DPB11501 DPA10202-DPB10101 DPA10301-DPB10101 DPA10301-DPB10201 DPA10301-DPB10202 DPA10301-DPB10401 DPA10301-DPB10402 DPA10301-DPB110501 DPA10301-DPB110601 DPA10301-DPB11801 DPA10301-DPB12301 DPA10301-DPB13901 DPA10301-DPB14001 DPA10301-DPB14901 DPA10301-DPB16501 DPA10301-DPB17501 DPA10301-DPB18001 DPA10401-DPB10101 DPA10401-DPB10201 DPA10401-DPB10202 DPA10401-DPB10501 DQA10102-DQB10501 DQA10102-DQB10601 DQA10102-DQB10602 DQA10102-DQB10609 DQA10102-DQB10611 DQA10103-DQB10601 DQA10103-DQB10609
QAEHLKTAVQMAVFIHNF

SEQ ID NO: 5086 - protein, 19 aa, Human immunodeficiency virus 1
  source 1..19: note = HLAs: DRB1_0101 DRB1_1001 DRB1_1406 DPA10103-DPB10101 DPA10103-DPB10201 DPA10103-DPB10202 DPA10103-DPB10401 DPA10103-DPB10501 DPA10103-DPB11101 DPA10103-DPB112601 DPA10103-DPB11501 DPA10103-DPB11601 DPA10103-DPB11801 DPA10103-DPB11901 DPA10103-DPB12301 DPA10103-DPB13101 DPA10103-DPB13401 DPA10103-DPB13901 DPA10103-DPB14001 DPA10103-DPB14101 DPA10103-DPB14801 DPA10103-DPB15001 DPA10103-DPB15501 DPA10104-DPB10101 DPA10104-DPB11501 DPA10105-DPB10101 DPA10105-DPB10401 DPA10105-DPB11801 DPA10105-DPB15001 DPA10106-DPB10101 DPA10201-DPB10101 DPA10201-DPB10202 DPA10201-DPB110601 DPA10201-DPB11501 DPA10201-DPB11601 DPA10201-DPB11901 DPA10202-DPB10101 DPA10202-DPB10201 DPA10202-DPB10202 DPA10202-DPB10501 DPA10202-DPB110601 DPA10202-DPB11101 DPA10202-DPB11801 DPA10202-DPB11901 DPA10202-DPB13101 DPA10202-DPB13801 DPA10202-DPB15501 DPA10202-DPB16501 DPA10301-DPB10101 DPA10301-DPB10201 DPA10301-DPB10202 DPA10301-DPB10401 DPA10301-DPB10402 DPA10301-DPB10901 DPA10301-DPB110501 DPA10301-DPB110601; note = HLAs: DPA10301-DPB11101 DPA10301-DPB11301 DPA10301-DPB11701 DPA10301-DPB11801 DPA10301-DPB12301 DPA10301-DPB13901 DPA10301-DPB14001 DPA10301-DPB14901 DPA10301-DPB15501 DPA10301-DPB16501 DPA10301-DPB17501 DPA10301-DPB18001 DPA10401-DPB10101 DPA10401-DPB10201 DPA10401-DPB10202 DPA10401-DPB10301 DPA10401-DPB10402 DPA10401-DPB10501 DPA10401-DPB110501 DPA10401-DPB11301 DPA10401-DPB113301 DPA10401-DPB11401 DPA10401-DPB14901 DQA10102-DQB10501 DQA10102-DQB10503 DQA10102-DQB10601 DQA10102-DQB10602 DQA10102-DQB10609 DQA10102-DQB10611 DQA10103-DQB10501 DQA10103-DQB10601 DQA10103-DQB10602 DQA10103-DQB10609 DQA10201-DQB10301
QAEHLKTAVQMAVFIHNFK

SEQ ID NO: 5087 - protein, 20 aa, Human immunodeficiency virus 1
  source 1..20: note = HLAs: DRB1_0101 DRB1_0404 DRB1_0410 DRB1_0701 DRB1_0801 DRB1_0802 DRB1_0804 DRB1_0806 DRB1_0809 DRB1_0813 DRB1_0901 DRB1_1001 DRB1_1102 DRB1_1104 DRB1_1301 DRB1_1304 DRB1_1406 DRB1_1501 DRB1_1601 DRB1_1602 DPA10103-DPB10101 DPA10103-DPB10201 DPA10103-DPB10202 DPA10103-DPB10301 DPA10103-DPB10401 DPA10103-DPB10402 DPA10103-DPB10501 DPA10103-DPB10601 DPA10103-DPB10901 DPA10103-DPB110501 DPA10103-DPB11101 DPA10103-DPB112401 DPA10103-DPB112601 DPA10103-DPB11301 DPA10103-DPB113101 DPA10103-DPB113301 DPA10103-DPB11401 DPA10103-DPB11501 DPA10103-DPB11601 DPA10103-DPB11701 DPA10103-DPB11801 DPA10103-DPB11901 DPA10103-DPB12001 DPA10103-DPB12101 DPA10103-DPB12301 DPA10103-DPB12901 DPA10103-DPB13001 DPA10103-DPB13101 DPA10103-DPB13401 DPA10103-DPB13901 DPA10103-DPB14001 DPA10103-DPB14101 DPA10103-DPB14801 DPA10103-DPB14901 DPA10103-DPB15001 DPA10103-DPB15101 DPA10103-DPB15501 DPA10103-DPB15901 DPA10103-DPB18001 DPA10104-DPB10101 DPA10104-DPB10301 DPA10104-DPB11301 DPA10104-DPB11501; note = HLAs: DPA10105-DPB10101 DPA10105-DPB10301 DPA10105-DPB10401 DPA10105-DPB11801 DPA10105-DPB15001 DPA10106-DPB10101 DPA10106-DPB11101 DPA10201-DPB10101 DPA10201-DPB10201 DPA10201-DPB10202 DPA10201-DPB10501 DPA10201-DPB10901 DPA10201-DPB110601 DPA10201-DPB11101 DPA10201-DPB11501 DPA10201-DPB11601 DPA10201-DPB11801 DPA10201-DPB11901 DPA10201-DPB15501 DPA10202-DPB10101 DPA10202-DPB10201 DPA10202-DPB10202 DPA10202-DPB10401 DPA10202-DPB10501 DPA10202-DPB10901 DPA10202-DPB110001 DPA10202-DPB110601 DPA10202-DPB11101 DPA10202-DPB11301 DPA10202-DPB113101 DPA10202-DPB11401 DPA10202-DPB11701 DPA10202-DPB11801 DPA10202-DPB11901 DPA10202-DPB12101 DPA10202-DPB12901 DPA10202-DPB13001 DPA10202-DPB13101 DPA10202-DPB13801 DPA10202-DPB15501 DPA10202-DPB16501 DPA10202-DPB18501 DPA10301-DPB10101 DPA10301-DPB10201 DPA10301-DPB10202 DPA10301-DPB10301 DPA10301-DPB10401 DPA10301-DPB10402 DPA10301-DPB10901 DPA10301-DPB110501 DPA10301-DPB110601 DPA10301-DPB11101 DPA10301-DPB11301 DPA10301-DPB11701; note = HLAs: DPA10301-DPB11801 DPA10301-DPB12301 DPA10301-DPB13901 DPA10301-DPB14001 DPA10301-DPB14901 DPA10301-DPB15501 DPA10301-DPB16501 DPA10301-DPB17501 DPA10301-DPB18001 DPA10401-DPB10101 DPA10401-DPB10201 DPA10401-DPB10202 DPA10401-DPB10301 DPA10401-DPB10402 DPA10401-DPB10501 DPA10401-DPB110501 DPA10401-DPB11301 DPA10401-DPB113301 DPA10401-DPB11401 DPA10401-DPB14901 DQA10102-DQB10501 DQA10102-DQB10503 DQA10102-DQB10601 DQA10102-DQB10602 DQA10102-DQB10609 DQA10102-DQB10611 DQA10103-DQB10501 DQA10103-DQB10601 DQA10103-DQB10602 DQA10103-DQB10608 DQA10103-DQB10609 DQA10201-DQB10301 DQA10201-DQB10303
QAEHLKTAVQMAVFIHNFKR

SEQ ID NO: 5088 - protein, 21 aa, Human immunodeficiency virus 1
  source 1..21: note = HLAs: DRB1_0101 DRB1_0410 DRB1_0701 DRB1_0806 DRB1_1001 DRB1_1102 DRB1_1103 DRB1_1104 DRB1_1301 DRB1_1304 DRB1_1406 DRB1_1501 DRB1_1601 DRB1_1602 DPA10103-DPB10101 DPA10103-DPB10201 DPA10103-DPB10202 DPA10103-DPB10401 DPA10103-DPB10501 DPA10103-DPB11101 DPA10103-DPB112601 DPA10103-DPB11501 DPA10103-DPB11601 DPA10103-DPB11801 DPA10103-DPB11901 DPA10103-DPB12301 DPA10103-DPB13101 DPA10103-DPB13401 DPA10103-DPB13901 DPA10103-DPB14001 DPA10103-DPB14101 DPA10103-DPB14801 DPA10103-DPB15001 DPA10103-DPB15501 DPA10103-DPB15901 DPA10104-DPB10101 DPA10104-DPB11501 DPA10105-DPB10101 DPA10105-DPB10401 DPA10105-DPB11801 DPA10105-DPB15001 DPA10106-DPB10101 DPA10201-DPB10101 DPA10201-DPB10202 DPA10201-DPB110601 DPA10201-DPB11501 DPA10201-DPB11601 DPA10201-DPB11901 DPA10202-DPB10101 DPA10202-DPB10201 DPA10202-DPB10202 DPA10202-DPB10501 DPA10202-DPB110601 DPA10202-DPB11801 DPA10202-DPB11901 DPA10202-DPB13101 DPA10202-DPB13801 DPA10202-DPB15501 DPA10202-DPB16501 DPA10301-DPB10101 DPA10301-DPB10201; note = HLAs: DPA10301-DPB10202 DPA10301-DPB10401 DPA10301-DPB10402 DPA10301-DPB110501 DPA10301-DPB110601 DPA10301-DPB11101 DPA10301-DPB11301 DPA10301-DPB11801 DPA10301-DPB12301 DPA10301-DPB13901 DPA10301-DPB14001 DPA10301-DPB14901 DPA10301-DPB15501 DPA10301-DPB16501 DPA10301-DPB17501 DPA10301-DPB18001 DPA10401-DPB10101 DPA10401-DPB10201 DPA10401-DPB10202 DPA10401-DPB10301 DPA10401-DPB10402 DPA10401-DPB10501 DPA10401-DPB110501 DPA10401-DPB11301 DPA10401-DPB113301 DPA10401-DPB11401 DPA10401-DPB14901 DQA10102-DQB10501 DQA10102-DQB10503 DQA10102-DQB10601 DQA10102-DQB10602 DQA10102-DQB10609 DQA10102-DQB10611 DQA10103-DQB10501 DQA10103-DQB10601 DQA10103-DQB10602 DQA10103-DQB10609
QAEHLKTAVQMAVFIHNFKRK

SEQ ID NO: 5089 - protein, 22 aa, Human immunodeficiency virus 1
  source 1..22: note = HLAs: DRB1_0101 DRB1_0410 DRB1_0701 DRB1_0801 DRB1_0804 DRB1_0806 DRB1_1001 DRB1_1101 DRB1_1102 DRB1_1103 DRB1_1104 DRB1_1301 DRB1_1304 DRB1_1305 DRB1_1406 DRB1_1501 DRB1_1601 DRB1_1602 DPA10103-DPB10101 DPA10103-DPB10201 DPA10103-DPB10202 DPA10103-DPB10401 DPA10103-DPB10501 DPA10103-DPB11101 DPA10103-DPB112601 DPA10103-DPB11501 DPA10103-DPB11601 DPA10103-DPB11801 DPA10103-DPB11901 DPA10103-DPB12301 DPA10103-DPB13101 DPA10103-DPB13401 DPA10103-DPB13901 DPA10103-DPB14001 DPA10103-DPB14101 DPA10103-DPB14801 DPA10103-DPB15001 DPA10103-DPB15501 DPA10103-DPB15901 DPA10104-DPB10101 DPA10104-DPB11501 DPA10105-DPB10101 DPA10105-DPB10401 DPA10105-DPB11801 DPA10105-DPB15001 DPA10106-DPB10101 DPA10201-DPB10101 DPA10201-DPB10202 DPA10201-DPB110601 DPA10201-DPB11501 DPA10201-DPB11601 DPA10201-DPB11901 DPA10202-DPB10101 DPA10202-DPB10201 DPA10202-DPB10202 DPA10202-DPB10501 DPA10202-DPB110601 DPA10202-DPB11101 DPA10202-DPB11801 DPA10202-DPB11901 DPA10202-DPB13101 DPA10202-DPB13801 DPA10202-DPB15501; note = HLAs: DPA10202-DPB16501 DPA10301-DPB10101 DPA10301-DPB10201 DPA10301-DPB10202 DPA10301-DPB10401 DPA10301-DPB10402 DPA10301-DPB110501 DPA10301-DPB110601 DPA10301-DPB11101 DPA10301-DPB11301 DPA10301-DPB11801 DPA10301-DPB12301 DPA10301-DPB13901 DPA10301-DPB14001 DPA10301-DPB14901 DPA10301-DPB15501 DPA10301-DPB16501 DPA10301-DPB17501 DPA10301-DPB18001 DPA10401-DPB10101 DPA10401-DPB10201 DPA10401-DPB10202 DPA10401-DPB10301 DPA10401-DPB10402 DPA10401-DPB10501 DPA10401-DPB110501 DPA10401-DPB11301 DPA10401-DPB113301 DPA10401-DPB11401 DPA10401-DPB14901 DQA10102-DQB10501 DQA10102-DQB10503 DQA10102-DQB10601 DQA10102-DQB10602 DQA10102-DQB10609 DQA10102-DQB10611 DQA10103-DQB10501 DQA10103-DQB10601 DQA10103-DQB10602 DQA10103-DQB10609
QAEHLKTAVQMAVFIHNFKRKG

SEQ ID NO: 5090 - protein, 23 aa, Human immunodeficiency virus 1
  source 1..23: note = HLAs: DRB1_0101 DRB1_0410 DRB1_0701 DRB1_0801 DRB1_0802 DRB1_0804 DRB1_0806 DRB1_0809 DRB1_0813 DRB1_1001 DRB1_1101 DRB1_1102 DRB1_1103 DRB1_1104 DRB1_1301 DRB1_1304 DRB1_1305 DRB1_1406 DRB1_1501 DRB1_1601 DRB1_1602 DPA10103-DPB10101 DPA10103-DPB10201 DPA10103-DPB10202 DPA10103-DPB10401 DPA10103-DPB10501 DPA10103-DPB11101 DPA10103-DPB112601 DPA10103-DPB11501 DPA10103-DPB11601 DPA10103-DPB11801 DPA10103-DPB11901 DPA10103-DPB12301 DPA10103-DPB13101 DPA10103-DPB13401 DPA10103-DPB13901 DPA10103-DPB14001 DPA10103-DPB14101 DPA10103-DPB14801 DPA10103-DPB15001 DPA10103-DPB15501 DPA10103-DPB15901 DPA10104-DPB10101 DPA10104-DPB11501 DPA10105-DPB10101 DPA10105-DPB10401 DPA10105-DPB11801 DPA10105-DPB15001 DPA10106-DPB10101 DPA10201-DPB10101 DPA10201-DPB10202 DPA10201-DPB110601 DPA10201-DPB11501 DPA10201-DPB11601 DPA10201-DPB11901 DPA10202-DPB10101 DPA10202-DPB10201 DPA10202-DPB10202 DPA10202-DPB10501 DPA10202-DPB110601 DPA10202-DPB11101 DPA10202-DPB11801 DPA10202-DPB11901 DPA10202-DPB13101; note = HLAs: DPA10202-DPB13801 DPA10202-DPB15501 DPA10202-DPB16501 DPA10301-DPB10101 DPA10301-DPB10201 DPA10301-DPB10202 DPA10301-DPB10401 DPA10301-DPB10402 DPA10301-DPB110501 DPA10301-DPB110601 DPA10301-DPB11101 DPA10301-DPB11301 DPA10301-DPB11801 DPA10301-DPB12301 DPA10301-DPB13901 DPA10301-DPB14001 DPA10301-DPB14901 DPA10301-DPB15501 DPA10301-DPB16501 DPA10301-DPB17501 DPA10301-DPB18001 DPA10401-DPB10101 DPA10401-DPB10201 DPA10401-DPB10202 DPA10401-DPB10301 DPA10401-DPB10402 DPA10401-DPB10501 DPA10401-DPB110501 DPA10401-DPB11301 DPA10401-DPB113301 DPA10401-DPB11401 DPA10401-DPB14901 DQA10102-DQB10501 DQA10102-DQB10503 DQA10102-DQB10601 DQA10102-DQB10602 DQA10102-DQB10609 DQA10102-DQB10611 DQA10103-DQB10501 DQA10103-DQB10601 DQA10103-DQB10602 DQA10103-DQB10609
QAEHLKTAVQMAVFIHNFKRKGG

SEQ ID NO: 5091 - protein, 24 aa, Human immunodeficiency virus 1
  source 1..24: note = HLAs: DRB1_0101 DRB1_0404 DRB1_0410 DRB1_0701 DRB1_0801 DRB1_0802 DRB1_0804 DRB1_0806 DRB1_0809 DRB1_0813 DRB1_1001 DRB1_1101 DRB1_1102 DRB1_1103 DRB1_1104 DRB1_1114 DRB1_1301 DRB1_1302 DRB1_1303 DRB1_1304 DRB1_1305 DRB1_1402 DRB1_1406 DRB1_1501 DRB1_1503 DRB1_1601 DRB1_1602 DPA10103-DPB10101 DPA10103-DPB10201 DPA10103-DPB10202 DPA10103-DPB10401 DPA10103-DPB10501 DPA10103-DPB11101 DPA10103-DPB112601 DPA10103-DPB11501 DPA10103-DPB11601 DPA10103-DPB11801 DPA10103-DPB11901 DPA10103-DPB12301 DPA10103-DPB13101 DPA10103-DPB13401 DPA10103-DPB13901 DPA10103-DPB14001 DPA10103-DPB14101 DPA10103-DPB14801 DPA10103-DPB15001 DPA10103-DPB15501 DPA10103-DPB15901 DPA10104-DPB10101 DPA10104-DPB11501 DPA10105-DPB10101 DPA10105-DPB10401 DPA10105-DPB11801 DPA10105-DPB15001 DPA10106-DPB10101 DPA10201-DPB10101 DPA10201-DPB10202 DPA10201-DPB110601 DPA10201-DPB11501 DPA10201-DPB11601 DPA10201-DPB11901 DPA10201-DPB13401 DPA10202-DPB10101 DPA10202-DPB10201 DPA10202-DPB10202 DPA10202-DPB10401 DPA10202-DPB10501; note = HLAs: DPA10202-DPB110601 DPA10202-DPB11101 DPA10202-DPB11801 DPA10202-DPB11901 DPA10202-DPB13101 DPA10202-DPB13801 DPA10202-DPB15501 DPA10202-DPB16501 DPA10301-DPB10101 DPA10301-DPB10201 DPA10301-DPB10202 DPA10301-DPB10401 DPA10301-DPB10402 DPA10301-DPB110501 DPA10301-DPB110601 DPA10301-DPB11101 DPA10301-DPB11301 DPA10301-DPB11801 DPA10301-DPB12301 DPA10301-DPB13901 DPA10301-DPB14001 DPA10301-DPB14901 DPA10301-DPB15501 DPA10301-DPB16501 DPA10301-DPB17501 DPA10301-DPB18001 DPA10401-DPB10101 DPA10401-DPB10201 DPA10401-DPB10202 DPA10401-DPB10301 DPA10401-DPB10402 DPA10401-DPB10501 DPA10401-DPB110501 DPA10401-DPB11301 DPA10401-DPB113301 DPA10401-DPB11401 DPA10401-DPB14901 DQA10102-DQB10501 DQA10102-DQB10503 DQA10102-DQB10601 DQA10102-DQB10602 DQA10102-DQB10609 DQA10102-DQB10611 DQA10103-DQB10501 DQA10103-DQB10601 DQA10103-DQB10602 DQA10103-DQB10609
QAEHLKTAVQMAVFIHNFKRKGGI

SEQ ID NO: 5092 - protein, 25 aa, Human immunodeficiency virus 1
  source 1..25: note = HLAs: DRB1_0101 DRB1_0404 DRB1_0410 DRB1_0701 DRB1_0801 DRB1_0802 DRB1_0804 DRB1_0806 DRB1_0809 DRB1_0813 DRB1_1001 DRB1_1101 DRB1_1102 DRB1_1103 DRB1_1104 DRB1_1114 DRB1_1301 DRB1_1302 DRB1_1303 DRB1_1304 DRB1_1305 DRB1_1402 DRB1_1406 DRB1_1501 DRB1_1503 DRB1_1601 DRB1_1602 DPA10103-DPB10101 DPA10103-DPB10201 DPA10103-DPB10202 DPA10103-DPB10401 DPA10103-DPB10501 DPA10103-DPB11101 DPA10103-DPB112601 DPA10103-DPB11501 DPA10103-DPB11601 DPA10103-DPB11801 DPA10103-DPB11901 DPA10103-DPB12301 DPA10103-DPB13101 DPA10103-DPB13401 DPA10103-DPB13901 DPA10103-DPB14001 DPA10103-DPB14101 DPA10103-DPB14801 DPA10103-DPB15001 DPA10103-DPB15501 DPA10103-DPB15901 DPA10104-DPB10101 DPA10104-DPB11501 DPA10105-DPB10101 DPA10105-DPB10401 DPA10105-DPB11801 DPA10105-DPB15001 DPA10106-DPB10101 DPA10201-DPB10101 DPA10201-DPB10202 DPA10201-DPB110601 DPA10201-DPB11501 DPA10201-DPB11601 DPA10201-DPB11901 DPA10201-DPB13401 DPA10202-DPB10101 DPA10202-DPB10201 DPA10202-DPB10202 DPA10202-DPB10401 DPA10202-DPB10501; note = HLAs: DPA10202-DPB110601 DPA10202-DPB11101 DPA10202-DPB11801 DPA10202-DPB11901 DPA10202-DPB13101 DPA10202-DPB13801 DPA10202-DPB15501 DPA10202-DPB16501 DPA10301-DPB10101 DPA10301-DPB10201 DPA10301-DPB10202 DPA10301-DPB10401 DPA10301-DPB10402 DPA10301-DPB110501 DPA10301-DPB110601 DPA10301-DPB11101 DPA10301-DPB11301 DPA10301-DPB11801 DPA10301-DPB12301 DPA10301-DPB13901 DPA10301-DPB14001 DPA10301-DPB14901 DPA10301-DPB15501 DPA10301-DPB16501 DPA10301-DPB17501 DPA10301-DPB18001 DPA10401-DPB10101 DPA10401-DPB10201 DPA10401-DPB10202 DPA10401-DPB10301 DPA10401-DPB10402 DPA10401-DPB10501 DPA10401-DPB110501 DPA10401-DPB11301 DPA10401-DPB113301 DPA10401-DPB11401 DPA10401-DPB14901 DQA10102-DQB10501 DQA10102-DQB10503 DQA10102-DQB10601 DQA10102-DQB10602 DQA10102-DQB10609 DQA10102-DQB10611 DQA10103-DQB10501 DQA10103-DQB10601 DQA10103-DQB10602 DQA10103-DQB10609
QAEHLKTAVQMAVFIHNFKRKGGIG

SEQ ID NO: 5093 - protein, 16 aa, Human immunodeficiency virus 1
  source 1..16: note = HLAs: DPA10301-DPB10101 DQA10102-DQB10501
QATWIPEWEFVNTPPL

SEQ ID NO: 5094 - protein, 17 aa, Human immunodeficiency virus 1
  source 1..17: note = HLAs: DRB1_0101 DRB1_0405 DRB1_0408 DRB1_0701 DRB1_0901 DRB1_1001 DRB1_1602 DPA10301-DPB10101 DQA10102-DQB10501
QATWIPEWEFVNTPPLV

SEQ ID NO: 5095 - protein, 18 aa, Human immunodeficiency virus 1
  source 1..18: note = HLAs: DRB1_0701 DRB1_1001 DRB1_1602 DPA10301-DPB10101 DPA10401-DPB10101 DQA10102-DQB10501
QATWIPEWEFVNTPPLVK

SEQ ID NO: 5096 - protein, 19 aa, Human immunodeficiency virus 1
  source 1..19: note = HLAs: DRB1_0101 DRB1_0401 DRB1_0405 DRB1_0408 DRB1_0701 DRB1_0813 DRB1_0901 DRB1_1001 DRB1_1114 DRB1_1302 DRB1_1502 DRB1_1601 DRB1_1602 DPA10103-DPB10101 DPA10103-DPB11501 DPA10103-DPB13101 DPA10103-DPB15001 DPA10104-DPB10101 DPA10104-DPB11501 DPA10105-DPB10101 DPA10105-DPB15001 DPA10106-DPB10101 DPA10201-DPB10101 DPA10202-DPB10101 DPA10202-DPB110601 DPA10202-DPB11901 DPA10202-DPB13101 DPA10301-DPB10101 DPA10301-DPB10201 DPA10301-DPB10202 DPA10301-DPB10401 DPA10301-DPB10402 DPA10301-DPB110501 DPA10301-DPB110601 DPA10301-DPB11801 DPA10301-DPB12301 DPA10301-DPB13901 DPA10301-DPB14001 DPA10301-DPB14901 DPA10301-DPB15501 DPA10301-DPB16501 DPA10301-DPB18001 DPA10401-DPB10101 DPA10401-DPB10201 DPA10401-DPB10202 DPA10401-DPB10501 DQA10102-DQB10501 DQA10102-DQB10609 DQA10103-DQB10501
QATWIPEWEFVNTPPLVKL

SEQ ID NO: 5097 - protein, 20 aa, Human immunodeficiency virus 1
  source 1..20: note = HLAs: DRB1_0101 DRB1_0401 DRB1_0405 DRB1_0408 DRB1_0410 DRB1_0701 DRB1_0801 DRB1_0802 DRB1_0803 DRB1_0809 DRB1_0813 DRB1_0901 DRB1_1001 DRB1_1101 DRB1_1102 DRB1_1114 DRB1_1301 DRB1_1302 DRB1_1303 DRB1_1304 DRB1_1305 DRB1_1312 DRB1_1402 DRB1_1406 DRB1_1502 DRB1_1601 DRB1_1602 DPA10103-DPB10101 DPA10103-DPB10201 DPA10103-DPB10202 DPA10103-DPB10501 DPA10103-DPB11501 DPA10103-DPB11601 DPA10103-DPB11901 DPA10103-DPB13101 DPA10103-DPB13401 DPA10103-DPB14101 DPA10103-DPB14801 DPA10103-DPB15001 DPA10103-DPB15901 DPA10104-DPB10101 DPA10104-DPB11501 DPA10105-DPB10101 DPA10105-DPB15001 DPA10106-DPB10101 DPA10201-DPB10101 DPA10201-DPB11501 DPA10202-DPB10101 DPA10202-DPB10201 DPA10202-DPB10202 DPA10202-DPB10501 DPA10202-DPB110601 DPA10202-DPB11101 DPA10202-DPB11801 DPA10202-DPB11901 DPA10202-DPB13101 DPA10202-DPB13801 DPA10202-DPB15501 DPA10202-DPB16501 DPA10202-DPB18501 DPA10301-DPB10101 DPA10301-DPB10201 DPA10301-DPB10202 DPA10301-DPB10401 DPA10301-DPB10402 DPA10301-DPB110501 DPA10301-DPB110601; note = HLAs: DPA10301-DPB11101 DPA10301-DPB11801 DPA10301-DPB12301 DPA10301-DPB13901 DPA10301-DPB14001 DPA10301-DPB14901 DPA10301-DPB15501 DPA10301-DPB16501 DPA10301-DPB17501 DPA10301-DPB18001 DPA10401-DPB10101 DPA10401-DPB10201 DPA10401-DPB10202 DPA10401-DPB10301 DPA10401-DPB10402 DPA10401-DPB10501 DPA10401-DPB110501 DPA10401-DPB11401 DPA10401-DPB14901 DQA10102-DQB10501 DQA10102-DQB10503 DQA10102-DQB10609 DQA10103-DQB10501 DQA10103-DQB10609
QATWIPEWEFVNTPPLVKLW

SEQ ID NO: 5098 - protein, 21 aa, Human immunodeficiency virus 1
  source 1..21: note = HLAs: DRB1_0101 DRB1_0401 DRB1_0405 DRB1_0408 DRB1_0410 DRB1_0701 DRB1_0801 DRB1_0813 DRB1_0901 DRB1_1001 DRB1_1101 DRB1_1114 DRB1_1302 DRB1_1303 DRB1_1304 DRB1_1305 DRB1_1312 DRB1_1402 DRB1_1406 DRB1_1502 DRB1_1601 DRB1_1602 DPA10103-DPB10101 DPA10103-DPB11501 DPA10103-DPB13101 DPA10103-DPB15001 DPA10104-DPB10101 DPA10104-DPB11501 DPA10105-DPB10101 DPA10105-DPB15001 DPA10106-DPB10101 DPA10201-DPB10101 DPA10202-DPB10101 DPA10202-DPB10501 DPA10202-DPB110601 DPA10202-DPB11901 DPA10202-DPB13101 DPA10202-DPB13801 DPA10202-DPB16501 DPA10301-DPB10101 DPA10301-DPB10201 DPA10301-DPB10202 DPA10301-DPB10401 DPA10301-DPB10402 DPA10301-DPB110501 DPA10301-DPB110601 DPA10301-DPB11801 DPA10301-DPB12301 DPA10301-DPB13901 DPA10301-DPB14001 DPA10301-DPB14901 DPA10301-DPB15501 DPA10301-DPB16501 DPA10301-DPB17501 DPA10301-DPB18001 DPA10401-DPB10101 DPA10401-DPB10201 DPA10401-DPB10202 DPA10401-DPB10501 DQA10102-DQB10501 DQA10103-DQB10501
QATWIPEWEFVNTPPLVKLWY

SEQ ID NO: 5099 - protein, 22 aa, Human immunodeficiency virus 1
  source 1..22: note = HLAs: DRB1_0101 DRB1_0401 DRB1_0405 DRB1_0408 DRB1_0410 DRB1_0701 DRB1_0801 DRB1_0813 DRB1_0901 DRB1_1001 DRB1_1101 DRB1_1114 DRB1_1302 DRB1_1303 DRB1_1304 DRB1_1305 DRB1_1312 DRB1_1402 DRB1_1406 DRB1_1502 DRB1_1601 DRB1_1602 DPA10103-DPB10101 DPA10103-DPB10201 DPA10103-DPB11501 DPA10103-DPB13101 DPA10103-DPB14801 DPA10103-DPB15001 DPA10104-DPB10101 DPA10104-DPB11501 DPA10105-DPB10101 DPA10105-DPB15001 DPA10106-DPB10101 DPA10201-DPB10101 DPA10201-DPB11501 DPA10202-DPB10101 DPA10202-DPB10202 DPA10202-DPB10501 DPA10202-DPB110601 DPA10202-DPB11901 DPA10202-DPB13101 DPA10202-DPB13801 DPA10202-DPB16501 DPA10301-DPB10101 DPA10301-DPB10201 DPA10301-DPB10202 DPA10301-DPB10401 DPA10301-DPB10402 DPA10301-DPB110501 DPA10301-DPB110601 DPA10301-DPB11801 DPA10301-DPB12301 DPA10301-DPB13901 DPA10301-DPB14001 DPA10301-DPB14901 DPA10301-DPB15501 DPA10301-DPB16501 DPA10301-DPB17501 DPA10301-DPB18001 DPA10401-DPB10101 DPA10401-DPB10201 DPA10401-DPB10202 DPA10401-DPB10501 DPA10401-DPB11401; note = HLAs: DQA10102-DQB10501 DQA10103-DQB10501
QATWIPEWEFVNTPPLVKLWYQ

SEQ ID NO: 5100 - protein, 23 aa, Human immunodeficiency virus 1
  source 1..23: note = HLAs: DRB1_0101 DRB1_0401 DRB1_0405 DRB1_0408 DRB1_0410 DRB1_0701 DRB1_0801 DRB1_0813 DRB1_0901 DRB1_1001 DRB1_1101 DRB1_1102 DRB1_1114 DRB1_1301 DRB1_1302 DRB1_1303 DRB1_1304 DRB1_1305 DRB1_1312 DRB1_1402 DRB1_1406 DRB1_1502 DRB1_1601 DRB1_1602 DPA10103-DPB10101 DPA10103-DPB10201 DPA10103-DPB11501 DPA10103-DPB13101 DPA10103-DPB13401 DPA10103-DPB14801 DPA10103-DPB15001 DPA10104-DPB10101 DPA10104-DPB11501 DPA10105-DPB10101 DPA10105-DPB15001 DPA10106-DPB10101 DPA10201-DPB10101 DPA10201-DPB11501 DPA10202-DPB10101 DPA10202-DPB10201 DPA10202-DPB10202 DPA10202-DPB10501 DPA10202-DPB110601 DPA10202-DPB11901 DPA10202-DPB13101 DPA10202-DPB13801 DPA10202-DPB16501 DPA10301-DPB10101 DPA10301-DPB10201 DPA10301-DPB10202 DPA10301-DPB10401 DPA10301-DPB10402 DPA10301-DPB110501 DPA10301-DPB110601 DPA10301-DPB11801 DPA10301-DPB12301 DPA10301-DPB13901 DPA10301-DPB14001 DPA10301-DPB14901 DPA10301-DPB15501 DPA10301-DPB16501 DPA10301-DPB17501 DPA10301-DPB18001 DPA10401-DPB10101 DPA10401-DPB10201; note = HLAs: DPA10401-DPB10202 DPA10401-DPB10501 DPA10401-DPB11401 DQA10102-DQB10501 DQA10103-DQB10501
QATWIPEWEFVNTPPLVKLWYQL

SEQ ID NO: 5101 - protein, 24 aa, Human immunodeficiency virus 1
  source 1..24: note = HLAs: DRB1_0101 DRB1_0401 DRB1_0405 DRB1_0408 DRB1_0410 DRB1_0701 DRB1_0801 DRB1_0813 DRB1_0901 DRB1_1001 DRB1_1101 DRB1_1102 DRB1_1114 DRB1_1301 DRB1_1302 DRB1_1303 DRB1_1304 DRB1_1305 DRB1_1312 DRB1_1402 DRB1_1406 DRB1_1502 DRB1_1601 DRB1_1602 DPA10103-DPB10101 DPA10103-DPB10201 DPA10103-DPB10202 DPA10103-DPB11501 DPA10103-DPB11601 DPA10103-DPB13101 DPA10103-DPB13401 DPA10103-DPB14001 DPA10103-DPB14101 DPA10103-DPB14801 DPA10103-DPB15001 DPA10104-DPB10101 DPA10104-DPB11501 DPA10105-DPB10101 DPA10105-DPB15001 DPA10106-DPB10101 DPA10201-DPB10101 DPA10201-DPB11501 DPA10202-DPB10101 DPA10202-DPB10201 DPA10202-DPB10202 DPA10202-DPB10501 DPA10202-DPB110601 DPA10202-DPB11801 DPA10202-DPB11901 DPA10202-DPB13101 DPA10202-DPB13801 DPA10202-DPB15501 DPA10202-DPB16501 DPA10301-DPB10101 DPA10301-DPB10201 DPA10301-DPB10202 DPA10301-DPB10401 DPA10301-DPB10402 DPA10301-DPB110501 DPA10301-DPB110601 DPA10301-DPB11801 DPA10301-DPB12301 DPA10301-DPB13901 DPA10301-DPB14001 DPA10301-DPB14901; note = HLAs: DPA10301-DPB15501 DPA10301-DPB16501 DPA10301-DPB17501 DPA10301-DPB18001 DPA10401-DPB10101 DPA10401-DPB10201 DPA10401-DPB10202 DPA10401-DPB10501 DPA10401-DPB11401 DQA10102-DQB10501 DQA10103-DQB10501
QATWIPEWEFVNTPPLVKLWYQLE

SEQ ID NO: 5102 - protein, 14 aa, Human immunodeficiency virus 1
  source 1..14: note = HLAs: DRB1_0101 DRB1_1001 DPA10301-DPB10101 DQA10102-DQB10501 DQA10102-DQB10601 DQA10103-DQB10601 DQA10201-DQB10301 DQA10201-DQB10303 DQA10301-DQB10301 DQA10302-DQB10301 DQA10303-DQB10301 DQA10401-DQB10301 DQA10401-DQB10319 DQA10501-DQB10301 DQA10501-DQB10319 DQA10503-DQB10301 DQA10505-DQB10301 DQA10505-DQB10309 DQA10505-DQB10319 DQA10505-DQB10402 DQA10506-DQB10303 DQA10508-DQB10301 DQA10509-DQB10301 DQA10601-DQB10301
QDFWEVQLGIPHPA

SEQ ID NO: 5103 - protein, 15 aa, Human immunodeficiency virus 1
  source 1..15: note = HLAs: DRB1_0101 DRB1_0102 DRB1_0901 DRB1_1001 DPA10103-DPB11501 DPA10104-DPB11501 DPA10301-DPB10101 DPA10301-DPB10201 DPA10301-DPB11801 DPA10401-DPB10101 DQA10101-DQB10601 DQA10102-DQB10501 DQA10102-DQB10503 DQA10102-DQB10601 DQA10103-DQB10601 DQA10103-DQB10602 DQA10201-DQB10301 DQA10201-DQB10303 DQA10301-DQB10301 DQA10301-DQB10304 DQA10302-DQB10301 DQA10302-DQB10304 DQA10303-DQB10301 DQA10303-DQB10304 DQA10401-DQB10301 DQA10401-DQB10319 DQA10501-DQB10301 DQA10501-DQB10319 DQA10503-DQB10301 DQA10505-DQB10301 DQA10505-DQB10309 DQA10505-DQB10319 DQA10505-DQB10402 DQA10506-DQB10303 DQA10508-DQB10301 DQA10509-DQB10301 DQA10601-DQB10301
QDFWEVQLGIPHPAG

SEQ ID NO: 5104 - protein, 16 aa, Human immunodeficiency virus 1
  source 1..16: note = HLAs: DRB1_0101 DRB1_0102 DRB1_0901 DRB1_1001 DPA10301-DPB10101 DPA10401-DPB10101 DQA10101-DQB10601 DQA10102-DQB10501 DQA10102-DQB10503 DQA10102-DQB10601 DQA10102-DQB10611 DQA10103-DQB10501 DQA10103-DQB10601 DQA10103-DQB10602 DQA10201-DQB10301 DQA10201-DQB10303 DQA10301-DQB10301 DQA10301-DQB10304 DQA10302-DQB10301 DQA10302-DQB10304 DQA10303-DQB10301 DQA10303-DQB10304 DQA10401-DQB10301 DQA10401-DQB10319 DQA10501-DQB10301 DQA10501-DQB10319 DQA10503-DQB10301 DQA10505-DQB10301 DQA10505-DQB10309 DQA10505-DQB10319 DQA10505-DQB10402 DQA10506-DQB10303 DQA10508-DQB10301 DQA10509-DQB10301 DQA10601-DQB10301
QDFWEVQLGIPHPAGL

SEQ ID NO: 5105 - protein, 17 aa, Human immunodeficiency virus 1
  source 1..17: note = HLAs: DRB1_0101 DRB1_0102 DRB1_0901 DRB1_1001 DPA10301-DPB10101 DPA10401-DPB10101 DQA10101-DQB10601 DQA10102-DQB10501 DQA10102-DQB10503 DQA10102-DQB10601 DQA10103-DQB10501 DQA10103-DQB10601 DQA10103-DQB10602 DQA10201-DQB10301 DQA10201-DQB10303 DQA10301-DQB10301 DQA10302-DQB10301 DQA10303-DQB10301 DQA10401-DQB10301 DQA10401-DQB10319 DQA10501-DQB10301 DQA10501-DQB10319 DQA10503-DQB10301 DQA10505-DQB10301 DQA10505-DQB10309 DQA10505-DQB10319 DQA10505-DQB10402 DQA10506-DQB10303 DQA10508-DQB10301 DQA10509-DQB10301 DQA10601-DQB10301
QDFWEVQLGIPHPAGLK

SEQ ID NO: 5106 - protein, 18 aa, Human immunodeficiency virus 1
  source 1..18: note = HLAs: DRB1_0101 DRB1_1001 DQA10102-DQB10501 DQA10102-DQB10503 DQA10102-DQB10601 DQA10103-DQB10601 DQA10201-DQB10301 DQA10201-DQB10303 DQA10301-DQB10301 DQA10302-DQB10301 DQA10303-DQB10301 DQA10401-DQB10301 DQA10401-DQB10319 DQA10501-DQB10301 DQA10501-DQB10319 DQA10503-DQB10301 DQA10505-DQB10301 DQA10505-DQB10309 DQA10505-DQB10319 DQA10505-DQB10402 DQA10506-DQB10303 DQA10508-DQB10301 DQA10509-DQB10301 DQA10601-DQB10301
QDFWEVQLGIPHPAGLKK

SEQ ID NO: 5107 - protein, 19 aa, Human immunodeficiency virus 1
  source 1..19: note = HLAs: DRB1_0101 DRB1_0102 DRB1_0901 DRB1_1001 DPA10301-DPB10101 DPA10401-DPB10101 DQA10101-DQB10601 DQA10102-DQB10501 DQA10102-DQB10503 DQA10102-DQB10601 DQA10103-DQB10501 DQA10103-DQB10601 DQA10103-DQB10602 DQA10201-DQB10301 DQA10201-DQB10303 DQA10301-DQB10301 DQA10302-DQB10301 DQA10303-DQB10301 DQA10401-DQB10301 DQA10401-DQB10319 DQA10501-DQB10301 DQA10501-DQB10319 DQA10503-DQB10301 DQA10505-DQB10301 DQA10505-DQB10309 DQA10505-DQB10319 DQA10505-DQB10402 DQA10506-DQB10303 DQA10508-DQB10301 DQA10509-DQB10301 DQA10601-DQB10301
QDFWEVQLGIPHPAGLKKK

SEQ ID NO: 5108 - protein, 20 aa, Human immunodeficiency virus 1
  source 1..20: note = HLAs: DRB1_0101 DRB1_0102 DRB1_0901 DRB1_1001 DRB1_1102 DRB1_1301 DPA10103-DPB15001 DPA10105-DPB15001 DPA10202-DPB10101 DPA10301-DPB10101 DPA10301-DPB11801 DPA10401-DPB10101 DQA10101-DQB10601 DQA10102-DQB10501 DQA10102-DQB10503 DQA10102-DQB10601 DQA10103-DQB10501 DQA10103-DQB10503 DQA10103-DQB10601 DQA10103-DQB10602 DQA10103-DQB10609 DQA10201-DQB10301 DQA10201-DQB10303 DQA10301-DQB10301 DQA10302-DQB10301 DQA10303-DQB10301 DQA10401-DQB10301 DQA10401-DQB10319 DQA10501-DQB10301 DQA10501-DQB10319 DQA10503-DQB10301 DQA10505-DQB10301 DQA10505-DQB10309 DQA10505-DQB10319 DQA10505-DQB10402 DQA10506-DQB10303 DQA10508-DQB10301 DQA10509-DQB10301 DQA10601-DQB10301
QDFWEVQLGIPHPAGLKKKK

SEQ ID NO: 5109 - protein, 21 aa, Human immunodeficiency virus 1
  source 1..21: note = HLAs: DRB1_0101 DRB1_0102 DRB1_0901 DRB1_1001 DPA10301-DPB10101 DQA10102-DQB10501 DQA10102-DQB10601 DQA10103-DQB10601 DQA10201-DQB10301 DQA10201-DQB10303 DQA10301-DQB10301 DQA10302-DQB10301 DQA10303-DQB10301 DQA10501-DQB10301 DQA10501-DQB10319 DQA10503-DQB10301 DQA10505-DQB10301 DQA10505-DQB10309 DQA10505-DQB10319 DQA10505-DQB10402 DQA10506-DQB10303 DQA10508-DQB10301 DQA10509-DQB10301 DQA10601-DQB10301
QDFWEVQLGIPHPAGLKKKKS

SEQ ID NO: 5110 - protein, 22 aa, Human immunodeficiency virus 1
  source 1..22: note = HLAs: DRB1_0101 DRB1_0102 DRB1_0901 DRB1_1001 DPA10301-DPB10101 DQA10102-DQB10501 DQA10102-DQB10601 DQA10103-DQB10601 DQA10201-DQB10301 DQA10201-DQB10303 DQA10301-DQB10301 DQA10302-DQB10301 DQA10303-DQB10301 DQA10501-DQB10301 DQA10501-DQB10319 DQA10503-DQB10301 DQA10505-DQB10301 DQA10505-DQB10309 DQA10505-DQB10319 DQA10505-DQB10402 DQA10506-DQB10303 DQA10508-DQB10301 DQA10509-DQB10301 DQA10601-DQB10301
QDFWEVQLGIPHPAGLKKKKSV

SEQ ID NO: 5111 - protein, 23 aa, Human immunodeficiency virus 1
  source 1..23: note = HLAs: DRB1_0101 DRB1_0102 DRB1_0901 DRB1_1001 DPA10301-DPB10101 DQA10102-DQB10501 DQA10102-DQB10601 DQA10103-DQB10601 DQA10201-DQB10301 DQA10201-DQB10303 DQA10301-DQB10301 DQA10302-DQB10301 DQA10303-DQB10301 DQA10501-DQB10301 DQA10501-DQB10319 DQA10503-DQB10301 DQA10505-DQB10301 DQA10505-DQB10309 DQA10505-DQB10319 DQA10505-DQB10402 DQA10506-DQB10303 DQA10508-DQB10301 DQA10509-DQB10301 DQA10601-DQB10301
QDFWEVQLGIPHPAGLKKKKSVT

SEQ ID NO: 5112 - protein, 24 aa, Human immunodeficiency virus 1
  source 1..24: note = HLAs: DRB1_0101 DRB1_0102 DRB1_0901 DRB1_1001 DRB1_1102 DRB1_1103 DRB1_1104 DRB1_1301 DRB1_1304 DPA10301-DPB10101 DQA10102-DQB10501 DQA10102-DQB10601 DQA10103-DQB10601 DQA10201-DQB10301 DQA10201-DQB10303 DQA10301-DQB10301 DQA10302-DQB10301 DQA10303-DQB10301 DQA10501-DQB10301 DQA10501-DQB10319 DQA10503-DQB10301 DQA10505-DQB10301 DQA10505-DQB10309 DQA10505-DQB10319 DQA10505-DQB10402 DQA10506-DQB10303 DQA10508-DQB10301 DQA10509-DQB10301 DQA10601-DQB10301
QDFWEVQLGIPHPAGLKKKKSVTV

SEQ ID NO: 5113 - protein, 25 aa, Human immunodeficiency virus 1
  source 1..25: note = HLAs: DRB1_0101 DRB1_0102 DRB1_0806 DRB1_0901 DRB1_1001 DRB1_1102 DRB1_1103 DRB1_1104 DRB1_1301 DRB1_1304 DRB1_1406 DPA10301-DPB10101 DPA10401-DPB10101 DQA10102-DQB10501 DQA10102-DQB10601 DQA10103-DQB10601 DQA10201-DQB10301 DQA10201-DQB10303 DQA10301-DQB10301 DQA10302-DQB10301 DQA10303-DQB10301 DQA10501-DQB10301 DQA10501-DQB10319 DQA10503-DQB10301 DQA10505-DQB10301 DQA10505-DQB10309 DQA10505-DQB10319 DQA10505-DQB10402 DQA10506-DQB10303 DQA10508-DQB10301 DQA10509-DQB10301 DQA10601-DQB10301
QDFWEVQLGIPHPAGLKKKKSVTVL

SEQ ID NO: 5114 - protein, 14 aa, Human immunodeficiency virus 1
  source 1..14: note = HLAs: DRB1_0404
QDLNTMLNTVGGHQ

SEQ ID NO: 5115 - protein, 15 aa, Human immunodeficiency virus 1
  source 1..15: note = HLAs: DRB1_0101 DRB1_0102 DRB1_0404 DRB1_0408 DRB1_0410 DRB1_1001 DQA10102-DQB10501
QDLNTMLNTVGGHQA

SEQ ID NO: 5116 - protein, 16 aa, Human immunodeficiency virus 1
  source 1..16: note = HLAs: DRB1_0101 DRB1_0404 DRB1_1001 DQA10102-DQB10501 DQA10102-DQB10601 DQA10103-DQB10601 DQA10201-DQB10301
QDLNTMLNTVGGHQAA

SEQ ID NO: 5117 - protein, 17 aa, Human immunodeficiency virus 1
  source 1..17: note = HLAs: DRB1_0101 DRB1_0404 DRB1_1001 DQA10102-DQB10501 DQA10102-DQB10601 DQA10103-DQB10601 DQA10201-DQB10301
QDLNTMLNTVGGHQAAM

SEQ ID NO: 5118 - protein, 19 aa, Human immunodeficiency virus 1
  source 1..19: note = HLAs: DRB1_0101 DRB1_1001 DQA10102-DQB10501 DQA10102-DQB10601 DQA10103-DQB10601 DQA10201-DQB10301 DQA10201-DQB10303
QDLNTMLNTVGGHQAAMQM

SEQ ID NO: 5119 - protein, 20 aa, Human immunodeficiency virus 1
  source 1..20: note = HLAs: DRB1_0101 DRB1_0404 DRB1_1001 DQA10102-DQB10501 DQA10102-DQB10601 DQA10102-DQB10602 DQA10102-DQB10609 DQA10102-DQB10611 DQA10103-DQB10501 DQA10103-DQB10601 DQA10103-DQB10602 DQA10103-DQB10609 DQA10201-DQB10301 DQA10201-DQB10303 DQA10505-DQB10402 DQA10506-DQB10303
QDLNTMLNTVGGHQAAMQML

SEQ ID NO: 5120 - protein, 21 aa, Human immunodeficiency virus 1
  source 1..21: note = HLAs: DRB1_0101 DRB1_0404 DRB1_1001 DQA10102-DQB10501 DQA10102-DQB10601 DQA10103-DQB10601 DQA10103-DQB10609 DQA10201-DQB10301 DQA10201-DQB10303
QDLNTMLNTVGGHQAAMQMLK

SEQ ID NO: 5121 - protein, 20 aa, Human immunodeficiency virus 1
  source 1..20: note = HLAs: DQA10201-DQB10301
QEFGIPYNPQSQGVVESMNK

SEQ ID NO: 5122 - protein, 15 aa, Human immunodeficiency virus 1
  source 1..15: note = HLAs: DQA10101-DQB10501 DQA10101-DQB10503 DQA10102-DQB10501 DQA10102-DQB10502 DQA10102-DQB10503 DQA10103-DQB10501 DQA10104-DQB10501 DQA10104-DQB10503 DQA10105-DQB10501 DQA10107-DQB10503
QGPKEPFRDYVDRFF

SEQ ID NO: 5123 - protein, 16 aa, Human immunodeficiency virus 1
  source 1..16: note = HLAs: DRB1_1501 DQA10101-DQB10501 DQA10101-DQB10503 DQA10102-DQB10501 DQA10102-DQB10502 DQA10102-DQB10503 DQA10102-DQB10604 DQA10103-DQB10501 DQA10104-DQB10501 DQA10104-DQB10503 DQA10105-DQB10501 DQA10107-DQB10503
QGPKEPFRDYVDRFFK

SEQ ID NO: 5124 - protein, 15 aa, Human immunodeficiency virus 1
  source 1..15: note = HLAs: DRB1_0804 DRB1_0806 DRB1_1101 DRB1_1102 DRB1_1103 DRB1_1104 DRB1_1114 DRB1_1301 DRB1_1302 DRB1_1304 DRB1_1305 DRB1_1406
QGVVESMNKELKKII

SEQ ID NO: 5125 - protein, 16 aa, Human immunodeficiency virus 1
  source 1..16: note = HLAs: DRB1_1103 DRB1_1104 DRB1_1304 DRB1_1406
QGVVESMNKELKKIIG

SEQ ID NO: 5126 - protein, 17 aa, Human immunodeficiency virus 1
  source 1..17: note = HLAs: DRB1_0806 DRB1_1102 DRB1_1103 DRB1_1104 DRB1_1301 DRB1_1304 DRB1_1406
QGVVESMNKELKKIIGQ

SEQ ID NO: 5127 - protein, 19 aa, Human immunodeficiency virus 1
  source 1..19: note = HLAs: DRB1_0806 DRB1_1101 DRB1_1102 DRB1_1103 DRB1_1104 DRB1_1301 DRB1_1304 DRB1_1305 DRB1_1406
QGVVESMNKELKKIIGQVR

SEQ ID NO: 5128 - protein, 14 aa, Human immunodeficiency virus 1
  source 1..14: note = HLAs: DRB1_0901 DRB1_1001 DQA10103-DQB10601 DQA10201-DQB10301 DQA10501-DQB10301 DQA10501-DQB10319 DQA10503-DQB10301 DQA10505-DQB10301 DQA10505-DQB10309 DQA10505-DQB10319 DQA10508-DQB10301 DQA10509-DQB10301
QGWKGSPAIFQSSM

SEQ ID NO: 5129 - protein, 13 aa, Human immunodeficiency virus 1
  source 1..13: note = HLAs: DQA10102-DQB10501
QIGCTLNFPISPI

SEQ ID NO: 5130 - protein, 14 aa, Human immunodeficiency virus 1
  source 1..14: note = HLAs: DQA10102-DQB10501
QIGCTLNFPISPIE

SEQ ID NO: 5131 - protein, 15 aa, Human immunodeficiency virus 1
  source 1..15: note = HLAs: DRB1_0101 DRB1_0410 DRB1_0701 DRB1_1001 DRB1_1114 DRB1_1302 DRB1_1501 DQA10102-DQB10501 DQA10103-DQB10501
QIGCTLNFPISPIET

SEQ ID NO: 5132 - protein, 16 aa, Human immunodeficiency virus 1
  source 1..16: note = HLAs: DPA10301-DPB10101 DPA10301-DPB10201 DPA10301-DPB10202 DPA10401-DPB10101 DQA10102-DQB10501 DQA10102-DQB10503 DQA10102-DQB10609 DQA10103-DQB10501 DQA10103-DQB10609
QIGCTLNFPISPIETV

SEQ ID NO: 5133 - protein, 17 aa, Human immunodeficiency virus 1
  source 1..17: note = HLAs: DPA10301-DPB10101 DPA10301-DPB10201 DPA10301-DPB10202 DPA10401-DPB10101 DQA10102-DQB10501 DQA10102-DQB10609 DQA10103-DQB10501
QIGCTLNFPISPIETVP

SEQ ID NO: 5134 - protein, 18 aa, Human immunodeficiency virus 1
  source 1..18: note = HLAs: DPA10301-DPB10101 DQA10102-DQB10501 DQA10102-DQB10609 DQA10103-DQB10609
QIGCTLNFPISPIETVPV

SEQ ID NO: 5135 - protein, 19 aa, Human immunodeficiency virus 1
  source 1..19: note = HLAs: DRB1_0101 DRB1_0404 DRB1_0405 DRB1_0408 DRB1_0410 DRB1_0701 DRB1_0813 DRB1_0901 DRB1_1001 DRB1_1114 DRB1_1302 DRB1_1404 DRB1_1602 DPA10103-DPB10101 DPA10103-DPB11501 DPA10104-DPB10101 DPA10104-DPB11501 DPA10105-DPB10101 DPA10202-DPB10101 DPA10301-DPB10101 DPA10301-DPB10201 DPA10301-DPB10202 DPA10301-DPB10401 DPA10301-DPB110601 DPA10301-DPB11801 DPA10301-DPB12301 DPA10301-DPB13901 DPA10301-DPB14001 DPA10301-DPB16501 DPA10401-DPB10101 DQA10102-DQB10501 DQA10102-DQB10503 DQA10102-DQB10601 DQA10102-DQB10609 DQA10103-DQB10501 DQA10103-DQB10601 DQA10103-DQB10609 DQA10201-DQB10303
QIGCTLNFPISPIETVPVK

SEQ ID NO: 5136 - protein, 20 aa, Human immunodeficiency virus 1
  source 1..20: note = HLAs: DRB1_0101 DRB1_0102 DRB1_0401 DRB1_0404 DRB1_0405 DRB1_0408 DRB1_0410 DRB1_0701 DRB1_0802 DRB1_0803 DRB1_0809 DRB1_0813 DRB1_0901 DRB1_1001 DRB1_1102 DRB1_1114 DRB1_1201 DRB1_1301 DRB1_1302 DRB1_1304 DRB1_1401 DRB1_1402 DRB1_1404 DRB1_1406 DRB1_1454 DRB1_1501 DRB1_1502 DRB1_1503 DRB1_1602 DPA10103-DPB10101 DPA10103-DPB11501 DPA10103-DPB13101 DPA10104-DPB10101 DPA10104-DPB11501 DPA10105-DPB10101 DPA10106-DPB10101 DPA10201-DPB10101 DPA10201-DPB11501 DPA10202-DPB10101 DPA10202-DPB10201 DPA10202-DPB110601 DPA10202-DPB11901 DPA10202-DPB13101 DPA10202-DPB15501 DPA10202-DPB16501 DPA10301-DPB10101 DPA10301-DPB10201 DPA10301-DPB10202 DPA10301-DPB10401 DPA10301-DPB10402 DPA10301-DPB110501 DPA10301-DPB110601 DPA10301-DPB11801 DPA10301-DPB12301 DPA10301-DPB13901 DPA10301-DPB14001 DPA10301-DPB14901 DPA10301-DPB15501 DPA10301-DPB16501 DPA10301-DPB17501 DPA10301-DPB18001 DPA10401-DPB10101 DPA10401-DPB10201 DPA10401-DPB10202 DQA10102-DQB10501 DQA10102-DQB10503 DQA10102-DQB10601; note = HLAs: DQA10102-DQB10609 DQA10103-DQB10501 DQA10103-DQB10601 DQA10103-DQB10602 DQA10103-DQB10604 DQA10103-DQB10608 DQA10103-DQB10609 DQA10201-DQB10301 DQA10201-DQB10303 DQA10505-DQB10402 DQA10506-DQB10303
QIGCTLNFPISPIETVPVKL

SEQ ID NO: 5137 - protein, 21 aa, Human immunodeficiency virus 1
  source 1..21: note = HLAs: DRB1_0101 DRB1_0102 DRB1_0401 DRB1_0404 DRB1_0405 DRB1_0408 DRB1_0410 DRB1_0701 DRB1_0802 DRB1_0803 DRB1_0804 DRB1_0806 DRB1_0809 DRB1_0813 DRB1_0901 DRB1_1001 DRB1_1102 DRB1_1114 DRB1_1201 DRB1_1301 DRB1_1302 DRB1_1304 DRB1_1401 DRB1_1402 DRB1_1404 DRB1_1406 DRB1_1454 DRB1_1501 DRB1_1502 DRB1_1602 DPA10103-DPB10101 DPA10103-DPB11501 DPA10104-DPB10101 DPA10104-DPB11501 DPA10105-DPB10101 DPA10202-DPB10101 DPA10202-DPB13101 DPA10301-DPB10101 DPA10301-DPB10201 DPA10301-DPB10202 DPA10301-DPB10401 DPA10301-DPB110601 DPA10301-DPB11801 DPA10301-DPB12301 DPA10301-DPB13901 DPA10301-DPB14001 DPA10301-DPB16501 DPA10401-DPB10101 DPA10401-DPB10201 DPA10401-DPB10202 DQA10102-DQB10501 DQA10102-DQB10503 DQA10102-DQB10601 DQA10102-DQB10609 DQA10103-DQB10501 DQA10103-DQB10601 DQA10103-DQB10609 DQA10505-DQB10402
QIGCTLNFPISPIETVPVKLK

SEQ ID NO: 5138 - protein, 22 aa, Human immunodeficiency virus 1
  source 1..22: note = HLAs: DRB1_0101 DRB1_0102 DRB1_0401 DRB1_0404 DRB1_0405 DRB1_0408 DRB1_0410 DRB1_0701 DRB1_0801 DRB1_0802 DRB1_0803 DRB1_0804 DRB1_0806 DRB1_0809 DRB1_0813 DRB1_0901 DRB1_1001 DRB1_1102 DRB1_1114 DRB1_1201 DRB1_1301 DRB1_1302 DRB1_1304 DRB1_1401 DRB1_1402 DRB1_1404 DRB1_1406 DRB1_1454 DRB1_1501 DRB1_1502 DRB1_1503 DRB1_1602 DPA10103-DPB10101 DPA10103-DPB11501 DPA10104-DPB10101 DPA10104-DPB11501 DPA10105-DPB10101 DPA10202-DPB10101 DPA10202-DPB110601 DPA10202-DPB11901 DPA10202-DPB13101 DPA10301-DPB10101 DPA10301-DPB10201 DPA10301-DPB10202 DPA10301-DPB10401 DPA10301-DPB110601 DPA10301-DPB11801 DPA10301-DPB12301 DPA10301-DPB13901 DPA10301-DPB14001 DPA10301-DPB16501 DPA10401-DPB10101 DPA10401-DPB10201 DPA10401-DPB10202 DQA10102-DQB10501 DQA10102-DQB10503 DQA10102-DQB10601 DQA10102-DQB10609 DQA10103-DQB10501 DQA10103-DQB10601 DQA10103-DQB10609 DQA10505-DQB10402
QIGCTLNFPISPIETVPVKLKP

SEQ ID NO: 5139 - protein, 23 aa, Human immunodeficiency virus 1
  source 1..23: note = HLAs: DRB1_0101 DRB1_0102 DRB1_0401 DRB1_0404 DRB1_0405 DRB1_0408 DRB1_0410 DRB1_0701 DRB1_0801 DRB1_0802 DRB1_0803 DRB1_0804 DRB1_0806 DRB1_0809 DRB1_0813 DRB1_0901 DRB1_1001 DRB1_1102 DRB1_1103 DRB1_1114 DRB1_1201 DRB1_1301 DRB1_1302 DRB1_1304 DRB1_1401 DRB1_1402 DRB1_1404 DRB1_1406 DRB1_1454 DRB1_1501 DRB1_1502 DRB1_1503 DRB1_1602 DPA10103-DPB10101 DPA10103-DPB11501 DPA10104-DPB10101 DPA10104-DPB11501 DPA10105-DPB10101 DPA10202-DPB10101 DPA10202-DPB110601 DPA10202-DPB11901 DPA10202-DPB13101 DPA10301-DPB10101 DPA10301-DPB10201 DPA10301-DPB10202 DPA10301-DPB10401 DPA10301-DPB110601 DPA10301-DPB11801 DPA10301-DPB12301 DPA10301-DPB13901 DPA10301-DPB14001 DPA10301-DPB16501 DPA10401-DPB10101 DPA10401-DPB10201 DPA10401-DPB10202 DQA10102-DQB10501 DQA10102-DQB10503 DQA10102-DQB10601 DQA10102-DQB10609 DQA10103-DQB10501 DQA10103-DQB10601 DQA10103-DQB10609 DQA10505-DQB10402
QIGCTLNFPISPIETVPVKLKPG

SEQ ID NO: 5140 - protein, 24 aa, Human immunodeficiency virus 1
  source 1..24: note = HLAs: DRB1_0101 DRB1_0102 DRB1_0401 DRB1_0404 DRB1_0405 DRB1_0408 DRB1_0410 DRB1_0701 DRB1_0801 DRB1_0802 DRB1_0803 DRB1_0804 DRB1_0806 DRB1_0809 DRB1_0813 DRB1_0901 DRB1_1001 DRB1_1102 DRB1_1103 DRB1_1104 DRB1_1114 DRB1_1201 DRB1_1301 DRB1_1302 DRB1_1304 DRB1_1401 DRB1_1402 DRB1_1404 DRB1_1406 DRB1_1454 DRB1_1501 DRB1_1502 DRB1_1503 DRB1_1601 DRB1_1602 DPA10103-DPB10101 DPA10103-DPB11501 DPA10104-DPB10101 DPA10104-DPB11501 DPA10105-DPB10101 DPA10202-DPB10101 DPA10202-DPB110601 DPA10202-DPB11901 DPA10202-DPB13101 DPA10301-DPB10101 DPA10301-DPB10201 DPA10301-DPB10202 DPA10301-DPB10401 DPA10301-DPB110601 DPA10301-DPB11801 DPA10301-DPB12301 DPA10301-DPB13901 DPA10301-DPB14001 DPA10301-DPB16501 DPA10401-DPB10101 DPA10401-DPB10201 DPA10401-DPB10202 DPA10401-DPB10501 DQA10102-DQB10501 DQA10102-DQB10503 DQA10102-DQB10601 DQA10102-DQB10609 DQA10103-DQB10501 DQA10103-DQB10601 DQA10103-DQB10609 DQA10505-DQB10402
QIGCTLNFPISPIETVPVKLKPGM

SEQ ID NO: 5141 - protein, 25 aa, Human immunodeficiency virus 1
  source 1..25: note = HLAs: DRB1_0101 DRB1_0102 DRB1_0401 DRB1_0404 DRB1_0405 DRB1_0408 DRB1_0410 DRB1_0701 DRB1_0801 DRB1_0802 DRB1_0803 DRB1_0804 DRB1_0806 DRB1_0809 DRB1_0813 DRB1_0901 DRB1_1001 DRB1_1102 DRB1_1103 DRB1_1104 DRB1_1114 DRB1_1201 DRB1_1301 DRB1_1302 DRB1_1304 DRB1_1312 DRB1_1401 DRB1_1402 DRB1_1404 DRB1_1406 DRB1_1454 DRB1_1501 DRB1_1502 DRB1_1503 DRB1_1601 DRB1_1602 DPA10103-DPB10101 DPA10103-DPB11501 DPA10103-DPB15001 DPA10104-DPB10101 DPA10104-DPB11501 DPA10105-DPB10101 DPA10105-DPB15001 DPA10202-DPB10101 DPA10202-DPB110601 DPA10202-DPB11901 DPA10202-DPB13101 DPA10301-DPB10101 DPA10301-DPB10201 DPA10301-DPB10202 DPA10301-DPB10401 DPA10301-DPB110601 DPA10301-DPB11801 DPA10301-DPB12301 DPA10301-DPB13901 DPA10301-DPB14001 DPA10301-DPB16501 DPA10401-DPB10101 DPA10401-DPB10201 DPA10401-DPB10202 DPA10401-DPB10501 DQA10102-DQB10501 DQA10102-DQB10503 DQA10102-DQB10601 DQA10102-DQB10609 DQA10103-DQB10501 DQA10103-DQB10601 DQA10103-DQB10609 DQA10201-DQB10303 DQA10505-DQB10402
QIGCTLNFPISPIETVPVKLKPGMD

SEQ ID NO: 5142 - protein, 13 aa, Human immunodeficiency virus 1
  source 1..13: note = HLAs: DRB1_0101 DRB1_0102 DRB1_0404 DRB1_0410 DRB1_0701 DRB1_0804 DRB1_0806 DRB1_0813 DRB1_1001 DRB1_1102 DRB1_1103 DRB1_1104 DRB1_1114 DRB1_1201 DRB1_1301 DRB1_1302 DRB1_1304 DRB1_1406 DRB1_1501 DRB1_1502 DRB1_1503 DRB1_1601 DRB1_1602 DPA10103-DPB11501 DPA10104-DPB11501 DPA10202-DPB10101 DPA10202-DPB110601 DPA10202-DPB11901 DPA10301-DPB10201 DPA10301-DPB10202 DPA10301-DPB11801 DPA10301-DPB14001 DQA10102-DQB10501 DQA10103-DQB10501
QITKIQNFRVYYR

SEQ ID NO: 5143 - protein, 14 aa, Human immunodeficiency virus 1
  source 1..14: note = HLAs: DRB1_0101 DRB1_0102 DRB1_0402 DRB1_0404 DRB1_0405 DRB1_0408 DRB1_0410 DRB1_0701 DRB1_0801 DRB1_0802 DRB1_0803 DRB1_0804 DRB1_0806 DRB1_0809 DRB1_0813 DRB1_1001 DRB1_1101 DRB1_1102 DRB1_1103 DRB1_1104 DRB1_1114 DRB1_1201 DRB1_1202 DRB1_1301 DRB1_1302 DRB1_1304 DRB1_1305 DRB1_1401 DRB1_1402 DRB1_1404 DRB1_1406 DRB1_1454 DRB1_1501 DRB1_1502 DRB1_1503 DRB1_1601 DRB1_1602 DPA10103-DPB11501 DPA10103-DPB13401 DPA10104-DPB11501 DPA10201-DPB11501 DPA10202-DPB10101 DPA10202-DPB10201 DPA10202-DPB10202 DPA10202-DPB10501 DPA10202-DPB110601 DPA10202-DPB11801 DPA10202-DPB11901 DPA10202-DPB13101 DPA10202-DPB13801 DPA10202-DPB16501 DPA10301-DPB10101 DPA10301-DPB10201 DPA10301-DPB10202 DPA10301-DPB110601 DPA10301-DPB11801 DPA10301-DPB14001 DPA10401-DPB10101 DPA10401-DPB10202 DQA10102-DQB10501 DQA10102-DQB10503 DQA10103-DQB10501 DQA10103-DQB10503 DQA10505-DQB10402
QITKIQNFRVYYRD

SEQ ID NO: 5144 - protein, 13 aa, Human immunodeficiency virus 1
  source 1..13: note = HLAs: DPA10103-DPB10201 DPA10103-DPB10202 DPA10103-DPB11501 DPA10103-DPB14801 DPA10104-DPB11501 DPA10301-DPB10201 DPA10401-DPB10201 DPA10401-DPB10202
QIYQEPFKNLKTG

SEQ ID NO: 5145 - protein, 14 aa, Human immunodeficiency virus 1
  source 1..14: note = HLAs: DPA10103-DPB10201 DPA10103-DPB10202 DPA10103-DPB10401 DPA10103-DPB112601 DPA10103-DPB11501 DPA10103-DPB11601 DPA10103-DPB12301 DPA10103-DPB13101 DPA10103-DPB13401 DPA10103-DPB13901 DPA10103-DPB14001 DPA10103-DPB14801 DPA10104-DPB11501 DPA10105-DPB10401 DPA10106-DPB10101 DPA10201-DPB10101 DPA10202-DPB10101 DPA10202-DPB13101 DPA10301-DPB10101 DPA10301-DPB10201 DPA10301-DPB10202 DPA10301-DPB10401 DPA10301-DPB11801 DPA10301-DPB12301 DPA10301-DPB13901 DPA10301-DPB14001 DPA10401-DPB10201 DPA10401-DPB10202
QIYQEPFKNLKTGK

SEQ ID NO: 5146 - protein, 15 aa, Human immunodeficiency virus 1
  source 1..15: note = HLAs: DRB1_0101 DRB1_1001 DRB1_1101 DRB1_1103 DRB1_1104 DRB1_1304 DRB1_1305 DRB1_1501 DRB1_1601 DRB1_1602 DPA10103-DPB10201 DPA10103-DPB10202 DPA10103-DPB10401 DPA10103-DPB112601 DPA10103-DPB11501 DPA10103-DPB11601 DPA10103-DPB12301 DPA10103-DPB13101 DPA10103-DPB13401 DPA10103-DPB13901 DPA10103-DPB14001 DPA10103-DPB14101 DPA10103-DPB14801 DPA10103-DPB15901 DPA10104-DPB11501 DPA10105-DPB10401 DPA10106-DPB10101 DPA10201-DPB10101 DPA10201-DPB11501 DPA10201-DPB11601 DPA10202-DPB10101 DPA10202-DPB10201 DPA10202-DPB10202 DPA10202-DPB110601 DPA10202-DPB11901 DPA10202-DPB13101 DPA10301-DPB10101 DPA10301-DPB10201 DPA10301-DPB10202 DPA10301-DPB10401 DPA10301-DPB10402 DPA10301-DPB110501 DPA10301-DPB110601 DPA10301-DPB11801 DPA10301-DPB12301 DPA10301-DPB13901 DPA10301-DPB14001 DPA10301-DPB14901 DPA10301-DPB18001 DPA10401-DPB10101 DPA10401-DPB10201 DPA10401-DPB10202
QIYQEPFKNLKTGKY

SEQ ID NO: 5147 - protein, 16 aa, Human immunodeficiency virus 1
  source 1..16: note = HLAs: DRB1_0101 DRB1_1001 DRB1_1101 DRB1_1104 DRB1_1305 DPA10103-DPB10201 DPA10103-DPB10202 DPA10103-DPB10401 DPA10103-DPB112601 DPA10103-DPB11501 DPA10103-DPB11601 DPA10103-DPB12301 DPA10103-DPB13101 DPA10103-DPB13401 DPA10103-DPB13901 DPA10103-DPB14001 DPA10103-DPB14101 DPA10103-DPB14801 DPA10104-DPB11501 DPA10105-DPB10401 DPA10106-DPB10101 DPA10201-DPB10101 DPA10201-DPB11501 DPA10202-DPB10101 DPA10202-DPB110601 DPA10202-DPB11901 DPA10202-DPB13101 DPA10301-DPB10101 DPA10301-DPB10201 DPA10301-DPB10202 DPA10301-DPB10401 DPA10301-DPB11801 DPA10301-DPB12301 DPA10301-DPB13901 DPA10301-DPB14001 DPA10401-DPB10101 DPA10401-DPB10201 DPA10401-DPB10202
QIYQEPFKNLKTGKYA

SEQ ID NO: 5148 - protein, 14 aa, Human immunodeficiency virus 1
  source 1..14: note = HLAs: DRB1_1001 DPA10103-DPB10101 DPA10103-DPB10201 DPA10103-DPB10202 DPA10103-DPB10401 DPA10103-DPB112601 DPA10103-DPB11501 DPA10103-DPB11601 DPA10103-DPB12301 DPA10103-DPB13101 DPA10103-DPB13401 DPA10103-DPB13901 DPA10103-DPB14001 DPA10103-DPB14801 DPA10104-DPB10101 DPA10104-DPB11501 DPA10105-DPB10101 DPA10105-DPB10401 DPA10106-DPB10101 DPA10201-DPB10101 DPA10201-DPB11501 DPA10202-DPB10101 DPA10202-DPB13101 DPA10202-DPB16501 DPA10301-DPB10101 DPA10301-DPB10201 DPA10301-DPB10202 DPA10301-DPB10401 DPA10301-DPB10402 DPA10301-DPB110501 DPA10301-DPB110601 DPA10301-DPB11801 DPA10301-DPB12301 DPA10301-DPB13901 DPA10301-DPB14001 DPA10301-DPB14901 DPA10301-DPB16501 DPA10301-DPB18001 DPA10401-DPB10101 DPA10401-DPB10201 DPA10401-DPB10202
QKEPPFLWMGYELH

SEQ ID NO: 5149 - protein, 15 aa, Human immunodeficiency virus 1
  source 1..15: note = HLAs: DRB1_0101 DRB1_1001 DRB1_1501 DRB1_1503 DPA10103-DPB10101 DPA10103-DPB10201 DPA10103-DPB10202 DPA10103-DPB10401 DPA10103-DPB112601 DPA10103-DPB11501 DPA10103-DPB11601 DPA10103-DPB11801 DPA10103-DPB11901 DPA10103-DPB12301 DPA10103-DPB13101 DPA10103-DPB13401 DPA10103-DPB13901 DPA10103-DPB14001 DPA10103-DPB14101 DPA10103-DPB14801 DPA10103-DPB15001 DPA10103-DPB15901 DPA10104-DPB10101 DPA10104-DPB11501 DPA10105-DPB10101 DPA10105-DPB10401 DPA10105-DPB11801 DPA10105-DPB15001 DPA10106-DPB10101 DPA10201-DPB10101 DPA10201-DPB10202 DPA10201-DPB110601 DPA10201-DPB11501 DPA10201-DPB11601 DPA10201-DPB11901 DPA10201-DPB13401 DPA10202-DPB10101 DPA10202-DPB10201 DPA10202-DPB10202 DPA10202-DPB10401 DPA10202-DPB110601 DPA10202-DPB11901 DPA10202-DPB13101 DPA10202-DPB16501 DPA10301-DPB10101 DPA10301-DPB10201 DPA10301-DPB10202 DPA10301-DPB10401 DPA10301-DPB10402 DPA10301-DPB110501 DPA10301-DPB110601 DPA10301-DPB11801 DPA10301-DPB12301 DPA10301-DPB13901 DPA10301-DPB14001 DPA10301-DPB14901; note = HLAs: DPA10301-DPB15501 DPA10301-DPB16501 DPA10301-DPB17501 DPA10301-DPB18001 DPA10401-DPB10101 DPA10401-DPB10201 DPA10401-DPB10202 DPA10401-DPB10402 DPA10401-DPB10501 DPA10401-DPB110501 DPA10401-DPB14901 DQA10102-DQB10501
QKEPPFLWMGYELHP

SEQ ID NO: 5150 - protein, 16 aa, Human immunodeficiency virus 1
  source 1..16: note = HLAs: DRB1_1001 DPA10103-DPB10101 DPA10103-DPB10201 DPA10103-DPB10202 DPA10103-DPB10401 DPA10103-DPB112601 DPA10103-DPB11501 DPA10103-DPB11601 DPA10103-DPB11801 DPA10103-DPB11901 DPA10103-DPB12301 DPA10103-DPB13101 DPA10103-DPB13401 DPA10103-DPB13901 DPA10103-DPB14001 DPA10103-DPB14101 DPA10103-DPB14801 DPA10103-DPB15001 DPA10103-DPB15901 DPA10104-DPB10101 DPA10104-DPB11501 DPA10105-DPB10101 DPA10105-DPB10401 DPA10105-DPB11801 DPA10105-DPB15001 DPA10106-DPB10101 DPA10201-DPB10101 DPA10201-DPB10202 DPA10201-DPB110601 DPA10201-DPB11501 DPA10201-DPB11601 DPA10201-DPB11901 DPA10201-DPB13401 DPA10202-DPB10101 DPA10202-DPB10201 DPA10202-DPB10202 DPA10202-DPB10401 DPA10202-DPB110601 DPA10202-DPB11901 DPA10202-DPB13101 DPA10202-DPB15501 DPA10202-DPB16501 DPA10301-DPB10101 DPA10301-DPB10201 DPA10301-DPB10202 DPA10301-DPB10401 DPA10301-DPB10402 DPA10301-DPB110501 DPA10301-DPB110601 DPA10301-DPB11301 DPA10301-DPB11801 DPA10301-DPB12301 DPA10301-DPB13901 DPA10301-DPB14001 DPA10301-DPB14901; note = HLAs: DPA10301-DPB15501 DPA10301-DPB16501 DPA10301-DPB17501 DPA10301-DPB18001 DPA10401-DPB10101 DPA10401-DPB10201 DPA10401-DPB10202 DPA10401-DPB10402 DPA10401-DPB10501 DPA10401-DPB110501 DPA10401-DPB14901 DQA10101-DQB10501 DQA10102-DQB10501 DQA10102-DQB10502 DQA10102-DQB10503 DQA10103-DQB10501 DQA10104-DQB10501 DQA10105-DQB10501
QKEPPFLWMGYELHPD

SEQ ID NO: 5151 - protein, 17 aa, Human immunodeficiency virus 1
  source 1..17: note = HLAs: DRB1_1001 DPA10103-DPB10101 DPA10103-DPB10201 DPA10103-DPB10202 DPA10103-DPB10401 DPA10103-DPB112601 DPA10103-DPB11501 DPA10103-DPB11601 DPA10103-DPB11801 DPA10103-DPB11901 DPA10103-DPB12301 DPA10103-DPB13101 DPA10103-DPB13401 DPA10103-DPB13901 DPA10103-DPB14001 DPA10103-DPB14101 DPA10103-DPB14801 DPA10103-DPB15001 DPA10103-DPB15901 DPA10104-DPB10101 DPA10104-DPB11501 DPA10105-DPB10101 DPA10105-DPB10401 DPA10105-DPB11801 DPA10105-DPB15001 DPA10106-DPB10101 DPA10201-DPB10101 DPA10201-DPB10202 DPA10201-DPB110601 DPA10201-DPB11501 DPA10201-DPB11601 DPA10201-DPB11901 DPA10201-DPB13401 DPA10202-DPB10101 DPA10202-DPB10201 DPA10202-DPB10202 DPA10202-DPB10401 DPA10202-DPB110601 DPA10202-DPB11901 DPA10202-DPB13101 DPA10202-DPB15501 DPA10202-DPB16501 DPA10301-DPB10101 DPA10301-DPB10201 DPA10301-DPB10202 DPA10301-DPB10401 DPA10301-DPB10402 DPA10301-DPB110501 DPA10301-DPB110601 DPA10301-DPB11801 DPA10301-DPB12301 DPA10301-DPB13901 DPA10301-DPB14001 DPA10301-DPB14901 DPA10301-DPB15501; note = HLAs: DPA10301-DPB16501 DPA10301-DPB17501 DPA10301-DPB18001 DPA10401-DPB10101 DPA10401-DPB10201 DPA10401-DPB10202 DPA10401-DPB10402 DPA10401-DPB10501 DPA10401-DPB110501 DPA10401-DPB14901 DQA10101-DQB10501 DQA10101-DQB10503 DQA10102-DQB10501 DQA10102-DQB10502 DQA10102-DQB10503 DQA10103-DQB10501 DQA10104-DQB10501 DQA10104-DQB10503 DQA10105-DQB10501 DQA10107-DQB10503
QKEPPFLWMGYELHPDK

SEQ ID NO: 5152 - protein, 18 aa, Human immunodeficiency virus 1
  source 1..18: note = HLAs: DPA10103-DPB10101 DPA10103-DPB10201 DPA10103-DPB10202 DPA10103-DPB10401 DPA10103-DPB112601 DPA10103-DPB11501 DPA10103-DPB11601 DPA10103-DPB12301 DPA10103-DPB13101 DPA10103-DPB13401 DPA10103-DPB13901 DPA10103-DPB14001 DPA10103-DPB14101 DPA10103-DPB14801 DPA10103-DPB15001 DPA10103-DPB15901 DPA10104-DPB10101 DPA10104-DPB11501 DPA10105-DPB10101 DPA10105-DPB10401 DPA10105-DPB15001 DPA10106-DPB10101 DPA10201-DPB10101 DPA10201-DPB11501 DPA10201-DPB11601 DPA10202-DPB10101 DPA10202-DPB10202 DPA10202-DPB110601 DPA10202-DPB11901 DPA10202-DPB13101 DPA10202-DPB16501 DPA10301-DPB10101 DPA10301-DPB10201 DPA10301-DPB10202 DPA10301-DPB10401 DPA10301-DPB10402 DPA10301-DPB110501 DPA10301-DPB110601 DPA10301-DPB11801 DPA10301-DPB12301 DPA10301-DPB13901 DPA10301-DPB14001 DPA10301-DPB14901 DPA10301-DPB15501 DPA10301-DPB16501 DPA10301-DPB18001 DPA10401-DPB10101 DPA10401-DPB10201 DPA10401-DPB10202 DQA10101-DQB10501 DQA10102-DQB10501 DQA10102-DQB10502 DQA10102-DQB10503 DQA10104-DQB10501 DQA10105-DQB10501
QKEPPFLWMGYELHPDKW

SEQ ID NO: 5153 - protein, 19 aa, Human immunodeficiency virus 1
  source 1..19: note = HLAs: DRB1_1001 DPA10103-DPB10101 DPA10103-DPB10201 DPA10103-DPB10202 DPA10103-DPB10401 DPA10103-DPB112601 DPA10103-DPB11501 DPA10103-DPB11601 DPA10103-DPB11801 DPA10103-DPB11901 DPA10103-DPB12301 DPA10103-DPB13101 DPA10103-DPB13401 DPA10103-DPB13901 DPA10103-DPB14001 DPA10103-DPB14101 DPA10103-DPB14801 DPA10103-DPB15001 DPA10103-DPB15901 DPA10104-DPB10101 DPA10104-DPB11501 DPA10105-DPB10101 DPA10105-DPB10401 DPA10105-DPB11801 DPA10105-DPB15001 DPA10106-DPB10101 DPA10201-DPB10101 DPA10201-DPB10201 DPA10201-DPB10202 DPA10201-DPB110601 DPA10201-DPB11501 DPA10201-DPB11601 DPA10201-DPB11901 DPA10201-DPB13401 DPA10202-DPB10101 DPA10202-DPB10201 DPA10202-DPB10202 DPA10202-DPB10401 DPA10202-DPB110601 DPA10202-DPB11901 DPA10202-DPB13101 DPA10202-DPB15501 DPA10202-DPB16501 DPA10301-DPB10101 DPA10301-DPB10201 DPA10301-DPB10202 DPA10301-DPB10401 DPA10301-DPB10402 DPA10301-DPB110501 DPA10301-DPB110601 DPA10301-DPB11101 DPA10301-DPB11301 DPA10301-DPB11801 DPA10301-DPB12301 DPA10301-DPB13901; note = HLAs: DPA10301-DPB14001 DPA10301-DPB14901 DPA10301-DPB15501 DPA10301-DPB16501 DPA10301-DPB17501 DPA10301-DPB18001 DPA10401-DPB10101 DPA10401-DPB10201 DPA10401-DPB10202 DPA10401-DPB10402 DPA10401-DPB10501 DPA10401-DPB110501 DPA10401-DPB14901 DQA10101-DQB10501 DQA10101-DQB10503 DQA10102-DQB10501 DQA10102-DQB10502 DQA10102-DQB10503 DQA10103-DQB10501 DQA10104-DQB10501 DQA10104-DQB10503 DQA10105-DQB10501 DQA10107-DQB10503
QKEPPFLWMGYELHPDKWT

SEQ ID NO: 5154 - protein, 20 aa, Human immunodeficiency virus 1
  source 1..20: note = HLAs: DRB1_0101 DRB1_0405 DRB1_1001 DRB1_1501 DRB1_1503 DRB1_1602 DPA10103-DPB10101 DPA10103-DPB10201 DPA10103-DPB10202 DPA10103-DPB10401 DPA10103-DPB10402 DPA10103-DPB10501 DPA10103-DPB110501 DPA10103-DPB11101 DPA10103-DPB112601 DPA10103-DPB11501 DPA10103-DPB11601 DPA10103-DPB11801 DPA10103-DPB11901 DPA10103-DPB12301 DPA10103-DPB13101 DPA10103-DPB13401 DPA10103-DPB13901 DPA10103-DPB14001 DPA10103-DPB14101 DPA10103-DPB14801 DPA10103-DPB14901 DPA10103-DPB15001 DPA10103-DPB15101 DPA10103-DPB15501 DPA10103-DPB15901 DPA10103-DPB18001 DPA10104-DPB10101 DPA10104-DPB11501 DPA10105-DPB10101 DPA10105-DPB10401 DPA10105-DPB11801 DPA10105-DPB15001 DPA10106-DPB10101 DPA10201-DPB10101 DPA10201-DPB10201 DPA10201-DPB10202 DPA10201-DPB10401 DPA10201-DPB10501 DPA10201-DPB110601 DPA10201-DPB11501 DPA10201-DPB11601 DPA10201-DPB11901 DPA10201-DPB13401 DPA10201-DPB15501 DPA10202-DPB10101 DPA10202-DPB10201 DPA10202-DPB10202 DPA10202-DPB10401 DPA10202-DPB10501 DPA10202-DPB110601 DPA10202-DPB11101; note = HLAs: DPA10202-DPB11301 DPA10202-DPB11801 DPA10202-DPB11901 DPA10202-DPB13101 DPA10202-DPB13801 DPA10202-DPB15501 DPA10202-DPB16501 DPA10301-DPB10101 DPA10301-DPB10201 DPA10301-DPB10202 DPA10301-DPB10401 DPA10301-DPB10402 DPA10301-DPB110501 DPA10301-DPB110601 DPA10301-DPB11101 DPA10301-DPB11301 DPA10301-DPB11801 DPA10301-DPB12301 DPA10301-DPB13901 DPA10301-DPB14001 DPA10301-DPB14901 DPA10301-DPB15501 DPA10301-DPB16501 DPA10301-DPB17501 DPA10301-DPB18001 DPA10401-DPB10101 DPA10401-DPB10201 DPA10401-DPB10202 DPA10401-DPB10402 DPA10401-DPB10501 DPA10401-DPB110501 DPA10401-DPB14901 DQA10101-DQB10501 DQA10101-DQB10503 DQA10102-DQB10501 DQA10102-DQB10502 DQA10102-DQB10503 DQA10103-DQB10501 DQA10104-DQB10501 DQA10104-DQB10503 DQA10105-DQB10501 DQA10107-DQB10503 DQA10505-DQB10402
QKEPPFLWMGYELHPDKWTV

SEQ ID NO: 5155 - protein, 21 aa, Human immunodeficiency virus 1
  source 1..21: note = HLAs: DRB1_1001 DPA10103-DPB10101 DPA10103-DPB10201 DPA10103-DPB10202 DPA10103-DPB10401 DPA10103-DPB112601 DPA10103-DPB11501 DPA10103-DPB11601 DPA10103-DPB11801 DPA10103-DPB11901 DPA10103-DPB12301 DPA10103-DPB13101 DPA10103-DPB13401 DPA10103-DPB13901 DPA10103-DPB14001 DPA10103-DPB14101 DPA10103-DPB14801 DPA10103-DPB15001 DPA10103-DPB15901 DPA10104-DPB10101 DPA10104-DPB11501 DPA10105-DPB10101 DPA10105-DPB10401 DPA10105-DPB11801 DPA10105-DPB15001 DPA10106-DPB10101 DPA10201-DPB10101 DPA10201-DPB110601 DPA10201-DPB11501 DPA10201-DPB11601 DPA10201-DPB11901 DPA10202-DPB10101 DPA10202-DPB10202 DPA10202-DPB10401 DPA10202-DPB110601 DPA10202-DPB11901 DPA10202-DPB13101 DPA10202-DPB16501 DPA10301-DPB10101 DPA10301-DPB10201 DPA10301-DPB10202 DPA10301-DPB10401 DPA10301-DPB10402 DPA10301-DPB110501 DPA10301-DPB110601 DPA10301-DPB11801 DPA10301-DPB12301 DPA10301-DPB13901 DPA10301-DPB14001 DPA10301-DPB14901 DPA10301-DPB15501 DPA10301-DPB16501 DPA10301-DPB17501 DPA10301-DPB18001 DPA10401-DPB10101; note = HLAs: DPA10401-DPB10201 DPA10401-DPB10202 DPA10401-DPB10402 DPA10401-DPB10501 DPA10401-DPB110501 DPA10401-DPB14901 DQA10101-DQB10501 DQA10102-DQB10501 DQA10102-DQB10502 DQA10102-DQB10503 DQA10103-DQB10501 DQA10104-DQB10501 DQA10105-DQB10501
QKEPPFLWMGYELHPDKWTVQ

SEQ ID NO: 5156 - protein, 22 aa, Human immunodeficiency virus 1
  source 1..22: note = HLAs: DRB1_1001 DPA10103-DPB10101 DPA10103-DPB10201 DPA10103-DPB10202 DPA10103-DPB10401 DPA10103-DPB112601 DPA10103-DPB11501 DPA10103-DPB11601 DPA10103-DPB11801 DPA10103-DPB11901 DPA10103-DPB12301 DPA10103-DPB13101 DPA10103-DPB13401 DPA10103-DPB13901 DPA10103-DPB14001 DPA10103-DPB14101 DPA10103-DPB14801 DPA10103-DPB15001 DPA10103-DPB15901 DPA10104-DPB10101 DPA10104-DPB11501 DPA10105-DPB10101 DPA10105-DPB10401 DPA10105-DPB11801 DPA10105-DPB15001 DPA10106-DPB10101 DPA10201-DPB10101 DPA10201-DPB110601 DPA10201-DPB11501 DPA10201-DPB11601 DPA10201-DPB11901 DPA10202-DPB10101 DPA10202-DPB10202 DPA10202-DPB10401 DPA10202-DPB110601 DPA10202-DPB11901 DPA10202-DPB13101 DPA10202-DPB16501 DPA10301-DPB10101 DPA10301-DPB10201 DPA10301-DPB10202 DPA10301-DPB10401 DPA10301-DPB10402 DPA10301-DPB110501 DPA10301-DPB110601 DPA10301-DPB11801 DPA10301-DPB12301 DPA10301-DPB13901 DPA10301-DPB14001 DPA10301-DPB14901 DPA10301-DPB15501 DPA10301-DPB16501 DPA10301-DPB17501 DPA10301-DPB18001 DPA10401-DPB10101; note = HLAs: DPA10401-DPB10201 DPA10401-DPB10202 DPA10401-DPB10402 DPA10401-DPB10501 DPA10401-DPB110501 DPA10401-DPB14901 DQA10101-DQB10501 DQA10102-DQB10501 DQA10102-DQB10502 DQA10102-DQB10503 DQA10103-DQB10501 DQA10104-DQB10501 DQA10105-DQB10501
QKEPPFLWMGYELHPDKWTVQP

SEQ ID NO: 5157 - protein, 23 aa, Human immunodeficiency virus 1
  source 1..23: note = HLAs: DRB1_1001 DPA10103-DPB10101 DPA10103-DPB10201 DPA10103-DPB10202 DPA10103-DPB10401 DPA10103-DPB112601 DPA10103-DPB11501 DPA10103-DPB11601 DPA10103-DPB11801 DPA10103-DPB11901 DPA10103-DPB12301 DPA10103-DPB13101 DPA10103-DPB13401 DPA10103-DPB13901 DPA10103-DPB14001 DPA10103-DPB14101 DPA10103-DPB14801 DPA10103-DPB15001 DPA10103-DPB15901 DPA10104-DPB10101 DPA10104-DPB11501 DPA10105-DPB10101 DPA10105-DPB10401 DPA10105-DPB11801 DPA10105-DPB15001 DPA10106-DPB10101 DPA10201-DPB10101 DPA10201-DPB110601 DPA10201-DPB11501 DPA10201-DPB11601 DPA10201-DPB11901 DPA10202-DPB10101 DPA10202-DPB10201 DPA10202-DPB10202 DPA10202-DPB10401 DPA10202-DPB110601 DPA10202-DPB11901 DPA10202-DPB13101 DPA10202-DPB16501 DPA10301-DPB10101 DPA10301-DPB10201 DPA10301-DPB10202 DPA10301-DPB10401 DPA10301-DPB10402 DPA10301-DPB110501 DPA10301-DPB110601 DPA10301-DPB11801 DPA10301-DPB12301 DPA10301-DPB13901 DPA10301-DPB14001 DPA10301-DPB14901 DPA10301-DPB15501 DPA10301-DPB16501 DPA10301-DPB17501 DPA10301-DPB18001; note = HLAs: DPA10401-DPB10101 DPA10401-DPB10201 DPA10401-DPB10202 DPA10401-DPB10402 DPA10401-DPB10501 DPA10401-DPB110501 DPA10401-DPB14901 DQA10101-DQB10501 DQA10102-DQB10501 DQA10102-DQB10502 DQA10102-DQB10503 DQA10103-DQB10501 DQA10104-DQB10501 DQA10105-DQB10501
QKEPPFLWMGYELHPDKWTVQPI

SEQ ID NO: 5158 - protein, 24 aa, Human immunodeficiency virus 1
  source 1..24: note = HLAs: DRB1_0405 DRB1_1001 DPA10103-DPB10101 DPA10103-DPB10201 DPA10103-DPB10202 DPA10103-DPB10401 DPA10103-DPB112601 DPA10103-DPB11501 DPA10103-DPB11601 DPA10103-DPB11801 DPA10103-DPB11901 DPA10103-DPB12301 DPA10103-DPB13101 DPA10103-DPB13401 DPA10103-DPB13901 DPA10103-DPB14001 DPA10103-DPB14101 DPA10103-DPB14801 DPA10103-DPB15001 DPA10103-DPB15901 DPA10104-DPB10101 DPA10104-DPB11501 DPA10105-DPB10101 DPA10105-DPB10401 DPA10105-DPB11801 DPA10105-DPB15001 DPA10106-DPB10101 DPA10201-DPB10101 DPA10201-DPB10202 DPA10201-DPB110601 DPA10201-DPB11501 DPA10201-DPB11601 DPA10201-DPB11901 DPA10202-DPB10101 DPA10202-DPB10201 DPA10202-DPB10202 DPA10202-DPB10401 DPA10202-DPB110601 DPA10202-DPB11901 DPA10202-DPB13101 DPA10202-DPB16501 DPA10301-DPB10101 DPA10301-DPB10201 DPA10301-DPB10202 DPA10301-DPB10401 DPA10301-DPB10402 DPA10301-DPB110501 DPA10301-DPB110601 DPA10301-DPB11801 DPA10301-DPB12301 DPA10301-DPB13901 DPA10301-DPB14001 DPA10301-DPB14901 DPA10301-DPB15501 DPA10301-DPB16501; note = HLAs: DPA10301-DPB17501 DPA10301-DPB18001 DPA10401-DPB10101 DPA10401-DPB10201 DPA10401-DPB10202 DPA10401-DPB10402 DPA10401-DPB10501 DPA10401-DPB110501 DPA10401-DPB14901 DQA10101-DQB10501 DQA10101-DQB10503 DQA10102-DQB10501 DQA10102-DQB10502 DQA10102-DQB10503 DQA10103-DQB10501 DQA10104-DQB10501 DQA10104-DQB10503 DQA10105-DQB10501 DQA10107-DQB10503 DQA10505-DQB10402
QKEPPFLWMGYELHPDKWTVQPIQ

SEQ ID NO: 5159 - protein, 25 aa, Human immunodeficiency virus 1
  source 1..25: note = HLAs: DRB1_0101 DRB1_0405 DRB1_1001 DPA10103-DPB10101 DPA10103-DPB10201 DPA10103-DPB10202 DPA10103-DPB10401 DPA10103-DPB112601 DPA10103-DPB11501 DPA10103-DPB11601 DPA10103-DPB11801 DPA10103-DPB11901 DPA10103-DPB12301 DPA10103-DPB13101 DPA10103-DPB13401 DPA10103-DPB13901 DPA10103-DPB14001 DPA10103-DPB14101 DPA10103-DPB14801 DPA10103-DPB15001 DPA10103-DPB15901 DPA10104-DPB10101 DPA10104-DPB11501 DPA10105-DPB10101 DPA10105-DPB10401 DPA10105-DPB11801 DPA10105-DPB15001 DPA10106-DPB10101 DPA10201-DPB10101 DPA10201-DPB10202 DPA10201-DPB110601 DPA10201-DPB11501 DPA10201-DPB11601 DPA10201-DPB11901 DPA10202-DPB10101 DPA10202-DPB10201 DPA10202-DPB10202 DPA10202-DPB10401 DPA10202-DPB10501 DPA10202-DPB110601 DPA10202-DPB11901 DPA10202-DPB13101 DPA10202-DPB13801 DPA10202-DPB15501 DPA10202-DPB16501 DPA10301-DPB10101 DPA10301-DPB10201 DPA10301-DPB10202 DPA10301-DPB10401 DPA10301-DPB10402 DPA10301-DPB110501 DPA10301-DPB110601 DPA10301-DPB11101 DPA10301-DPB11301 DPA10301-DPB11801 DPA10301-DPB12301; note = HLAs: DPA10301-DPB13901 DPA10301-DPB14001 DPA10301-DPB14901 DPA10301-DPB15501 DPA10301-DPB16501 DPA10301-DPB17501 DPA10301-DPB18001 DPA10401-DPB10101 DPA10401-DPB10201 DPA10401-DPB10202 DPA10401-DPB10402 DPA10401-DPB10501 DPA10401-DPB110501 DPA10401-DPB14901 DQA10101-DQB10501 DQA10101-DQB10503 DQA10102-DQB10501 DQA10102-DQB10502 DQA10102-DQB10503 DQA10103-DQB10501 DQA10104-DQB10501 DQA10104-DQB10503 DQA10105-DQB10501 DQA10107-DQB10503 DQA10505-DQB10402
QKEPPFLWMGYELHPDKWTVQPIQL

SEQ ID NO: 5160 - protein, 14 aa, Human immunodeficiency virus 1
  source 1..14: note = HLAs: DRB1_0101 DRB1_0804 DRB1_0806 DRB1_0813 DRB1_1001 DRB1_1102 DRB1_1114 DRB1_1301 DRB1_1302 DRB1_1304 DRB1_1501 DQA10102-DQB10501 DQA10103-DQB10501
QKLVGKLNWASQIY

SEQ ID NO: 5161 - protein, 15 aa, Human immunodeficiency virus 1
  source 1..15: note = HLAs: DRB1_0101 DRB1_0102 DRB1_0402 DRB1_0404 DRB1_0410 DRB1_0701 DRB1_0801 DRB1_0802 DRB1_0804 DRB1_0806 DRB1_0809 DRB1_0813 DRB1_0901 DRB1_1001 DRB1_1101 DRB1_1102 DRB1_1103 DRB1_1104 DRB1_1114 DRB1_1301 DRB1_1302 DRB1_1304 DRB1_1305 DRB1_1406 DRB1_1501 DRB1_1502 DRB1_1503 DRB1_1602 DPA10103-DPB11501 DPA10104-DPB11501 DPA10301-DPB11801 DQA10102-DQB10501 DQA10103-DQB10501 DQA10103-DQB10601
QKLVGKLNWASQIYP

SEQ ID NO: 5162 - protein, 16 aa, Human immunodeficiency virus 1
  source 1..16: note = HLAs: DRB1_0101 DRB1_0804 DRB1_0806 DRB1_0813 DRB1_1001 DRB1_1102 DRB1_1104 DRB1_1114 DRB1_1301 DRB1_1302 DRB1_1304 DRB1_1501 DQA10101-DQB10601 DQA10102-DQB10501 DQA10102-DQB10503 DQA10102-DQB10601 DQA10102-DQB10602 DQA10102-DQB10609 DQA10102-DQB10610 DQA10102-DQB10611 DQA10103-DQB10501 DQA10103-DQB10601 DQA10103-DQB10602 DQA10103-DQB10609 DQA10201-DQB10301 DQA10301-DQB10301 DQA10302-DQB10301 DQA10303-DQB10301 DQA10501-DQB10301 DQA10501-DQB10319 DQA10503-DQB10301 DQA10505-DQB10301 DQA10505-DQB10309 DQA10505-DQB10319 DQA10508-DQB10301 DQA10509-DQB10301 DQA10601-DQB10301
QKLVGKLNWASQIYPG

SEQ ID NO: 5163 - protein, 17 aa, Human immunodeficiency virus 1
  source 1..17: note = HLAs: DRB1_0101 DRB1_0804 DRB1_0806 DRB1_1001 DRB1_1102 DRB1_1103 DRB1_1104 DRB1_1114 DRB1_1301 DRB1_1302 DRB1_1304 DRB1_1406 DRB1_1501 DPA10103-DPB11501 DPA10104-DPB11501 DPA10301-DPB10101 DPA10301-DPB10201 DPA10301-DPB10202 DPA10301-DPB11801 DPA10301-DPB14001 DPA10401-DPB10101 DPA10401-DPB10201 DPA10401-DPB10202 DQA10101-DQB10601 DQA10101-DQB10602 DQA10102-DQB10501 DQA10102-DQB10503 DQA10102-DQB10601 DQA10102-DQB10602 DQA10102-DQB10603 DQA10102-DQB10609 DQA10102-DQB10610 DQA10102-DQB10611 DQA10102-DQB10614 DQA10103-DQB10501 DQA10103-DQB10601 DQA10103-DQB10602 DQA10103-DQB10603 DQA10103-DQB10609 DQA10103-DQB10614 DQA10104-DQB10602 DQA10105-DQB10602 DQA10201-DQB10301 DQA10201-DQB10303 DQA10301-DQB10301 DQA10302-DQB10301 DQA10303-DQB10301 DQA10501-DQB10301 DQA10501-DQB10319 DQA10503-DQB10301 DQA10505-DQB10301 DQA10505-DQB10309 DQA10505-DQB10319 DQA10508-DQB10301 DQA10509-DQB10301 DQA10601-DQB10301
QKLVGKLNWASQIYPGI

SEQ ID NO: 5164 - protein, 18 aa, Human immunodeficiency virus 1
  source 1..18: note = HLAs: DPA10103-DPB11501 DPA10104-DPB11501 DPA10301-DPB10201 DPA10301-DPB10202 DQA10101-DQB10601 DQA10102-DQB10501 DQA10102-DQB10503 DQA10102-DQB10601 DQA10102-DQB10602 DQA10102-DQB10609 DQA10102-DQB10610 DQA10102-DQB10611 DQA10103-DQB10501 DQA10103-DQB10601 DQA10103-DQB10602 DQA10103-DQB10609 DQA10201-DQB10301
QKLVGKLNWASQIYPGIK

SEQ ID NO: 5165 - protein, 19 aa, Human immunodeficiency virus 1
  source 1..19: note = HLAs: DRB1_0101 DRB1_0806 DRB1_1001 DRB1_1102 DRB1_1114 DRB1_1301 DRB1_1302 DRB1_1304 DRB1_1501 DRB1_1502 DRB1_1602 DPA10103-DPB10101 DPA10103-DPB10201 DPA10103-DPB10202 DPA10103-DPB11501 DPA10103-DPB13401 DPA10103-DPB14801 DPA10104-DPB10101 DPA10104-DPB11501 DPA10105-DPB10101 DPA10202-DPB10101 DPA10202-DPB10202 DPA10301-DPB10101 DPA10301-DPB10201 DPA10301-DPB10202 DPA10301-DPB10401 DPA10301-DPB110601 DPA10301-DPB11801 DPA10301-DPB12301 DPA10301-DPB13901 DPA10301-DPB14001 DPA10301-DPB16501 DPA10401-DPB10101 DPA10401-DPB10201 DPA10401-DPB10202 DQA10101-DQB10601 DQA10101-DQB10602 DQA10102-DQB10501 DQA10102-DQB10503 DQA10102-DQB10601 DQA10102-DQB10602 DQA10102-DQB10603 DQA10102-DQB10609 DQA10102-DQB10610 DQA10102-DQB10611 DQA10102-DQB10614 DQA10103-DQB10501 DQA10103-DQB10503 DQA10103-DQB10601 DQA10103-DQB10602 DQA10103-DQB10603 DQA10103-DQB10608 DQA10103-DQB10609 DQA10103-DQB10614 DQA10104-DQB10602 DQA10105-DQB10602 DQA10201-DQB10301 DQA10201-DQB10303 DQA10301-DQB10301 DQA10302-DQB10301; note = HLAs: DQA10303-DQB10301 DQA10501-DQB10301 DQA10501-DQB10319 DQA10503-DQB10301 DQA10505-DQB10301 DQA10505-DQB10309 DQA10505-DQB10319 DQA10505-DQB10402 DQA10506-DQB10303 DQA10508-DQB10301 DQA10509-DQB10301 DQA10601-DQB10301
QKLVGKLNWASQIYPGIKV

SEQ ID NO: 5166 - protein, 13 aa, Human immunodeficiency virus 1
  source 1..13: note = HLAs: DRB1_0101 DRB1_0102 DRB1_0404 DRB1_0405 DRB1_0408 DRB1_0410 DRB1_0701 DRB1_0806 DRB1_0813 DRB1_1001 DRB1_1102 DRB1_1103 DRB1_1114 DRB1_1201 DRB1_1301 DRB1_1302 DRB1_1304 DRB1_1404 DRB1_1406 DRB1_1501 DRB1_1502 DRB1_1503 DRB1_1601 DRB1_1602 DPA10202-DPB10101 DPA10301-DPB10201 DPA10301-DPB10202 DQA10102-DQB10501
QKQITKIQNFRVY

SEQ ID NO: 5167 - protein, 14 aa, Human immunodeficiency virus 1
  source 1..14: note = HLAs: DRB1_0101 DRB1_0102 DRB1_0103 DRB1_0401 DRB1_0402 DRB1_0404 DRB1_0405 DRB1_0408 DRB1_0410 DRB1_0701 DRB1_0801 DRB1_0802 DRB1_0803 DRB1_0804 DRB1_0806 DRB1_0809 DRB1_0813 DRB1_0901 DRB1_1001 DRB1_1101 DRB1_1102 DRB1_1103 DRB1_1104 DRB1_1114 DRB1_1201 DRB1_1202 DRB1_1301 DRB1_1302 DRB1_1304 DRB1_1305 DRB1_1401 DRB1_1402 DRB1_1404 DRB1_1405 DRB1_1406 DRB1_1454 DRB1_1501 DRB1_1502 DRB1_1503 DRB1_1601 DRB1_1602 DPA10103-DPB11501 DPA10103-DPB13401 DPA10104-DPB11501 DPA10201-DPB11501 DPA10202-DPB10101 DPA10202-DPB10201 DPA10202-DPB10202 DPA10202-DPB10501 DPA10202-DPB110601 DPA10202-DPB11801 DPA10202-DPB11901 DPA10202-DPB13101 DPA10202-DPB13801 DPA10202-DPB15501 DPA10202-DPB16501 DPA10301-DPB10101 DPA10301-DPB10201 DPA10301-DPB10202 DPA10301-DPB10401 DPA10301-DPB110601 DPA10301-DPB11801 DPA10301-DPB12301 DPA10301-DPB13901 DPA10301-DPB14001 DPA10301-DPB16501 DPA10401-DPB10101 DPA10401-DPB10201 DPA10401-DPB10202 DQA10102-DQB10501 DQA10103-DQB10501
QKQITKIQNFRVYY

SEQ ID NO: 5168 - protein, 15 aa, Human immunodeficiency virus 1
  source 1..15: note = HLAs: DRB1_0101 DRB1_0102 DRB1_0103 DRB1_0401 DRB1_0402 DRB1_0403 DRB1_0404 DRB1_0405 DRB1_0406 DRB1_0408 DRB1_0410 DRB1_0411 DRB1_0701 DRB1_0801 DRB1_0802 DRB1_0803 DRB1_0804 DRB1_0806 DRB1_0809 DRB1_0813 DRB1_0901 DRB1_1001 DRB1_1101 DRB1_1102 DRB1_1103 DRB1_1104 DRB1_1114 DRB1_1201 DRB1_1202 DRB1_1301 DRB1_1302 DRB1_1303 DRB1_1304 DRB1_1305 DRB1_1312 DRB1_1401 DRB1_1402 DRB1_1403 DRB1_1404 DRB1_1405 DRB1_1406 DRB1_1407 DRB1_1418 DRB1_1454 DRB1_1501 DRB1_1502 DRB1_1503 DRB1_1601 DRB1_1602 DPA10103-DPB10101 DPA10103-DPB10201 DPA10103-DPB10202 DPA10103-DPB10501 DPA10103-DPB11501 DPA10103-DPB11601 DPA10103-DPB11801 DPA10103-DPB11901 DPA10103-DPB13101 DPA10103-DPB13401 DPA10103-DPB14001 DPA10103-DPB14101 DPA10103-DPB14801 DPA10103-DPB15001 DPA10103-DPB15901 DPA10104-DPB10101 DPA10104-DPB11501 DPA10105-DPB10101 DPA10105-DPB11801 DPA10105-DPB15001 DPA10106-DPB10101 DPA10201-DPB10101 DPA10201-DPB10201 DPA10201-DPB10202 DPA10201-DPB10501 DPA10201-DPB110601 DPA10201-DPB11501; note = HLAs: DPA10201-DPB11601 DPA10201-DPB11801 DPA10201-DPB11901 DPA10201-DPB13401 DPA10202-DPB10101 DPA10202-DPB10201 DPA10202-DPB10202 DPA10202-DPB10401 DPA10202-DPB10402 DPA10202-DPB10501 DPA10202-DPB110001 DPA10202-DPB110501 DPA10202-DPB110601 DPA10202-DPB11101 DPA10202-DPB11301 DPA10202-DPB11801 DPA10202-DPB11901 DPA10202-DPB12101 DPA10202-DPB13001 DPA10202-DPB13101 DPA10202-DPB13801 DPA10202-DPB15501 DPA10202-DPB16501 DPA10301-DPB10101 DPA10301-DPB10201 DPA10301-DPB10202 DPA10301-DPB10401 DPA10301-DPB10402 DPA10301-DPB110501 DPA10301-DPB110601 DPA10301-DPB11801 DPA10301-DPB12301 DPA10301-DPB13901 DPA10301-DPB14001 DPA10301-DPB14901 DPA10301-DPB16501 DPA10301-DPB17501 DPA10301-DPB18001 DPA10401-DPB10101 DPA10401-DPB10201 DPA10401-DPB10202 DPA10401-DPB10501 DQA10102-DQB10501 DQA10102-DQB10503 DQA10103-DQB10501 DQA10103-DQB10503 DQA10103-DQB10601 DQA10103-DQB10608 DQA10103-DQB10609 DQA10501-DQB10501 DQA10505-DQB10402 DQA10505-DQB10501
QKQITKIQNFRVYYR

SEQ ID NO: 5169 - protein, 16 aa, Human immunodeficiency virus 1
  source 1..16: note = HLAs: DRB1_0101 DRB1_0102 DRB1_0103 DRB1_0401 DRB1_0402 DRB1_0404 DRB1_0405 DRB1_0408 DRB1_0410 DRB1_0701 DRB1_0801 DRB1_0802 DRB1_0803 DRB1_0804 DRB1_0806 DRB1_0809 DRB1_0813 DRB1_0901 DRB1_1001 DRB1_1101 DRB1_1102 DRB1_1103 DRB1_1104 DRB1_1114 DRB1_1201 DRB1_1202 DRB1_1301 DRB1_1302 DRB1_1303 DRB1_1304 DRB1_1305 DRB1_1312 DRB1_1401 DRB1_1402 DRB1_1403 DRB1_1404 DRB1_1405 DRB1_1406 DRB1_1454 DRB1_1501 DRB1_1502 DRB1_1503 DRB1_1601 DRB1_1602 DPA10103-DPB10101 DPA10103-DPB10201 DPA10103-DPB10202 DPA10103-DPB10501 DPA10103-DPB11501 DPA10103-DPB11601 DPA10103-DPB11801 DPA10103-DPB11901 DPA10103-DPB13101 DPA10103-DPB13401 DPA10103-DPB14001 DPA10103-DPB14101 DPA10103-DPB14801 DPA10103-DPB15001 DPA10104-DPB10101 DPA10104-DPB11501 DPA10105-DPB10101 DPA10105-DPB11801 DPA10105-DPB15001 DPA10106-DPB10101 DPA10201-DPB10101 DPA10201-DPB10202 DPA10201-DPB10501 DPA10201-DPB110601 DPA10201-DPB11501 DPA10201-DPB11601 DPA10201-DPB11801 DPA10201-DPB11901 DPA10201-DPB13401 DPA10202-DPB10101; note = HLAs: DPA10202-DPB10201 DPA10202-DPB10202 DPA10202-DPB10401 DPA10202-DPB10402 DPA10202-DPB10501 DPA10202-DPB110001 DPA10202-DPB110501 DPA10202-DPB110601 DPA10202-DPB11101 DPA10202-DPB11301 DPA10202-DPB11801 DPA10202-DPB11901 DPA10202-DPB12101 DPA10202-DPB13001 DPA10202-DPB13101 DPA10202-DPB13801 DPA10202-DPB15501 DPA10202-DPB16501 DPA10301-DPB10101 DPA10301-DPB10201 DPA10301-DPB10202 DPA10301-DPB10401 DPA10301-DPB10402 DPA10301-DPB110501 DPA10301-DPB110601 DPA10301-DPB11801 DPA10301-DPB12301 DPA10301-DPB13901 DPA10301-DPB14001 DPA10301-DPB14901 DPA10301-DPB16501 DPA10301-DPB17501 DPA10301-DPB18001 DPA10401-DPB10101 DPA10401-DPB10201 DPA10401-DPB10202 DPA10401-DPB10501 DQA10102-DQB10501 DQA10102-DQB10503 DQA10102-DQB10609 DQA10103-DQB10501 DQA10103-DQB10503 DQA10103-DQB10601 DQA10103-DQB10608 DQA10103-DQB10609 DQA10505-DQB10402
QKQITKIQNFRVYYRD

SEQ ID NO: 5170 - protein, 14 aa, Human immunodeficiency virus 1
  source 1..14: note = HLAs: DRB1_0101
QLDCTHLEGKIILV

SEQ ID NO: 5171 - protein, 15 aa, Human immunodeficiency virus 1
  source 1..15: note = HLAs: DRB1_0101 DRB1_0102 DRB1_0701 DRB1_0901 DRB1_1001 DRB1_1304 DRB1_1501 DRB1_1602 DPA10103-DPB11501 DPA10104-DPB11501 DPA10301-DPB10101 DPA10301-DPB10201 DPA10301-DPB10202 DPA10301-DPB110601 DPA10301-DPB11801 DPA10301-DPB14001 DPA10401-DPB10201 DPA10401-DPB10202 DQA10102-DQB10501
QLDCTHLEGKIILVA

SEQ ID NO: 5172 - protein, 16 aa, Human immunodeficiency virus 1
  source 1..16: note = HLAs: DRB1_0101 DRB1_1001 DPA10103-DPB11501 DPA10104-DPB11501 DPA10301-DPB10101 DPA10301-DPB10201 DPA10301-DPB10202 DPA10301-DPB110601 DPA10301-DPB11801 DPA10301-DPB14001 DPA10401-DPB10101 DPA10401-DPB10201 DPA10401-DPB10202 DQA10102-DQB10501
QLDCTHLEGKIILVAV

SEQ ID NO: 5173 - protein, 17 aa, Human immunodeficiency virus 1
  source 1..17: note = HLAs: DRB1_0101 DRB1_0102 DRB1_1001 DPA10103-DPB11501 DPA10104-DPB11501 DPA10301-DPB10101 DPA10301-DPB10201 DPA10301-DPB10202 DPA10301-DPB10401 DPA10301-DPB110601 DPA10301-DPB11801 DPA10301-DPB12301 DPA10301-DPB13901 DPA10301-DPB14001 DPA10301-DPB16501 DPA10401-DPB10101 DPA10401-DPB10201 DPA10401-DPB10202 DQA10102-DQB10501 DQA10102-DQB10601 DQA10103-DQB10601
QLDCTHLEGKIILVAVH

SEQ ID NO: 5174 - protein, 18 aa, Human immunodeficiency virus 1
  source 1..18: note = HLAs: DRB1_0101 DPA10103-DPB11501 DPA10104-DPB11501 DPA10301-DPB10101 DPA10301-DPB10201 DPA10301-DPB10202 DPA10301-DPB110601 DPA10301-DPB11801 DPA10401-DPB10101 DQA10102-DQB10501
QLDCTHLEGKIILVAVHV

SEQ ID NO: 5175 - protein, 19 aa, Human immunodeficiency virus 1
  source 1..19: note = HLAs: DRB1_0101 DRB1_1001 DPA10103-DPB11501 DPA10104-DPB11501 DPA10301-DPB10101 DPA10301-DPB10201 DPA10301-DPB10202 DPA10301-DPB10401 DPA10301-DPB110601 DPA10301-DPB11801 DPA10301-DPB12301 DPA10301-DPB13901 DPA10301-DPB14001 DPA10301-DPB16501 DPA10401-DPB10101 DPA10401-DPB10201 DPA10401-DPB10202 DQA10102-DQB10501 DQA10102-DQB10601 DQA10102-DQB10609 DQA10103-DQB10501 DQA10103-DQB10609
QLDCTHLEGKIILVAVHVA

SEQ ID NO: 5176 - protein, 20 aa, Human immunodeficiency virus 1
  source 1..20: note = HLAs: DRB1_0101 DRB1_0102 DRB1_0404 DRB1_0408 DRB1_0813 DRB1_1001 DRB1_1406 DRB1_1501 DPA10103-DPB10101 DPA10103-DPB11501 DPA10103-DPB11901 DPA10103-DPB15001 DPA10104-DPB10101 DPA10104-DPB11501 DPA10105-DPB10101 DPA10105-DPB15001 DPA10202-DPB10101 DPA10202-DPB110601 DPA10202-DPB11901 DPA10301-DPB10101 DPA10301-DPB10201 DPA10301-DPB10202 DPA10301-DPB10401 DPA10301-DPB10402 DPA10301-DPB110501 DPA10301-DPB110601 DPA10301-DPB11801 DPA10301-DPB12301 DPA10301-DPB13901 DPA10301-DPB14001 DPA10301-DPB14901 DPA10301-DPB16501 DPA10301-DPB17501 DPA10301-DPB18001 DPA10401-DPB10101 DPA10401-DPB10201 DPA10401-DPB10202 DPA10401-DPB10501 DQA10102-DQB10501 DQA10102-DQB10503 DQA10102-DQB10601 DQA10102-DQB10609 DQA10103-DQB10501 DQA10103-DQB10601 DQA10103-DQB10609
QLDCTHLEGKIILVAVHVAS

SEQ ID NO: 5177 - protein, 21 aa, Human immunodeficiency virus 1
  source 1..21: note = HLAs: DRB1_0101 DRB1_0404 DRB1_1001 DRB1_1406 DPA10103-DPB11501 DPA10104-DPB11501 DPA10301-DPB10101 DPA10301-DPB10201 DPA10301-DPB10202 DPA10301-DPB110601 DPA10301-DPB11801 DPA10301-DPB14001 DPA10301-DPB16501 DPA10401-DPB10101 DQA10102-DQB10501 DQA10103-DQB10501 DQA10103-DQB10609
QLDCTHLEGKIILVAVHVASG

SEQ ID NO: 5178 - protein, 22 aa, Human immunodeficiency virus 1
  source 1..22: note = HLAs: DRB1_0101 DRB1_0102 DRB1_0404 DRB1_0408 DRB1_0410 DRB1_0813 DRB1_1001 DRB1_1406 DPA10103-DPB11501 DPA10104-DPB11501 DPA10301-DPB10101 DPA10301-DPB10201 DPA10301-DPB10202 DPA10301-DPB110601 DPA10301-DPB11801 DPA10301-DPB14001 DPA10301-DPB16501 DPA10401-DPB10101 DPA10401-DPB10202 DQA10102-DQB10501 DQA10103-DQB10501 DQA10103-DQB10601 DQA10103-DQB10609
QLDCTHLEGKIILVAVHVASGY

SEQ ID NO: 5179 - protein, 20 aa, Human immunodeficiency virus 1
  source 1..20: note = HLAs: DRB1_0101 DRB1_1102 DRB1_1103 DRB1_1301 DRB1_1304
QLGIPHPAGLKKKKSVTVLD

SEQ ID NO: 5180 - protein, 21 aa, Human immunodeficiency virus 1
  source 1..21: note = HLAs: DRB1_0101 DRB1_1102 DRB1_1103 DRB1_1104 DRB1_1301 DRB1_1304 DPA10301-DPB10101 DPA10301-DPB110601 DPA10301-DPB16501 DPA10401-DPB10101
QLGIPHPAGLKKKKSVTVLDV

SEQ ID NO: 5181 - protein, 22 aa, Human immunodeficiency virus 1
  source 1..22: note = HLAs: DRB1_0101 DRB1_0806 DRB1_1102 DRB1_1103 DRB1_1104 DRB1_1301 DRB1_1304 DPA10103-DPB15001 DPA10105-DPB15001 DPA10301-DPB10101 DPA10301-DPB10201 DPA10301-DPB10202 DPA10301-DPB110601 DPA10301-DPB11801 DPA10301-DPB16501 DPA10401-DPB10101
QLGIPHPAGLKKKKSVTVLDVG

SEQ ID NO: 5182 - protein, 23 aa, Human immunodeficiency virus 1
  source 1..23: note = HLAs: DRB1_0101 DRB1_0806 DRB1_1102 DRB1_1103 DRB1_1104 DRB1_1301 DRB1_1304 DPA10103-DPB15001 DPA10105-DPB15001 DPA10301-DPB10101 DPA10301-DPB10201 DPA10301-DPB10202 DPA10301-DPB110601 DPA10301-DPB11801 DPA10301-DPB16501 DPA10401-DPB10101
QLGIPHPAGLKKKKSVTVLDVGD

SEQ ID NO: 5183 - protein, 24 aa, Human immunodeficiency virus 1
  source 1..24: note = HLAs: DRB1_0101 DRB1_0806 DRB1_1001 DRB1_1102 DRB1_1103 DRB1_1104 DRB1_1301 DRB1_1304 DPA10103-DPB10101 DPA10103-DPB11501 DPA10103-DPB15001 DPA10104-DPB10101 DPA10104-DPB11501 DPA10105-DPB10101 DPA10105-DPB15001 DPA10202-DPB10101 DPA10202-DPB110601 DPA10202-DPB11901 DPA10301-DPB10101 DPA10301-DPB10201 DPA10301-DPB10202 DPA10301-DPB110601 DPA10301-DPB11801 DPA10301-DPB16501 DPA10401-DPB10101 DPA10401-DPB10501
QLGIPHPAGLKKKKSVTVLDVGDA

SEQ ID NO: 5184 - protein, 25 aa, Human immunodeficiency virus 1
  source 1..25: note = HLAs: DRB1_0101 DRB1_0806 DRB1_1001 DRB1_1102 DRB1_1103 DRB1_1104 DRB1_1301 DRB1_1304 DRB1_1406 DPA10103-DPB10101 DPA10103-DPB11501 DPA10103-DPB15001 DPA10104-DPB10101 DPA10104-DPB11501 DPA10105-DPB10101 DPA10105-DPB15001 DPA10202-DPB10101 DPA10202-DPB110601 DPA10202-DPB11901 DPA10301-DPB10101 DPA10301-DPB10201 DPA10301-DPB10202 DPA10301-DPB110601 DPA10301-DPB11801 DPA10301-DPB14001 DPA10301-DPB16501 DPA10401-DPB10101 DPA10401-DPB10501 DQA10102-DQB10501
QLGIPHPAGLKKKKSVTVLDVGDAY

SEQ ID NO: 5185 - protein, 13 aa, Human immunodeficiency virus 1
  source 1..13: note = HLAs: DRB1_1101 DRB1_1103 DRB1_1104 DRB1_1305
QMAVFIHNFKRKG

SEQ ID NO: 5186 - protein, 14 aa, Human immunodeficiency virus 1
  source 1..14: note = HLAs: DRB1_0804 DRB1_0806 DRB1_1101 DRB1_1102 DRB1_1103 DRB1_1104 DRB1_1301 DRB1_1304 DRB1_1305 DRB1_1406 DRB1_1601
QMAVFIHNFKRKGG

SEQ ID NO: 5187 - protein, 15 aa, Human immunodeficiency virus 1
  source 1..15: note = HLAs: DRB1_0101 DRB1_0801 DRB1_0802 DRB1_0804 DRB1_0806 DRB1_0809 DRB1_1001 DRB1_1101 DRB1_1102 DRB1_1103 DRB1_1104 DRB1_1114 DRB1_1202 DRB1_1301 DRB1_1302 DRB1_1303 DRB1_1304 DRB1_1305 DRB1_1312 DRB1_1402 DRB1_1406 DRB1_1501 DRB1_1503 DRB1_1601 DRB1_1602 DPA10103-DPB11501 DPA10103-DPB13401 DPA10103-DPB14101 DPA10104-DPB11501 DPA10202-DPB10202 DPA10202-DPB10501 DPA10202-DPB110601 DPA10202-DPB11801 DPA10202-DPB11901 DPA10202-DPB13801 DPA10301-DPB10201 DPA10301-DPB10202 DPA10301-DPB11801 DPA10301-DPB14001
QMAVFIHNFKRKGGI

SEQ ID NO: 5188 - protein, 16 aa, Human immunodeficiency virus 1
  source 1..16: note = HLAs: DRB1_0801 DRB1_0802 DRB1_0804 DRB1_0806 DRB1_0809 DRB1_1101 DRB1_1102 DRB1_1103 DRB1_1104 DRB1_1301 DRB1_1304 DRB1_1305 DRB1_1406 DRB1_1501 DRB1_1601 DPA10202-DPB110601 DPA10202-DPB11901 DPA10301-DPB14001
QMAVFIHNFKRKGGIG

SEQ ID NO: 5189 - protein, 17 aa, Human immunodeficiency virus 1
  source 1..17: note = HLAs: DRB1_0801 DRB1_0802 DRB1_0804 DRB1_0806 DRB1_0809 DRB1_1101 DRB1_1102 DRB1_1103 DRB1_1104 DRB1_1301 DRB1_1304 DRB1_1305 DRB1_1406 DRB1_1501 DRB1_1601
QMAVFIHNFKRKGGIGG

SEQ ID NO: 5190 - protein, 18 aa, Human immunodeficiency virus 1
  source 1..18: note = HLAs: DRB1_0806 DRB1_1101 DRB1_1102 DRB1_1103 DRB1_1104 DRB1_1301 DRB1_1304 DRB1_1305
QMAVFIHNFKRKGGIGGY

SEQ ID NO: 5191 - protein, 19 aa, Human immunodeficiency virus 1
  source 1..19: note = HLAs: DRB1_0801 DRB1_0802 DRB1_0804 DRB1_0806 DRB1_0809 DRB1_1101 DRB1_1102 DRB1_1103 DRB1_1104 DRB1_1301 DRB1_1304 DRB1_1305 DRB1_1406
QMAVFIHNFKRKGGIGGYS

SEQ ID NO: 5192 - protein, 20 aa, Human immunodeficiency virus 1
  source 1..20: note = HLAs: DRB1_0101 DRB1_0801 DRB1_0802 DRB1_0804 DRB1_0806 DRB1_0809 DRB1_1001 DRB1_1101 DRB1_1102 DRB1_1103 DRB1_1104 DRB1_1301 DRB1_1304 DRB1_1305 DRB1_1406 DRB1_1501 DRB1_1601 DPA10202-DPB10501 DPA10202-DPB110601 DPA10202-DPB11901 DPA10202-DPB13801
QMAVFIHNFKRKGGIGGYSA

SEQ ID NO: 5193 - protein, 21 aa, Human immunodeficiency virus 1
  source 1..21: note = HLAs: DRB1_0801 DRB1_0802 DRB1_0804 DRB1_0806 DRB1_0809 DRB1_1101 DRB1_1102 DRB1_1103 DRB1_1104 DRB1_1301 DRB1_1304 DRB1_1305 DRB1_1406 DRB1_1601
QMAVFIHNFKRKGGIGGYSAG

SEQ ID NO: 5194 - protein, 22 aa, Human immunodeficiency virus 1
  source 1..22: note = HLAs: DRB1_0801 DRB1_0802 DRB1_0804 DRB1_0806 DRB1_0809 DRB1_1101 DRB1_1102 DRB1_1103 DRB1_1104 DRB1_1301 DRB1_1304 DRB1_1305 DRB1_1406 DRB1_1601
QMAVFIHNFKRKGGIGGYSAGE

SEQ ID NO: 5195 - protein, 23 aa, Human immunodeficiency virus 1
  source 1..23: note = HLAs: DRB1_0801 DRB1_0802 DRB1_0804 DRB1_0806 DRB1_0809 DRB1_1101 DRB1_1102 DRB1_1103 DRB1_1104 DRB1_1301 DRB1_1304 DRB1_1305 DRB1_1406 DRB1_1601
QMAVFIHNFKRKGGIGGYSAGER

SEQ ID NO: 5196 - protein, 24 aa, Human immunodeficiency virus 1
  source 1..24: note = HLAs: DRB1_0801 DRB1_0802 DRB1_0804 DRB1_0806 DRB1_0809 DRB1_1101 DRB1_1102 DRB1_1103 DRB1_1104 DRB1_1301 DRB1_1304 DRB1_1305 DRB1_1406 DRB1_1601
QMAVFIHNFKRKGGIGGYSAGERI

SEQ ID NO: 5197 - protein, 25 aa, Human immunodeficiency virus 1
  source 1..25: note = HLAs: DRB1_0801 DRB1_0802 DRB1_0804 DRB1_0806 DRB1_0809 DRB1_1101 DRB1_1102 DRB1_1103 DRB1_1104 DRB1_1301 DRB1_1304 DRB1_1305 DRB1_1406 DRB1_1601
QMAVFIHNFKRKGGIGGYSAGERII

SEQ ID NO: 5198 - protein, 13 aa, Human immunodeficiency virus 1
  source 1..13: note = HLAs: DQA10201-DQB10301 DQA10501-DQB10301 DQA10501-DQB10319 DQA10503-DQB10301 DQA10505-DQB10301 DQA10505-DQB10309 DQA10505-DQB10319 DQA10508-DQB10301 DQA10509-DQB10301
QMREPRGSDIAGT

SEQ ID NO: 5199 - protein, 14 aa, Human immunodeficiency virus 1
  source 1..14: note = HLAs: DQA10201-DQB10301 DQA10301-DQB10301 DQA10302-DQB10301 DQA10303-DQB10301 DQA10401-DQB10301 DQA10401-DQB10319 DQA10501-DQB10301 DQA10501-DQB10319 DQA10503-DQB10301 DQA10505-DQB10301 DQA10505-DQB10309 DQA10505-DQB10319 DQA10508-DQB10301 DQA10509-DQB10301 DQA10601-DQB10301
QMREPRGSDIAGTT

SEQ ID NO: 5200 - protein, 15 aa, Human immunodeficiency virus 1
  source 1..15: note = HLAs: DQA10102-DQB10601 DQA10201-DQB10301 DQA10201-DQB10303 DQA10301-DQB10301 DQA10302-DQB10301 DQA10303-DQB10301 DQA10401-DQB10301 DQA10401-DQB10319 DQA10501-DQB10301 DQA10501-DQB10319 DQA10503-DQB10301 DQA10505-DQB10301 DQA10505-DQB10309 DQA10505-DQB10319 DQA10506-DQB10303 DQA10508-DQB10301 DQA10509-DQB10301 DQA10601-DQB10301
QMREPRGSDIAGTTS

SEQ ID NO: 5201 - protein, 16 aa, Human immunodeficiency virus 1
  source 1..16: note = HLAs: DQA10102-DQB10601 DQA10201-DQB10301 DQA10201-DQB10303 DQA10301-DQB10301 DQA10302-DQB10301 DQA10303-DQB10301 DQA10401-DQB10301 DQA10401-DQB10319 DQA10501-DQB10301 DQA10501-DQB10319 DQA10503-DQB10301 DQA10505-DQB10301 DQA10505-DQB10309 DQA10505-DQB10319 DQA10506-DQB10303 DQA10508-DQB10301 DQA10509-DQB10301 DQA10601-DQB10301
QMREPRGSDIAGTTST

SEQ ID NO: 5202 - protein, 17 aa, Human immunodeficiency virus 1
  source 1..17: note = HLAs: DQA10201-DQB10301 DQA10301-DQB10301 DQA10302-DQB10301 DQA10303-DQB10301 DQA10401-DQB10301 DQA10401-DQB10319 DQA10501-DQB10301 DQA10501-DQB10319 DQA10503-DQB10301 DQA10505-DQB10301 DQA10505-DQB10309 DQA10505-DQB10319 DQA10506-DQB10303 DQA10508-DQB10301 DQA10509-DQB10301 DQA10601-DQB10301
QMREPRGSDIAGTTSTL

SEQ ID NO: 5203 - protein, 18 aa, Human immunodeficiency virus 1
  source 1..18: note = HLAs: DQA10201-DQB10301 DQA10301-DQB10301 DQA10302-DQB10301 DQA10303-DQB10301 DQA10401-DQB10301 DQA10401-DQB10319 DQA10501-DQB10301 DQA10501-DQB10319 DQA10503-DQB10301 DQA10505-DQB10301 DQA10505-DQB10309 DQA10505-DQB10319 DQA10508-DQB10301 DQA10509-DQB10301 DQA10601-DQB10301
QMREPRGSDIAGTTSTLQ

SEQ ID NO: 5204 - protein, 19 aa, Human immunodeficiency virus 1
  source 1..19: note = HLAs: DQA10102-DQB10601 DQA10201-DQB10301 DQA10201-DQB10303 DQA10301-DQB10301 DQA10302-DQB10301 DQA10303-DQB10301 DQA10401-DQB10301 DQA10401-DQB10319 DQA10501-DQB10301 DQA10501-DQB10319 DQA10503-DQB10301 DQA10505-DQB10301 DQA10505-DQB10309 DQA10505-DQB10319 DQA10506-DQB10303 DQA10508-DQB10301 DQA10509-DQB10301 DQA10601-DQB10301
QMREPRGSDIAGTTSTLQE

SEQ ID NO: 5205 - protein, 20 aa, Human immunodeficiency virus 1
  source 1..20: note = HLAs: DQA10102-DQB10601 DQA10103-DQB10601 DQA10201-DQB10301 DQA10201-DQB10303 DQA10301-DQB10301 DQA10302-DQB10301 DQA10303-DQB10301 DQA10401-DQB10301 DQA10401-DQB10319 DQA10501-DQB10301 DQA10501-DQB10319 DQA10503-DQB10301 DQA10505-DQB10301 DQA10505-DQB10309 DQA10505-DQB10319 DQA10506-DQB10303 DQA10508-DQB10301 DQA10509-DQB10301 DQA10601-DQB10301
QMREPRGSDIAGTTSTLQEQ

SEQ ID NO: 5206 - protein, 21 aa, Human immunodeficiency virus 1
  source 1..21: note = HLAs: DQA10102-DQB10601 DQA10103-DQB10601 DQA10201-DQB10301 DQA10201-DQB10303 DQA10301-DQB10301 DQA10302-DQB10301 DQA10303-DQB10301 DQA10501-DQB10301 DQA10501-DQB10319 DQA10503-DQB10301 DQA10505-DQB10301 DQA10505-DQB10309 DQA10505-DQB10319 DQA10506-DQB10303 DQA10508-DQB10301 DQA10509-DQB10301 DQA10601-DQB10301
QMREPRGSDIAGTTSTLQEQI

SEQ ID NO: 5207 - protein, 15 aa, Human immunodeficiency virus 1
  source 1..15: note = HLAs: DRB1_1104
QNANPDCKTILKALG

SEQ ID NO: 5208 - protein, 15 aa, Human immunodeficiency virus 1
  source 1..15: note = HLAs: DRB1_1102 DRB1_1103 DRB1_1104 DRB1_1301 DRB1_1304 DRB1_1406
QSQGVVESMNKELKK

SEQ ID NO: 5209 - protein, 17 aa, Human immunodeficiency virus 1
  source 1..17: note = HLAs: DRB1_1102 DRB1_1103 DRB1_1104 DRB1_1301 DRB1_1304 DRB1_1406
QSQGVVESMNKELKKII

SEQ ID NO: 5210 - protein, 19 aa, Human immunodeficiency virus 1
  source 1..19: note = HLAs: DRB1_1103 DRB1_1104 DRB1_1304 DRB1_1406
QSQGVVESMNKELKKIIGQ

SEQ ID NO: 5211 - protein, 20 aa, Human immunodeficiency virus 1
  source 1..20: note = HLAs: DRB1_0804 DRB1_0806 DRB1_1101 DRB1_1102 DRB1_1103 DRB1_1104 DRB1_1114 DRB1_1301 DRB1_1302 DRB1_1304 DRB1_1305 DRB1_1406
QSQGVVESMNKELKKIIGQV

SEQ ID NO: 5212 - protein, 21 aa, Human immunodeficiency virus 1
  source 1..21: note = HLAs: DRB1_0804 DRB1_0806 DRB1_1101 DRB1_1102 DRB1_1103 DRB1_1104 DRB1_1301 DRB1_1304 DRB1_1305 DRB1_1406
QSQGVVESMNKELKKIIGQVR

SEQ ID NO: 5213 - protein, 20 aa, Human immunodeficiency virus 1
  source 1..20: note = HLAs: DRB1_0401 DRB1_0405 DRB1_1303
QVDCSPGIWQLDCTHLEGKI

SEQ ID NO: 5214 - protein, 21 aa, Human immunodeficiency virus 1
  source 1..21: note = HLAs: DRB1_0401 DRB1_0405
QVDCSPGIWQLDCTHLEGKII

SEQ ID NO: 5215 - protein, 13 aa, Human immunodeficiency virus 1
  source 1..13: note = HLAs: DRB1_0701 DRB1_1114 DRB1_1302 DPA10301-DPB10201 DPA10301-DPB10202 DQA10103-DQB10601
QVDKLVSSGIRKV

SEQ ID NO: 5216 - protein, 14 aa, Human immunodeficiency virus 1
  source 1..14: note = HLAs: DRB1_0101 DRB1_0102 DRB1_0701 DRB1_0806 DRB1_0813 DRB1_0901 DRB1_1001 DRB1_1102 DRB1_1103 DRB1_1104 DRB1_1114 DRB1_1301 DRB1_1302 DRB1_1304 DRB1_1401 DRB1_1404 DRB1_1406 DRB1_1454 DPA10103-DPB10201 DPA10103-DPB10202 DPA10103-DPB11501 DPA10103-DPB13401 DPA10103-DPB14801 DPA10104-DPB11501 DPA10201-DPB11501 DPA10202-DPB10101 DPA10202-DPB10201 DPA10202-DPB10202 DPA10202-DPB110601 DPA10202-DPB11801 DPA10202-DPB11901 DPA10202-DPB13101 DPA10202-DPB16501 DPA10301-DPB10101 DPA10301-DPB10201 DPA10301-DPB10202 DPA10301-DPB10401 DPA10301-DPB10402 DPA10301-DPB110501 DPA10301-DPB110601 DPA10301-DPB11801 DPA10301-DPB12301 DPA10301-DPB13901 DPA10301-DPB14001 DPA10301-DPB14901 DPA10301-DPB16501 DPA10301-DPB17501 DPA10301-DPB18001 DPA10401-DPB10101 DPA10401-DPB10201 DPA10401-DPB10202 DQA10102-DQB10501 DQA10102-DQB10601 DQA10102-DQB10602 DQA10102-DQB10609 DQA10103-DQB10501 DQA10103-DQB10601 DQA10103-DQB10602 DQA10103-DQB10609 DQA10201-DQB10301 DQA10201-DQB10303 DQA10505-DQB10402
QVDKLVSSGIRKVL

SEQ ID NO: 5217 - protein, 15 aa, Human immunodeficiency virus 1
  source 1..15: note = HLAs: DRB1_0101 DRB1_0102 DRB1_0103 DRB1_0401 DRB1_0404 DRB1_0408 DRB1_0410 DRB1_0701 DRB1_0801 DRB1_0802 DRB1_0803 DRB1_0804 DRB1_0806 DRB1_0809 DRB1_0813 DRB1_0901 DRB1_1001 DRB1_1101 DRB1_1102 DRB1_1103 DRB1_1104 DRB1_1114 DRB1_1201 DRB1_1202 DRB1_1301 DRB1_1302 DRB1_1303 DRB1_1304 DRB1_1305 DRB1_1312 DRB1_1401 DRB1_1402 DRB1_1403 DRB1_1404 DRB1_1405 DRB1_1406 DRB1_1407 DRB1_1418 DRB1_1454 DRB1_1501 DRB1_1502 DRB1_1503 DRB1_1601 DRB1_1602 DPA10103-DPB10101 DPA10103-DPB10201 DPA10103-DPB10202 DPA10103-DPB10401 DPA10103-DPB112601 DPA10103-DPB11501 DPA10103-DPB11601 DPA10103-DPB11801 DPA10103-DPB11901 DPA10103-DPB12301 DPA10103-DPB13101 DPA10103-DPB13401 DPA10103-DPB13901 DPA10103-DPB14001 DPA10103-DPB14101 DPA10103-DPB14801 DPA10103-DPB15001 DPA10103-DPB15901 DPA10104-DPB10101 DPA10104-DPB11501 DPA10105-DPB10101 DPA10105-DPB10401 DPA10105-DPB11801 DPA10105-DPB15001 DPA10106-DPB10101 DPA10201-DPB10101 DPA10201-DPB10201 DPA10201-DPB10202 DPA10201-DPB110601 DPA10201-DPB11501; note = HLAs: DPA10201-DPB11601 DPA10201-DPB11801 DPA10201-DPB11901 DPA10201-DPB13401 DPA10202-DPB10101 DPA10202-DPB10201 DPA10202-DPB10202 DPA10202-DPB10401 DPA10202-DPB10501 DPA10202-DPB10901 DPA10202-DPB110601 DPA10202-DPB11401 DPA10202-DPB11801 DPA10202-DPB11901 DPA10202-DPB12901 DPA10202-DPB13101 DPA10202-DPB13801 DPA10202-DPB15501 DPA10202-DPB16501 DPA10301-DPB10101 DPA10301-DPB10201 DPA10301-DPB10202 DPA10301-DPB10401 DPA10301-DPB10402 DPA10301-DPB110501 DPA10301-DPB110601 DPA10301-DPB11801 DPA10301-DPB12301 DPA10301-DPB13901 DPA10301-DPB14001 DPA10301-DPB14901 DPA10301-DPB15501 DPA10301-DPB16501 DPA10301-DPB17501 DPA10301-DPB18001 DPA10401-DPB10101 DPA10401-DPB10201 DPA10401-DPB10202 DPA10401-DPB10402 DPA10401-DPB10501 DPA10401-DPB110501 DPA10401-DPB11401 DPA10401-DPB14901 DQA10101-DQB10601 DQA10102-DQB10501 DQA10102-DQB10601 DQA10102-DQB10602 DQA10102-DQB10609 DQA10102-DQB10611 DQA10103-DQB10501 DQA10103-DQB10601 DQA10103-DQB10602 DQA10103-DQB10604 DQA10103-DQB10608 DQA10103-DQB10609; note = HLAs: DQA10201-DQB10301 DQA10201-DQB10303 DQA10501-DQB10301 DQA10501-DQB10319 DQA10503-DQB10301 DQA10505-DQB10301 DQA10505-DQB10309 DQA10505-DQB10319 DQA10505-DQB10402 DQA10506-DQB10303 DQA10508-DQB10301 DQA10509-DQB10301 DQA10601-DQB10301
QVDKLVSSGIRKVLF

SEQ ID NO: 5218 - protein, 16 aa, Human immunodeficiency virus 1
  source 1..16: note = HLAs: DRB1_0101 DRB1_0102 DRB1_0404 DRB1_0410 DRB1_0701 DRB1_0801 DRB1_0802 DRB1_0803 DRB1_0804 DRB1_0806 DRB1_0809 DRB1_0813 DRB1_0901 DRB1_1001 DRB1_1101 DRB1_1102 DRB1_1103 DRB1_1104 DRB1_1114 DRB1_1201 DRB1_1301 DRB1_1302 DRB1_1303 DRB1_1304 DRB1_1305 DRB1_1312 DRB1_1401 DRB1_1402 DRB1_1403 DRB1_1404 DRB1_1405 DRB1_1406 DRB1_1454 DRB1_1501 DRB1_1502 DRB1_1503 DRB1_1601 DRB1_1602 DPA10103-DPB10101 DPA10103-DPB10201 DPA10103-DPB10202 DPA10103-DPB10401 DPA10103-DPB10501 DPA10103-DPB112601 DPA10103-DPB11501 DPA10103-DPB11601 DPA10103-DPB11801 DPA10103-DPB11901 DPA10103-DPB12301 DPA10103-DPB13101 DPA10103-DPB13401 DPA10103-DPB13901 DPA10103-DPB14001 DPA10103-DPB14101 DPA10103-DPB14801 DPA10103-DPB15001 DPA10103-DPB15901 DPA10104-DPB10101 DPA10104-DPB11501 DPA10105-DPB10101 DPA10105-DPB10401 DPA10105-DPB11801 DPA10105-DPB15001 DPA10106-DPB10101 DPA10201-DPB10101 DPA10201-DPB10201 DPA10201-DPB10202 DPA10201-DPB110601 DPA10201-DPB11501 DPA10201-DPB11601 DPA10201-DPB11801 DPA10201-DPB11901; note = HLAs: DPA10201-DPB13401 DPA10202-DPB10101 DPA10202-DPB10201 DPA10202-DPB10202 DPA10202-DPB10401 DPA10202-DPB10402 DPA10202-DPB10501 DPA10202-DPB10901 DPA10202-DPB110001 DPA10202-DPB110501 DPA10202-DPB110601 DPA10202-DPB11301 DPA10202-DPB11401 DPA10202-DPB11801 DPA10202-DPB11901 DPA10202-DPB12101 DPA10202-DPB12901 DPA10202-DPB13001 DPA10202-DPB13101 DPA10202-DPB13801 DPA10202-DPB15501 DPA10202-DPB16501 DPA10301-DPB10101 DPA10301-DPB10201 DPA10301-DPB10202 DPA10301-DPB10401 DPA10301-DPB10402 DPA10301-DPB110501 DPA10301-DPB110601 DPA10301-DPB11301 DPA10301-DPB11701 DPA10301-DPB11801 DPA10301-DPB12301 DPA10301-DPB13901 DPA10301-DPB14001 DPA10301-DPB14901 DPA10301-DPB15501 DPA10301-DPB16501 DPA10301-DPB17501 DPA10301-DPB18001 DPA10401-DPB10101 DPA10401-DPB10201 DPA10401-DPB10202 DPA10401-DPB10301 DPA10401-DPB10402 DPA10401-DPB10501 DPA10401-DPB110501 DPA10401-DPB11301 DPA10401-DPB113301 DPA10401-DPB11401 DPA10401-DPB14901 DQA10101-DQB10601 DQA10102-DQB10501 DQA10102-DQB10503; note = HLAs: DQA10102-DQB10601 DQA10102-DQB10602 DQA10102-DQB10609 DQA10102-DQB10611 DQA10103-DQB10501 DQA10103-DQB10503 DQA10103-DQB10601 DQA10103-DQB10602 DQA10103-DQB10603 DQA10103-DQB10604 DQA10103-DQB10608 DQA10103-DQB10609 DQA10103-DQB10614 DQA10201-DQB10301 DQA10201-DQB10303 DQA10301-DQB10301 DQA10302-DQB10301 DQA10303-DQB10301 DQA10501-DQB10301 DQA10501-DQB10319 DQA10503-DQB10301 DQA10505-DQB10301 DQA10505-DQB10309 DQA10505-DQB10319 DQA10505-DQB10402 DQA10506-DQB10303 DQA10508-DQB10301 DQA10509-DQB10301 DQA10601-DQB10301
QVDKLVSSGIRKVLFL

SEQ ID NO: 5219 - protein, 17 aa, Human immunodeficiency virus 1
  source 1..17: note = HLAs: DRB1_0101 DRB1_0102 DRB1_0404 DRB1_0410 DRB1_0701 DRB1_0801 DRB1_0802 DRB1_0803 DRB1_0804 DRB1_0806 DRB1_0809 DRB1_0813 DRB1_0901 DRB1_1001 DRB1_1101 DRB1_1102 DRB1_1103 DRB1_1104 DRB1_1114 DRB1_1201 DRB1_1202 DRB1_1301 DRB1_1302 DRB1_1303 DRB1_1304 DRB1_1305 DRB1_1312 DRB1_1401 DRB1_1402 DRB1_1403 DRB1_1404 DRB1_1405 DRB1_1406 DRB1_1454 DRB1_1501 DRB1_1502 DRB1_1503 DRB1_1601 DRB1_1602 DPA10103-DPB10101 DPA10103-DPB10201 DPA10103-DPB10202 DPA10103-DPB10401 DPA10103-DPB10501 DPA10103-DPB112601 DPA10103-DPB11501 DPA10103-DPB11601 DPA10103-DPB11801 DPA10103-DPB11901 DPA10103-DPB12301 DPA10103-DPB13101 DPA10103-DPB13401 DPA10103-DPB13901 DPA10103-DPB14001 DPA10103-DPB14101 DPA10103-DPB14801 DPA10103-DPB15001 DPA10103-DPB15901 DPA10104-DPB10101 DPA10104-DPB11501 DPA10105-DPB10101 DPA10105-DPB10401 DPA10105-DPB11801 DPA10105-DPB15001 DPA10106-DPB10101 DPA10201-DPB10101 DPA10201-DPB10201 DPA10201-DPB10202 DPA10201-DPB110601 DPA10201-DPB11501 DPA10201-DPB11601 DPA10201-DPB11901; note = HLAs: DPA10201-DPB13401 DPA10202-DPB10101 DPA10202-DPB10201 DPA10202-DPB10202 DPA10202-DPB10401 DPA10202-DPB10501 DPA10202-DPB10901 DPA10202-DPB110001 DPA10202-DPB110601 DPA10202-DPB11301 DPA10202-DPB11401 DPA10202-DPB11801 DPA10202-DPB11901 DPA10202-DPB13101 DPA10202-DPB13801 DPA10202-DPB15501 DPA10202-DPB16501 DPA10301-DPB10101 DPA10301-DPB10201 DPA10301-DPB10202 DPA10301-DPB10401 DPA10301-DPB10402 DPA10301-DPB110501 DPA10301-DPB110601 DPA10301-DPB11801 DPA10301-DPB12301 DPA10301-DPB13901 DPA10301-DPB14001 DPA10301-DPB14901 DPA10301-DPB15501 DPA10301-DPB16501 DPA10301-DPB17501 DPA10301-DPB18001 DPA10401-DPB10101 DPA10401-DPB10201 DPA10401-DPB10202 DPA10401-DPB10402 DPA10401-DPB10501 DPA10401-DPB110501 DPA10401-DPB11401 DPA10401-DPB14901 DQA10101-DQB10601 DQA10102-DQB10501 DQA10102-DQB10503 DQA10102-DQB10601 DQA10102-DQB10602 DQA10102-DQB10609 DQA10102-DQB10611 DQA10103-DQB10501 DQA10103-DQB10601 DQA10103-DQB10602 DQA10103-DQB10608 DQA10103-DQB10609 DQA10201-DQB10301; note = HLAs: DQA10201-DQB10303 DQA10501-DQB10301 DQA10501-DQB10319 DQA10503-DQB10301 DQA10505-DQB10301 DQA10505-DQB10309 DQA10505-DQB10319 DQA10505-DQB10402 DQA10508-DQB10301 DQA10509-DQB10301
QVDKLVSSGIRKVLFLD

SEQ ID NO: 5220 - protein, 18 aa, Human immunodeficiency virus 1
  source 1..18: note = HLAs: DRB1_0101 DRB1_0701 DRB1_0901 DRB1_1001 DRB1_1102 DRB1_1103 DRB1_1114 DRB1_1301 DRB1_1302 DRB1_1304 DRB1_1406 DPA10103-DPB10101 DPA10103-DPB10201 DPA10103-DPB10202 DPA10103-DPB11501 DPA10103-DPB11601 DPA10103-DPB11801 DPA10103-DPB11901 DPA10103-DPB13401 DPA10103-DPB14001 DPA10103-DPB14801 DPA10103-DPB15001 DPA10104-DPB10101 DPA10104-DPB11501 DPA10105-DPB10101 DPA10105-DPB11801 DPA10105-DPB15001 DPA10106-DPB10101 DPA10201-DPB10101 DPA10201-DPB110601 DPA10201-DPB11501 DPA10201-DPB11901 DPA10202-DPB10101 DPA10202-DPB10201 DPA10202-DPB10202 DPA10202-DPB10501 DPA10202-DPB110601 DPA10202-DPB11801 DPA10202-DPB11901 DPA10202-DPB13101 DPA10202-DPB13801 DPA10202-DPB16501 DPA10301-DPB10101 DPA10301-DPB10201 DPA10301-DPB10202 DPA10301-DPB10401 DPA10301-DPB10402 DPA10301-DPB110501 DPA10301-DPB110601 DPA10301-DPB11801 DPA10301-DPB12301 DPA10301-DPB13901 DPA10301-DPB14001 DPA10301-DPB14901 DPA10301-DPB16501 DPA10301-DPB17501 DPA10301-DPB18001 DPA10401-DPB10101 DPA10401-DPB10201; note = HLAs: DPA10401-DPB10202 DPA10401-DPB10501 DQA10102-DQB10501 DQA10102-DQB10601 DQA10102-DQB10602 DQA10102-DQB10609 DQA10102-DQB10611 DQA10103-DQB10501 DQA10103-DQB10601 DQA10103-DQB10602 DQA10103-DQB10609 DQA10201-DQB10301
QVDKLVSSGIRKVLFLDG

SEQ ID NO: 5221 - protein, 19 aa, Human immunodeficiency virus 1
  source 1..19: note = HLAs: DRB1_0101 DRB1_0102 DRB1_0404 DRB1_0410 DRB1_0701 DRB1_0801 DRB1_0804 DRB1_0806 DRB1_0813 DRB1_0901 DRB1_1001 DRB1_1101 DRB1_1102 DRB1_1103 DRB1_1104 DRB1_1114 DRB1_1201 DRB1_1301 DRB1_1302 DRB1_1304 DRB1_1305 DRB1_1401 DRB1_1402 DRB1_1404 DRB1_1405 DRB1_1406 DRB1_1454 DRB1_1501 DRB1_1602 DPA10103-DPB10101 DPA10103-DPB10201 DPA10103-DPB10202 DPA10103-DPB10401 DPA10103-DPB10501 DPA10103-DPB112601 DPA10103-DPB11501 DPA10103-DPB11601 DPA10103-DPB11801 DPA10103-DPB11901 DPA10103-DPB12301 DPA10103-DPB13101 DPA10103-DPB13401 DPA10103-DPB13901 DPA10103-DPB14001 DPA10103-DPB14101 DPA10103-DPB14801 DPA10103-DPB15001 DPA10103-DPB15901 DPA10104-DPB10101 DPA10104-DPB11501 DPA10105-DPB10101 DPA10105-DPB10401 DPA10105-DPB11801 DPA10105-DPB15001 DPA10106-DPB10101 DPA10201-DPB10101 DPA10201-DPB10201 DPA10201-DPB10202 DPA10201-DPB110601 DPA10201-DPB11501 DPA10201-DPB11601 DPA10201-DPB11901 DPA10201-DPB13401 DPA10202-DPB10101 DPA10202-DPB10201 DPA10202-DPB10202 DPA10202-DPB10401 DPA10202-DPB10501; note = HLAs: DPA10202-DPB10901 DPA10202-DPB110601 DPA10202-DPB11301 DPA10202-DPB11801 DPA10202-DPB11901 DPA10202-DPB13101 DPA10202-DPB13801 DPA10202-DPB15501 DPA10202-DPB16501 DPA10301-DPB10101 DPA10301-DPB10201 DPA10301-DPB10202 DPA10301-DPB10401 DPA10301-DPB10402 DPA10301-DPB110501 DPA10301-DPB110601 DPA10301-DPB11301 DPA10301-DPB11801 DPA10301-DPB12301 DPA10301-DPB13901 DPA10301-DPB14001 DPA10301-DPB14901 DPA10301-DPB15501 DPA10301-DPB16501 DPA10301-DPB17501 DPA10301-DPB18001 DPA10401-DPB10101 DPA10401-DPB10201 DPA10401-DPB10202 DPA10401-DPB10402 DPA10401-DPB10501 DPA10401-DPB110501 DPA10401-DPB11301 DPA10401-DPB113301 DPA10401-DPB14901 DQA10102-DQB10501 DQA10102-DQB10503 DQA10102-DQB10601 DQA10102-DQB10602 DQA10102-DQB10609 DQA10102-DQB10611 DQA10103-DQB10501 DQA10103-DQB10601 DQA10103-DQB10602 DQA10103-DQB10608 DQA10103-DQB10609 DQA10201-DQB10301 DQA10201-DQB10303 DQA10505-DQB10402
QVDKLVSSGIRKVLFLDGI

SEQ ID NO: 5222 - protein, 17 aa, Human immunodeficiency virus 1
  source 1..17: note = HLAs: DRB1_1001 DPA10401-DPB10101 DQA10102-DQB10501 DQA10102-DQB10601 DQA10103-DQB10601 DQA10103-DQB10609
QVRDQAEHLKTAVQMAV

SEQ ID NO: 5223 - protein, 18 aa, Human immunodeficiency virus 1
  source 1..18: note = HLAs: DPA10301-DPB10101 DPA10401-DPB10101 DQA10102-DQB10501
QVRDQAEHLKTAVQMAVF

SEQ ID NO: 5224 - protein, 19 aa, Human immunodeficiency virus 1
  source 1..19: note = HLAs: DRB1_0101 DRB1_1001 DPA10103-DPB11501 DPA10104-DPB11501 DPA10301-DPB10101 DPA10301-DPB10201 DPA10301-DPB10202 DPA10301-DPB10401 DPA10301-DPB110601 DPA10301-DPB11801 DPA10301-DPB12301 DPA10301-DPB13901 DPA10301-DPB14001 DPA10301-DPB16501 DPA10401-DPB10101 DQA10102-DQB10501 DQA10102-DQB10601 DQA10102-DQB10602 DQA10102-DQB10609 DQA10102-DQB10611 DQA10103-DQB10601 DQA10103-DQB10609
QVRDQAEHLKTAVQMAVFI

SEQ ID NO: 5225 - protein, 20 aa, Human immunodeficiency virus 1
  source 1..20: note = HLAs: DRB1_0101 DRB1_0701 DRB1_0813 DRB1_0901 DRB1_1001 DRB1_1406 DPA10103-DPB10101 DPA10103-DPB11501 DPA10103-DPB15001 DPA10104-DPB10101 DPA10104-DPB11501 DPA10105-DPB10101 DPA10105-DPB15001 DPA10202-DPB10101 DPA10202-DPB110601 DPA10202-DPB11901 DPA10301-DPB10101 DPA10301-DPB10201 DPA10301-DPB10202 DPA10301-DPB10401 DPA10301-DPB10402 DPA10301-DPB110501 DPA10301-DPB110601 DPA10301-DPB11801 DPA10301-DPB12301 DPA10301-DPB13901 DPA10301-DPB14001 DPA10301-DPB14901 DPA10301-DPB15501 DPA10301-DPB16501 DPA10301-DPB17501 DPA10301-DPB18001 DPA10401-DPB10101 DPA10401-DPB10201 DPA10401-DPB10202 DPA10401-DPB10301 DPA10401-DPB10501 DPA10401-DPB11401 DQA10102-DQB10501 DQA10102-DQB10601 DQA10102-DQB10602 DQA10102-DQB10609 DQA10102-DQB10611 DQA10103-DQB10501 DQA10103-DQB10601 DQA10103-DQB10602 DQA10103-DQB10609
QVRDQAEHLKTAVQMAVFIH

SEQ ID NO: 5226 - protein, 21 aa, Human immunodeficiency virus 1
  source 1..21: note = HLAs: DRB1_0101 DRB1_1001 DPA10103-DPB10101 DPA10103-DPB11501 DPA10103-DPB11901 DPA10103-DPB15001 DPA10104-DPB10101 DPA10104-DPB11501 DPA10105-DPB10101 DPA10105-DPB15001 DPA10202-DPB10101 DPA10301-DPB10101 DPA10301-DPB10201 DPA10301-DPB10202 DPA10301-DPB10401 DPA10301-DPB110601 DPA10301-DPB11801 DPA10301-DPB12301 DPA10301-DPB13901 DPA10301-DPB14001 DPA10301-DPB16501 DPA10401-DPB10101 DPA10401-DPB10201 DPA10401-DPB10202 DPA10401-DPB10501 DQA10102-DQB10501 DQA10103-DQB10501 DQA10103-DQB10601 DQA10103-DQB10609
QVRDQAEHLKTAVQMAVFIHN

SEQ ID NO: 5227 - protein, 22 aa, Human immunodeficiency virus 1
  source 1..22: note = HLAs: DRB1_0101 DRB1_1001 DPA10103-DPB10101 DPA10103-DPB10202 DPA10103-DPB11501 DPA10103-DPB11901 DPA10103-DPB15001 DPA10104-DPB10101 DPA10104-DPB11501 DPA10105-DPB10101 DPA10105-DPB15001 DPA10202-DPB10101 DPA10301-DPB10101 DPA10301-DPB10201 DPA10301-DPB10202 DPA10301-DPB10401 DPA10301-DPB10402 DPA10301-DPB110501 DPA10301-DPB110601 DPA10301-DPB11801 DPA10301-DPB12301 DPA10301-DPB13901 DPA10301-DPB14001 DPA10301-DPB14901 DPA10301-DPB15501 DPA10301-DPB16501 DPA10301-DPB17501 DPA10301-DPB18001 DPA10401-DPB10101 DPA10401-DPB10201 DPA10401-DPB10202 DPA10401-DPB10501 DQA10102-DQB10501 DQA10102-DQB10609 DQA10103-DQB10501 DQA10103-DQB10601 DQA10103-DQB10609
QVRDQAEHLKTAVQMAVFIHNF

SEQ ID NO: 5228 - protein, 23 aa, Human immunodeficiency virus 1
  source 1..23: note = HLAs: DRB1_0101 DRB1_0701 DRB1_1001 DRB1_1406 DPA10103-DPB10101 DPA10103-DPB10201 DPA10103-DPB10202 DPA10103-DPB10501 DPA10103-DPB11501 DPA10103-DPB11601 DPA10103-DPB11801 DPA10103-DPB11901 DPA10103-DPB13101 DPA10103-DPB13401 DPA10103-DPB14001 DPA10103-DPB14801 DPA10103-DPB15001 DPA10104-DPB10101 DPA10104-DPB11501 DPA10105-DPB10101 DPA10105-DPB11801 DPA10105-DPB15001 DPA10106-DPB10101 DPA10201-DPB10101 DPA10201-DPB11501 DPA10202-DPB10101 DPA10202-DPB10202 DPA10202-DPB110601 DPA10202-DPB11901 DPA10301-DPB10101 DPA10301-DPB10201 DPA10301-DPB10202 DPA10301-DPB10401 DPA10301-DPB10402 DPA10301-DPB110501 DPA10301-DPB110601 DPA10301-DPB11101 DPA10301-DPB11801 DPA10301-DPB12301 DPA10301-DPB13901 DPA10301-DPB14001 DPA10301-DPB14901 DPA10301-DPB15501 DPA10301-DPB16501 DPA10301-DPB17501 DPA10301-DPB18001 DPA10401-DPB10101 DPA10401-DPB10201 DPA10401-DPB10202 DPA10401-DPB10301 DPA10401-DPB10501 DPA10401-DPB11301 DPA10401-DPB113301 DPA10401-DPB11401 DQA10102-DQB10501 DQA10102-DQB10601; note = HLAs: DQA10102-DQB10602 DQA10102-DQB10609 DQA10102-DQB10611 DQA10103-DQB10501 DQA10103-DQB10601 DQA10103-DQB10609
QVRDQAEHLKTAVQMAVFIHNFK

SEQ ID NO: 5229 - protein, 24 aa, Human immunodeficiency virus 1
  source 1..24: note = HLAs: DRB1_0101 DRB1_0410 DRB1_0701 DRB1_0806 DRB1_1001 DRB1_1104 DRB1_1304 DRB1_1406 DRB1_1602 DPA10103-DPB10101 DPA10103-DPB10201 DPA10103-DPB10202 DPA10103-DPB10401 DPA10103-DPB10501 DPA10103-DPB11101 DPA10103-DPB112601 DPA10103-DPB11501 DPA10103-DPB11601 DPA10103-DPB11801 DPA10103-DPB11901 DPA10103-DPB12301 DPA10103-DPB13101 DPA10103-DPB13401 DPA10103-DPB13901 DPA10103-DPB14001 DPA10103-DPB14101 DPA10103-DPB14801 DPA10103-DPB15001 DPA10103-DPB15501 DPA10103-DPB15901 DPA10104-DPB10101 DPA10104-DPB11501 DPA10105-DPB10101 DPA10105-DPB10401 DPA10105-DPB11801 DPA10105-DPB15001 DPA10106-DPB10101 DPA10201-DPB10101 DPA10201-DPB110601 DPA10201-DPB11501 DPA10201-DPB11601 DPA10201-DPB11901 DPA10202-DPB10101 DPA10202-DPB10201 DPA10202-DPB10202 DPA10202-DPB10501 DPA10202-DPB110601 DPA10202-DPB11801 DPA10202-DPB11901 DPA10202-DPB13101 DPA10202-DPB13801 DPA10202-DPB15501 DPA10202-DPB16501 DPA10301-DPB10101 DPA10301-DPB10201 DPA10301-DPB10202 DPA10301-DPB10401 DPA10301-DPB10402 DPA10301-DPB110501; note = HLAs: DPA10301-DPB110601 DPA10301-DPB11101 DPA10301-DPB11301 DPA10301-DPB11801 DPA10301-DPB12301 DPA10301-DPB13901 DPA10301-DPB14001 DPA10301-DPB14901 DPA10301-DPB15501 DPA10301-DPB16501 DPA10301-DPB17501 DPA10301-DPB18001 DPA10401-DPB10101 DPA10401-DPB10201 DPA10401-DPB10202 DPA10401-DPB10301 DPA10401-DPB10402 DPA10401-DPB10501 DPA10401-DPB110501 DPA10401-DPB11301 DPA10401-DPB113301 DPA10401-DPB11401 DPA10401-DPB14901 DQA10102-DQB10501 DQA10102-DQB10503 DQA10102-DQB10601 DQA10102-DQB10602 DQA10102-DQB10609 DQA10102-DQB10611 DQA10103-DQB10501 DQA10103-DQB10601 DQA10103-DQB10602 DQA10103-DQB10609
QVRDQAEHLKTAVQMAVFIHNFKR

SEQ ID NO: 5230 - protein, 25 aa, Human immunodeficiency virus 1
  source 1..25: note = HLAs: DRB1_0101 DRB1_0404 DRB1_0410 DRB1_0701 DRB1_0804 DRB1_0806 DRB1_0813 DRB1_0901 DRB1_1001 DRB1_1102 DRB1_1103 DRB1_1104 DRB1_1301 DRB1_1304 DRB1_1406 DRB1_1501 DRB1_1601 DRB1_1602 DPA10103-DPB10101 DPA10103-DPB10201 DPA10103-DPB10202 DPA10103-DPB10401 DPA10103-DPB10501 DPA10103-DPB11101 DPA10103-DPB112601 DPA10103-DPB11501 DPA10103-DPB11601 DPA10103-DPB11801 DPA10103-DPB11901 DPA10103-DPB12301 DPA10103-DPB13101 DPA10103-DPB13401 DPA10103-DPB13901 DPA10103-DPB14001 DPA10103-DPB14101 DPA10103-DPB14801 DPA10103-DPB15001 DPA10103-DPB15501 DPA10103-DPB15901 DPA10104-DPB10101 DPA10104-DPB11501 DPA10105-DPB10101 DPA10105-DPB10401 DPA10105-DPB11801 DPA10105-DPB15001 DPA10106-DPB10101 DPA10201-DPB10101 DPA10201-DPB10202 DPA10201-DPB110601 DPA10201-DPB11501 DPA10201-DPB11601 DPA10201-DPB11901 DPA10202-DPB10101 DPA10202-DPB10201 DPA10202-DPB10202 DPA10202-DPB10401 DPA10202-DPB10501 DPA10202-DPB110601 DPA10202-DPB11101 DPA10202-DPB11801 DPA10202-DPB11901 DPA10202-DPB13101 DPA10202-DPB13801; note = HLAs: DPA10202-DPB15501 DPA10202-DPB16501 DPA10301-DPB10101 DPA10301-DPB10201 DPA10301-DPB10202 DPA10301-DPB10401 DPA10301-DPB10402 DPA10301-DPB110501 DPA10301-DPB110601 DPA10301-DPB11101 DPA10301-DPB11301 DPA10301-DPB11701 DPA10301-DPB11801 DPA10301-DPB12301 DPA10301-DPB13901 DPA10301-DPB14001 DPA10301-DPB14901 DPA10301-DPB15501 DPA10301-DPB16501 DPA10301-DPB17501 DPA10301-DPB18001 DPA10401-DPB10101 DPA10401-DPB10201 DPA10401-DPB10202 DPA10401-DPB10301 DPA10401-DPB10402 DPA10401-DPB10501 DPA10401-DPB110501 DPA10401-DPB11301 DPA10401-DPB113301 DPA10401-DPB11401 DPA10401-DPB14901 DQA10102-DQB10501 DQA10102-DQB10503 DQA10102-DQB10601 DQA10102-DQB10602 DQA10102-DQB10609 DQA10102-DQB10611 DQA10103-DQB10501 DQA10103-DQB10601 DQA10103-DQB10602 DQA10103-DQB10609
QVRDQAEHLKTAVQMAVFIHNFKRK

SEQ ID NO: 5231 - protein, 13 aa, Human immunodeficiency virus 1
  source 1..13: note = HLAs: DPA10301-DPB10201
QWTYQIYQEPFKN

SEQ ID NO: 5232 - protein, 14 aa, Human immunodeficiency virus 1
  source 1..14: note = HLAs: DRB1_1001 DPA10103-DPB10101 DPA10103-DPB10201 DPA10103-DPB10202 DPA10103-DPB10401 DPA10103-DPB112601 DPA10103-DPB11501 DPA10103-DPB11601 DPA10103-DPB11801 DPA10103-DPB11901 DPA10103-DPB12301 DPA10103-DPB13101 DPA10103-DPB13401 DPA10103-DPB13901 DPA10103-DPB14001 DPA10103-DPB14101 DPA10103-DPB14801 DPA10103-DPB15001 DPA10103-DPB15901 DPA10104-DPB10101 DPA10104-DPB11501 DPA10105-DPB10101 DPA10105-DPB10401 DPA10105-DPB11801 DPA10105-DPB15001 DPA10106-DPB10101 DPA10201-DPB10101 DPA10201-DPB10401 DPA10201-DPB110601 DPA10201-DPB11501 DPA10201-DPB11601 DPA10201-DPB11901 DPA10201-DPB13401 DPA10202-DPB10101 DPA10202-DPB10201 DPA10202-DPB10202 DPA10202-DPB10401 DPA10202-DPB110601 DPA10202-DPB11901 DPA10202-DPB13101 DPA10202-DPB16501 DPA10301-DPB10101 DPA10301-DPB10201 DPA10301-DPB10202 DPA10301-DPB10401 DPA10301-DPB10402 DPA10301-DPB110501 DPA10301-DPB110601 DPA10301-DPB11801 DPA10301-DPB12301 DPA10301-DPB13901 DPA10301-DPB14001 DPA10301-DPB14901 DPA10301-DPB16501 DPA10301-DPB17501; note = HLAs: DPA10301-DPB18001 DPA10401-DPB10101 DPA10401-DPB10201 DPA10401-DPB10202
QWTYQIYQEPFKNL

SEQ ID NO: 5233 - protein, 15 aa, Human immunodeficiency virus 1
  source 1..15: note = HLAs: DRB1_0101 DRB1_1001 DRB1_1304 DRB1_1501 DRB1_1503 DRB1_1601 DRB1_1602 DPA10103-DPB10101 DPA10103-DPB10201 DPA10103-DPB10202 DPA10103-DPB10401 DPA10103-DPB10402 DPA10103-DPB10501 DPA10103-DPB110501 DPA10103-DPB112601 DPA10103-DPB11501 DPA10103-DPB11601 DPA10103-DPB11801 DPA10103-DPB11901 DPA10103-DPB12301 DPA10103-DPB13101 DPA10103-DPB13401 DPA10103-DPB13901 DPA10103-DPB14001 DPA10103-DPB14101 DPA10103-DPB14801 DPA10103-DPB14901 DPA10103-DPB15001 DPA10103-DPB15101 DPA10103-DPB15501 DPA10103-DPB15901 DPA10103-DPB18001 DPA10104-DPB10101 DPA10104-DPB11501 DPA10105-DPB10101 DPA10105-DPB10401 DPA10105-DPB11801 DPA10105-DPB15001 DPA10106-DPB10101 DPA10201-DPB10101 DPA10201-DPB10201 DPA10201-DPB10202 DPA10201-DPB10401 DPA10201-DPB10501 DPA10201-DPB110601 DPA10201-DPB11501 DPA10201-DPB11601 DPA10201-DPB11801 DPA10201-DPB11901 DPA10201-DPB13401 DPA10202-DPB10101 DPA10202-DPB10201 DPA10202-DPB10202 DPA10202-DPB10401 DPA10202-DPB10501 DPA10202-DPB110001 DPA10202-DPB110601 DPA10202-DPB11801; note = HLAs: DPA10202-DPB11901 DPA10202-DPB13101 DPA10202-DPB13801 DPA10202-DPB15501 DPA10202-DPB16501 DPA10301-DPB10101 DPA10301-DPB10201 DPA10301-DPB10202 DPA10301-DPB10401 DPA10301-DPB10402 DPA10301-DPB110501 DPA10301-DPB110601 DPA10301-DPB11801 DPA10301-DPB12301 DPA10301-DPB13901 DPA10301-DPB14001 DPA10301-DPB14901 DPA10301-DPB15501 DPA10301-DPB16501 DPA10301-DPB17501 DPA10301-DPB18001 DPA10401-DPB10101 DPA10401-DPB10201 DPA10401-DPB10202 DPA10401-DPB10402 DPA10401-DPB10501 DPA10401-DPB110501 DPA10401-DPB14901 DQA10102-DQB10501
QWTYQIYQEPFKNLK

SEQ ID NO: 5234 - protein, 16 aa, Human immunodeficiency virus 1
  source 1..16: note = HLAs: DRB1_1001 DRB1_1601 DPA10103-DPB10101 DPA10103-DPB10201 DPA10103-DPB10202 DPA10103-DPB10401 DPA10103-DPB10402 DPA10103-DPB10501 DPA10103-DPB110501 DPA10103-DPB112601 DPA10103-DPB11501 DPA10103-DPB11601 DPA10103-DPB11801 DPA10103-DPB11901 DPA10103-DPB12301 DPA10103-DPB13101 DPA10103-DPB13401 DPA10103-DPB13901 DPA10103-DPB14001 DPA10103-DPB14101 DPA10103-DPB14801 DPA10103-DPB14901 DPA10103-DPB15001 DPA10103-DPB15101 DPA10103-DPB15901 DPA10103-DPB18001 DPA10104-DPB10101 DPA10104-DPB11501 DPA10105-DPB10101 DPA10105-DPB10401 DPA10105-DPB11801 DPA10105-DPB15001 DPA10106-DPB10101 DPA10201-DPB10101 DPA10201-DPB10201 DPA10201-DPB10202 DPA10201-DPB10401 DPA10201-DPB10501 DPA10201-DPB110601 DPA10201-DPB11501 DPA10201-DPB11601 DPA10201-DPB11801 DPA10201-DPB11901 DPA10201-DPB13401 DPA10202-DPB10101 DPA10202-DPB10201 DPA10202-DPB10202 DPA10202-DPB10401 DPA10202-DPB10501 DPA10202-DPB110001 DPA10202-DPB110601 DPA10202-DPB11801 DPA10202-DPB11901 DPA10202-DPB13101 DPA10202-DPB13801; note = HLAs: DPA10202-DPB15501 DPA10202-DPB16501 DPA10301-DPB10101 DPA10301-DPB10201 DPA10301-DPB10202 DPA10301-DPB10401 DPA10301-DPB10402 DPA10301-DPB110501 DPA10301-DPB110601 DPA10301-DPB11801 DPA10301-DPB12301 DPA10301-DPB13901 DPA10301-DPB14001 DPA10301-DPB14901 DPA10301-DPB15501 DPA10301-DPB16501 DPA10301-DPB17501 DPA10301-DPB18001 DPA10401-DPB10101 DPA10401-DPB10201 DPA10401-DPB10202 DPA10401-DPB10402 DPA10401-DPB10501 DPA10401-DPB110501 DPA10401-DPB14901 DQA10102-DQB10501
QWTYQIYQEPFKNLKT

SEQ ID NO: 5235 - protein, 17 aa, Human immunodeficiency virus 1
  source 1..17: note = HLAs: DRB1_1001 DRB1_1601 DPA10103-DPB10101 DPA10103-DPB10201 DPA10103-DPB10202 DPA10103-DPB10401 DPA10103-DPB10402 DPA10103-DPB110501 DPA10103-DPB112601 DPA10103-DPB11501 DPA10103-DPB11601 DPA10103-DPB11801 DPA10103-DPB11901 DPA10103-DPB12301 DPA10103-DPB13101 DPA10103-DPB13401 DPA10103-DPB13901 DPA10103-DPB14001 DPA10103-DPB14101 DPA10103-DPB14801 DPA10103-DPB14901 DPA10103-DPB15001 DPA10103-DPB15101 DPA10103-DPB15901 DPA10103-DPB18001 DPA10104-DPB10101 DPA10104-DPB11501 DPA10105-DPB10101 DPA10105-DPB10401 DPA10105-DPB11801 DPA10105-DPB15001 DPA10106-DPB10101 DPA10201-DPB10101 DPA10201-DPB10201 DPA10201-DPB10202 DPA10201-DPB10401 DPA10201-DPB110601 DPA10201-DPB11501 DPA10201-DPB11601 DPA10201-DPB11901 DPA10201-DPB13401 DPA10202-DPB10101 DPA10202-DPB10201 DPA10202-DPB10202 DPA10202-DPB10401 DPA10202-DPB10501 DPA10202-DPB110601 DPA10202-DPB11801 DPA10202-DPB11901 DPA10202-DPB13101 DPA10202-DPB13801 DPA10202-DPB16501 DPA10301-DPB10101 DPA10301-DPB10201 DPA10301-DPB10202; note = HLAs: DPA10301-DPB10401 DPA10301-DPB10402 DPA10301-DPB110501 DPA10301-DPB110601 DPA10301-DPB11801 DPA10301-DPB12301 DPA10301-DPB13901 DPA10301-DPB14001 DPA10301-DPB14901 DPA10301-DPB16501 DPA10301-DPB17501 DPA10301-DPB18001 DPA10401-DPB10101 DPA10401-DPB10201 DPA10401-DPB10202 DPA10401-DPB10402 DPA10401-DPB10501 DPA10401-DPB110501 DPA10401-DPB14901 DQA10102-DQB10501
QWTYQIYQEPFKNLKTG

SEQ ID NO: 5236 - protein, 18 aa, Human immunodeficiency virus 1
  source 1..18: note = HLAs: DPA10103-DPB10101 DPA10103-DPB10201 DPA10103-DPB10202 DPA10103-DPB10401 DPA10103-DPB112601 DPA10103-DPB11501 DPA10103-DPB11601 DPA10103-DPB11801 DPA10103-DPB11901 DPA10103-DPB12301 DPA10103-DPB13101 DPA10103-DPB13401 DPA10103-DPB13901 DPA10103-DPB14001 DPA10103-DPB14101 DPA10103-DPB14801 DPA10103-DPB15901 DPA10104-DPB10101 DPA10104-DPB11501 DPA10105-DPB10101 DPA10105-DPB10401 DPA10105-DPB11801 DPA10106-DPB10101 DPA10201-DPB10101 DPA10201-DPB110601 DPA10201-DPB11501 DPA10201-DPB11601 DPA10201-DPB11901 DPA10201-DPB13401 DPA10202-DPB10101 DPA10202-DPB10201 DPA10202-DPB10202 DPA10202-DPB110601 DPA10202-DPB11901 DPA10202-DPB13101 DPA10202-DPB16501 DPA10301-DPB10101 DPA10301-DPB10201 DPA10301-DPB10202 DPA10301-DPB10401 DPA10301-DPB10402 DPA10301-DPB110501 DPA10301-DPB110601 DPA10301-DPB11801 DPA10301-DPB12301 DPA10301-DPB13901 DPA10301-DPB14001 DPA10301-DPB14901 DPA10301-DPB16501 DPA10301-DPB18001 DPA10401-DPB10101 DPA10401-DPB10201 DPA10401-DPB10202
QWTYQIYQEPFKNLKTGK

SEQ ID NO: 5237 - protein, 19 aa, Human immunodeficiency virus 1
  source 1..19: note = HLAs: DRB1_1001 DRB1_1601 DPA10103-DPB10101 DPA10103-DPB10201 DPA10103-DPB10202 DPA10103-DPB10401 DPA10103-DPB10402 DPA10103-DPB110501 DPA10103-DPB112601 DPA10103-DPB11501 DPA10103-DPB11601 DPA10103-DPB11801 DPA10103-DPB11901 DPA10103-DPB12301 DPA10103-DPB13101 DPA10103-DPB13401 DPA10103-DPB13901 DPA10103-DPB14001 DPA10103-DPB14101 DPA10103-DPB14801 DPA10103-DPB14901 DPA10103-DPB15001 DPA10103-DPB15101 DPA10103-DPB15901 DPA10103-DPB18001 DPA10104-DPB10101 DPA10104-DPB11501 DPA10105-DPB10101 DPA10105-DPB10401 DPA10105-DPB11801 DPA10105-DPB15001 DPA10106-DPB10101 DPA10201-DPB10101 DPA10201-DPB10201 DPA10201-DPB10202 DPA10201-DPB10401 DPA10201-DPB110601 DPA10201-DPB11501 DPA10201-DPB11601 DPA10201-DPB11901 DPA10201-DPB13401 DPA10202-DPB10101 DPA10202-DPB10201 DPA10202-DPB10202 DPA10202-DPB10401 DPA10202-DPB10501 DPA10202-DPB110601 DPA10202-DPB11801 DPA10202-DPB11901 DPA10202-DPB13101 DPA10202-DPB13801 DPA10202-DPB16501 DPA10301-DPB10101 DPA10301-DPB10201 DPA10301-DPB10202; note = HLAs: DPA10301-DPB10401 DPA10301-DPB10402 DPA10301-DPB110501 DPA10301-DPB110601 DPA10301-DPB11801 DPA10301-DPB12301 DPA10301-DPB13901 DPA10301-DPB14001 DPA10301-DPB14901 DPA10301-DPB16501 DPA10301-DPB17501 DPA10301-DPB18001 DPA10401-DPB10101 DPA10401-DPB10201 DPA10401-DPB10202 DPA10401-DPB10402 DPA10401-DPB10501 DPA10401-DPB110501 DPA10401-DPB14901 DQA10102-DQB10501
QWTYQIYQEPFKNLKTGKY

SEQ ID NO: 5238 - protein, 20 aa, Human immunodeficiency virus 1
  source 1..20: note = HLAs: DRB1_0101 DRB1_0410 DRB1_0801 DRB1_0806 DRB1_1001 DRB1_1101 DRB1_1103 DRB1_1104 DRB1_1304 DRB1_1305 DRB1_1501 DRB1_1503 DRB1_1601 DRB1_1602 DPA10103-DPB10101 DPA10103-DPB10201 DPA10103-DPB10202 DPA10103-DPB10401 DPA10103-DPB10402 DPA10103-DPB10501 DPA10103-DPB110501 DPA10103-DPB112601 DPA10103-DPB11501 DPA10103-DPB11601 DPA10103-DPB11801 DPA10103-DPB11901 DPA10103-DPB12301 DPA10103-DPB13101 DPA10103-DPB13401 DPA10103-DPB13901 DPA10103-DPB14001 DPA10103-DPB14101 DPA10103-DPB14801 DPA10103-DPB14901 DPA10103-DPB15001 DPA10103-DPB15101 DPA10103-DPB15901 DPA10103-DPB18001 DPA10104-DPB10101 DPA10104-DPB11501 DPA10105-DPB10101 DPA10105-DPB10401 DPA10105-DPB11801 DPA10105-DPB15001 DPA10106-DPB10101 DPA10201-DPB10101 DPA10201-DPB10201 DPA10201-DPB10202 DPA10201-DPB10401 DPA10201-DPB10501 DPA10201-DPB110601 DPA10201-DPB11501 DPA10201-DPB11601 DPA10201-DPB11801 DPA10201-DPB11901 DPA10201-DPB13401 DPA10202-DPB10101 DPA10202-DPB10201 DPA10202-DPB10202 DPA10202-DPB10401 DPA10202-DPB10402; note = HLAs: DPA10202-DPB10501 DPA10202-DPB110001 DPA10202-DPB110501 DPA10202-DPB110601 DPA10202-DPB11801 DPA10202-DPB11901 DPA10202-DPB13101 DPA10202-DPB13801 DPA10202-DPB15501 DPA10202-DPB16501 DPA10301-DPB10101 DPA10301-DPB10201 DPA10301-DPB10202 DPA10301-DPB10401 DPA10301-DPB10402 DPA10301-DPB110501 DPA10301-DPB110601 DPA10301-DPB11801 DPA10301-DPB12301 DPA10301-DPB13901 DPA10301-DPB14001 DPA10301-DPB14901 DPA10301-DPB15501 DPA10301-DPB16501 DPA10301-DPB17501 DPA10301-DPB18001 DPA10401-DPB10101 DPA10401-DPB10201 DPA10401-DPB10202 DPA10401-DPB10402 DPA10401-DPB10501 DPA10401-DPB110501 DPA10401-DPB14901 DQA10102-DQB10501
QWTYQIYQEPFKNLKTGKYA

SEQ ID NO: 5239 - protein, 13 aa, Human immunodeficiency virus 1
  source 1..13: note = HLAs: DRB1_1001 DQA10102-DQB10501 DQA10102-DQB10609 DQA10201-DQB10301 DQA10401-DQB10301 DQA10401-DQB10319 DQA10501-DQB10301 DQA10501-DQB10319 DQA10503-DQB10301 DQA10505-DQB10301 DQA10505-DQB10309 DQA10505-DQB10319 DQA10508-DQB10301 DQA10509-DQB10301
QYALGIIQAQPDK

SEQ ID NO: 5240 - protein, 14 aa, Human immunodeficiency virus 1
  source 1..14: note = HLAs: DRB1_0405 DRB1_0408 DRB1_0410 DRB1_1001 DPA10301-DPB10101 DPA10401-DPB10101 DQA10102-DQB10501 DQA10102-DQB10503 DQA10102-DQB10601 DQA10102-DQB10602 DQA10102-DQB10609 DQA10102-DQB10611 DQA10103-DQB10501 DQA10103-DQB10601 DQA10103-DQB10609 DQA10201-DQB10301 DQA10201-DQB10303 DQA10301-DQB10301 DQA10301-DQB10304 DQA10302-DQB10301 DQA10302-DQB10304 DQA10303-DQB10301 DQA10303-DQB10304 DQA10401-DQB10301 DQA10401-DQB10319 DQA10501-DQB10301 DQA10501-DQB10319 DQA10503-DQB10301 DQA10505-DQB10301 DQA10505-DQB10302 DQA10505-DQB10309 DQA10505-DQB10319 DQA10506-DQB10303 DQA10508-DQB10301 DQA10509-DQB10301 DQA10601-DQB10301
QYALGIIQAQPDKS

SEQ ID NO: 5241 - protein, 15 aa, Human immunodeficiency virus 1
  source 1..15: note = HLAs: DRB1_0101 DRB1_0102 DRB1_0401 DRB1_0404 DRB1_0405 DRB1_0408 DRB1_0410 DRB1_0901 DRB1_1001 DRB1_1406 DPA10301-DPB10101 DPA10401-DPB10101 DQA10101-DQB10601 DQA10102-DQB10501 DQA10102-DQB10503 DQA10102-DQB10601 DQA10102-DQB10602 DQA10102-DQB10609 DQA10102-DQB10611 DQA10103-DQB10501 DQA10103-DQB10601 DQA10103-DQB10602 DQA10103-DQB10609 DQA10201-DQB10301 DQA10201-DQB10303 DQA10301-DQB10301 DQA10301-DQB10304 DQA10302-DQB10301 DQA10302-DQB10304 DQA10303-DQB10301 DQA10303-DQB10304 DQA10401-DQB10301 DQA10401-DQB10319 DQA10501-DQB10301 DQA10501-DQB10319 DQA10503-DQB10301 DQA10505-DQB10301 DQA10505-DQB10302 DQA10505-DQB10309 DQA10505-DQB10319 DQA10505-DQB10402 DQA10506-DQB10303 DQA10508-DQB10301 DQA10509-DQB10301 DQA10601-DQB10301
QYALGIIQAQPDKSE

SEQ ID NO: 5242 - protein, 16 aa, Human immunodeficiency virus 1
  source 1..16: note = HLAs: DRB1_0101 DRB1_0405 DRB1_0408 DRB1_0410 DRB1_1001 DPA10301-DPB10101 DPA10401-DPB10101 DQA10101-DQB10601 DQA10102-DQB10501 DQA10102-DQB10503 DQA10102-DQB10601 DQA10102-DQB10602 DQA10102-DQB10609 DQA10102-DQB10611 DQA10103-DQB10501 DQA10103-DQB10601 DQA10103-DQB10609 DQA10201-DQB10301 DQA10201-DQB10302 DQA10201-DQB10303 DQA10301-DQB10301 DQA10301-DQB10304 DQA10302-DQB10301 DQA10302-DQB10304 DQA10303-DQB10301 DQA10303-DQB10304 DQA10401-DQB10301 DQA10401-DQB10319 DQA10501-DQB10301 DQA10501-DQB10319 DQA10503-DQB10301 DQA10505-DQB10301 DQA10505-DQB10302 DQA10505-DQB10309 DQA10505-DQB10319 DQA10506-DQB10303 DQA10508-DQB10301 DQA10509-DQB10301 DQA10601-DQB10301
QYALGIIQAQPDKSES

SEQ ID NO: 5243 - protein, 17 aa, Human immunodeficiency virus 1
  source 1..17: note = HLAs: DRB1_0101 DRB1_0404 DRB1_0405 DRB1_0408 DRB1_0410 DRB1_1001 DPA10301-DPB10101 DPA10401-DPB10101 DQA10102-DQB10501 DQA10102-DQB10503 DQA10102-DQB10601 DQA10102-DQB10602 DQA10102-DQB10609 DQA10102-DQB10611 DQA10103-DQB10501 DQA10103-DQB10601 DQA10103-DQB10609 DQA10201-DQB10301 DQA10301-DQB10301 DQA10302-DQB10301 DQA10303-DQB10301 DQA10401-DQB10301 DQA10401-DQB10319 DQA10501-DQB10301 DQA10501-DQB10319 DQA10503-DQB10301 DQA10505-DQB10301 DQA10505-DQB10309 DQA10505-DQB10319 DQA10506-DQB10303 DQA10508-DQB10301 DQA10509-DQB10301 DQA10601-DQB10301
QYALGIIQAQPDKSESE

SEQ ID NO: 5244 - protein, 18 aa, Human immunodeficiency virus 1
  source 1..18: note = HLAs: DRB1_1001 DQA10102-DQB10501 DQA10102-DQB10503 DQA10102-DQB10601 DQA10102-DQB10609 DQA10201-DQB10301
QYALGIIQAQPDKSESEL

SEQ ID NO: 5245 - protein, 19 aa, Human immunodeficiency virus 1
  source 1..19: note = HLAs: DRB1_0410 DRB1_1001 DPA10301-DPB10101 DPA10401-DPB10101 DQA10102-DQB10501 DQA10102-DQB10503 DQA10102-DQB10601 DQA10102-DQB10609 DQA10103-DQB10501 DQA10103-DQB10601 DQA10103-DQB10609 DQA10201-DQB10301 DQA10501-DQB10301 DQA10501-DQB10319 DQA10503-DQB10301 DQA10505-DQB10301 DQA10505-DQB10309 DQA10505-DQB10319 DQA10508-DQB10301 DQA10509-DQB10301
QYALGIIQAQPDKSESELV

SEQ ID NO: 5246 - protein, 15 aa, Human immunodeficiency virus 1
  source 1..15: note = HLAs: DQA10102-DQB10501 DQA10102-DQB10609
QYMDDLYVGSDLEIG

SEQ ID NO: 5247 - protein, 16 aa, Human immunodeficiency virus 1
  source 1..16: note = HLAs: DPA10301-DPB10101 DQA10102-DQB10501 DQA10102-DQB10609 DQA10501-DQB10201 DQA10505-DQB10201 DQA10505-DQB10202
QYMDDLYVGSDLEIGQ

SEQ ID NO: 5248 - protein, 17 aa, Human immunodeficiency virus 1
  source 1..17: note = HLAs: DPA10301-DPB10101 DQA10102-DQB10501 DQA10102-DQB10609
QYMDDLYVGSDLEIGQH

SEQ ID NO: 5249 - protein, 19 aa, Human immunodeficiency virus 1
  source 1..19: note = HLAs: DPA10301-DPB10101 DQA10102-DQB10501 DQA10102-DQB10609
QYMDDLYVGSDLEIGQHRA

SEQ ID NO: 5250 - protein, 15 aa, Human immunodeficiency virus 1
  source 1..15: note = HLAs: DQA10505-DQB10402
QYNVLPQGWKGSPAI

SEQ ID NO: 5251 - protein, 16 aa, Human immunodeficiency virus 1
  source 1..16: note = HLAs: DQA10505-DQB10402
QYNVLPQGWKGSPAIF

SEQ ID NO: 5252 - protein, 17 aa, Human immunodeficiency virus 1
  source 1..17: note = HLAs: DQA10201-DQB10301 DQA10505-DQB10402
QYNVLPQGWKGSPAIFQ

SEQ ID NO: 5253 - protein, 19 aa, Human immunodeficiency virus 1
  source 1..19: note = HLAs: DRB1_1001 DQA10103-DQB10601 DQA10201-DQB10301 DQA10505-DQB10402
QYNVLPQGWKGSPAIFQSS

SEQ ID NO: 5254 - protein, 20 aa, Human immunodeficiency virus 1
  source 1..20: note = HLAs: DRB1_0101 DRB1_0901 DRB1_1001 DQA10102-DQB10601 DQA10103-DQB10601 DQA10201-DQB10301 DQA10501-DQB10301 DQA10501-DQB10319 DQA10503-DQB10301 DQA10505-DQB10301 DQA10505-DQB10309 DQA10505-DQB10319 DQA10505-DQB10402 DQA10508-DQB10301 DQA10509-DQB10301
QYNVLPQGWKGSPAIFQSSM

SEQ ID NO: 5255 - protein, 13 aa, Human immunodeficiency virus 1
  source 1..13: note = HLAs: DQA10102-DQB10501
RAMASDFNLPPVV

SEQ ID NO: 5256 - protein, 14 aa, Human immunodeficiency virus 1
  source 1..14: note = HLAs: DRB1_0401 DQA10102-DQB10501 DQA10102-DQB10503
RAMASDFNLPPVVA

SEQ ID NO: 5257 - protein, 15 aa, Human immunodeficiency virus 1
  source 1..15: note = HLAs: DRB1_0101 DRB1_0301 DRB1_0401 DRB1_0408 DRB1_1001 DPA10301-DPB10101 DPA10301-DPB10201 DPA10401-DPB10101 DQA10102-DQB10501 DQA10102-DQB10503 DQA10102-DQB10609 DQA10103-DQB10501 DQA10103-DQB10609
RAMASDFNLPPVVAK

SEQ ID NO: 5258 - protein, 16 aa, Human immunodeficiency virus 1
  source 1..16: note = HLAs: DPA10301-DPB10101 DPA10401-DPB10101 DQA10102-DQB10501 DQA10102-DQB10503 DQA10102-DQB10609 DQA10103-DQB10501
RAMASDFNLPPVVAKE

SEQ ID NO: 5259 - protein, 17 aa, Human immunodeficiency virus 1
  source 1..17: note = HLAs: DRB1_1001 DPA10301-DPB10101 DPA10401-DPB10101 DQA10102-DQB10501 DQA10102-DQB10503 DQA10103-DQB10501
RAMASDFNLPPVVAKEI

SEQ ID NO: 5260 - protein, 18 aa, Human immunodeficiency virus 1
  source 1..18: note = HLAs: DQA10102-DQB10501
RAMASDFNLPPVVAKEIV

SEQ ID NO: 5261 - protein, 19 aa, Human immunodeficiency virus 1
  source 1..19: note = HLAs: DRB1_1001 DPA10301-DPB10101 DPA10401-DPB10101 DQA10102-DQB10501 DQA10102-DQB10503 DQA10103-DQB10501
RAMASDFNLPPVVAKEIVA

SEQ ID NO: 5262 - protein, 15 aa, Human immunodeficiency virus 1
  source 1..15: note = HLAs: DRB1_0101 DRB1_0701 DRB1_0901 DRB1_1001 DRB1_1406 DQA10102-DQB10501 DQA10102-DQB10601 DQA10102-DQB10602 DQA10103-DQB10601 DQA10103-DQB10602 DQA10103-DQB10609 DQA10201-DQB10301
RDQAEHLKTAVQMAV

SEQ ID NO: 5263 - protein, 16 aa, Human immunodeficiency virus 1
  source 1..16: note = HLAs: DRB1_0901 DRB1_1001 DPA10103-DPB11501 DPA10104-DPB11501 DPA10301-DPB10101 DPA10301-DPB10201 DPA10301-DPB10202 DPA10301-DPB110601 DPA10301-DPB11801 DPA10301-DPB14001 DPA10301-DPB16501 DPA10401-DPB10101 DQA10102-DQB10501 DQA10102-DQB10601 DQA10102-DQB10602 DQA10102-DQB10609 DQA10102-DQB10611 DQA10103-DQB10601 DQA10103-DQB10602 DQA10103-DQB10609 DQA10201-DQB10301 DQA10201-DQB10303
RDQAEHLKTAVQMAVF

SEQ ID NO: 5264 - protein, 17 aa, Human immunodeficiency virus 1
  source 1..17: note = HLAs: DRB1_0101 DRB1_0701 DRB1_0901 DRB1_1001 DRB1_1406 DPA10103-DPB10101 DPA10103-DPB11501 DPA10103-DPB15001 DPA10104-DPB10101 DPA10104-DPB11501 DPA10105-DPB10101 DPA10105-DPB15001 DPA10202-DPB10101 DPA10301-DPB10101 DPA10301-DPB10201 DPA10301-DPB10202 DPA10301-DPB10401 DPA10301-DPB110601 DPA10301-DPB11801 DPA10301-DPB12301 DPA10301-DPB13901 DPA10301-DPB14001 DPA10301-DPB16501 DPA10401-DPB10101 DPA10401-DPB10301 DPA10401-DPB11401 DQA10102-DQB10501 DQA10102-DQB10601 DQA10102-DQB10602 DQA10102-DQB10609 DQA10102-DQB10611 DQA10103-DQB10501 DQA10103-DQB10601 DQA10103-DQB10602 DQA10103-DQB10609 DQA10201-DQB10301
RDQAEHLKTAVQMAVFI

SEQ ID NO: 5265 - protein, 18 aa, Human immunodeficiency virus 1
  source 1..18: note = HLAs: DPA10103-DPB11501 DPA10104-DPB11501 DPA10301-DPB10101 DPA10301-DPB10201 DPA10301-DPB10202 DPA10301-DPB11801 DPA10401-DPB10101 DQA10102-DQB10501 DQA10102-DQB10601 DQA10102-DQB10602 DQA10102-DQB10609 DQA10102-DQB10611
RDQAEHLKTAVQMAVFIH

SEQ ID NO: 5266 - protein, 19 aa, Human immunodeficiency virus 1
  source 1..19: note = HLAs: DRB1_0101 DRB1_1001 DPA10103-DPB10101 DPA10103-DPB10201 DPA10103-DPB10202 DPA10103-DPB11501 DPA10103-DPB11601 DPA10103-DPB11901 DPA10103-DPB13101 DPA10103-DPB14801 DPA10103-DPB15001 DPA10104-DPB10101 DPA10104-DPB11501 DPA10105-DPB10101 DPA10105-DPB15001 DPA10201-DPB11501 DPA10202-DPB10101 DPA10202-DPB110601 DPA10202-DPB11901 DPA10301-DPB10101 DPA10301-DPB10201 DPA10301-DPB10202 DPA10301-DPB10401 DPA10301-DPB10402 DPA10301-DPB110501 DPA10301-DPB110601 DPA10301-DPB11101 DPA10301-DPB11301 DPA10301-DPB11801 DPA10301-DPB12301 DPA10301-DPB13901 DPA10301-DPB14001 DPA10301-DPB14901 DPA10301-DPB15501 DPA10301-DPB16501 DPA10301-DPB17501 DPA10301-DPB18001 DPA10401-DPB10101 DPA10401-DPB10201 DPA10401-DPB10202 DPA10401-DPB10301 DPA10401-DPB10501 DPA10401-DPB11301 DPA10401-DPB113301 DPA10401-DPB11401 DQA10102-DQB10501 DQA10102-DQB10601 DQA10102-DQB10602 DQA10102-DQB10609 DQA10102-DQB10611 DQA10103-DQB10501 DQA10103-DQB10601 DQA10103-DQB10602 DQA10103-DQB10609
RDQAEHLKTAVQMAVFIHN

SEQ ID NO: 5267 - protein, 20 aa, Human immunodeficiency virus 1
  source 1..20: note = HLAs: DRB1_0101 DRB1_0701 DRB1_0813 DRB1_0901 DRB1_1001 DRB1_1406 DPA10103-DPB10101 DPA10103-DPB10201 DPA10103-DPB10202 DPA10103-DPB10501 DPA10103-DPB11101 DPA10103-DPB11501 DPA10103-DPB11601 DPA10103-DPB11801 DPA10103-DPB11901 DPA10103-DPB13101 DPA10103-DPB13401 DPA10103-DPB14001 DPA10103-DPB14801 DPA10103-DPB15001 DPA10103-DPB15501 DPA10104-DPB10101 DPA10104-DPB11501 DPA10105-DPB10101 DPA10105-DPB11801 DPA10105-DPB15001 DPA10106-DPB10101 DPA10201-DPB10101 DPA10201-DPB110601 DPA10201-DPB11501 DPA10201-DPB11901 DPA10202-DPB10101 DPA10202-DPB10201 DPA10202-DPB10202 DPA10202-DPB10501 DPA10202-DPB10901 DPA10202-DPB110601 DPA10202-DPB11101 DPA10202-DPB11301 DPA10202-DPB11901 DPA10202-DPB13801 DPA10202-DPB15501 DPA10202-DPB16501 DPA10301-DPB10101 DPA10301-DPB10201 DPA10301-DPB10202 DPA10301-DPB10401 DPA10301-DPB10402 DPA10301-DPB10901 DPA10301-DPB110501 DPA10301-DPB110601 DPA10301-DPB11101 DPA10301-DPB11301 DPA10301-DPB11701 DPA10301-DPB11801 DPA10301-DPB12301 DPA10301-DPB13901; note = HLAs: DPA10301-DPB14001 DPA10301-DPB14901 DPA10301-DPB15501 DPA10301-DPB16501 DPA10301-DPB17501 DPA10301-DPB18001 DPA10401-DPB10101 DPA10401-DPB10201 DPA10401-DPB10202 DPA10401-DPB10301 DPA10401-DPB10402 DPA10401-DPB10501 DPA10401-DPB110501 DPA10401-DPB11301 DPA10401-DPB113301 DPA10401-DPB11401 DPA10401-DPB14901 DQA10102-DQB10501 DQA10102-DQB10503 DQA10102-DQB10601 DQA10102-DQB10602 DQA10102-DQB10609 DQA10102-DQB10611 DQA10103-DQB10501 DQA10103-DQB10601 DQA10103-DQB10602 DQA10103-DQB10609 DQA10201-DQB10301 DQA10201-DQB10303
RDQAEHLKTAVQMAVFIHNF

SEQ ID NO: 5268 - protein, 21 aa, Human immunodeficiency virus 1
  source 1..21: note = HLAs: DRB1_0101 DRB1_1001 DRB1_1406 DPA10103-DPB10101 DPA10103-DPB10201 DPA10103-DPB10202 DPA10103-DPB10501 DPA10103-DPB11501 DPA10103-DPB11601 DPA10103-DPB11801 DPA10103-DPB11901 DPA10103-DPB13101 DPA10103-DPB13401 DPA10103-DPB14001 DPA10103-DPB14801 DPA10103-DPB15001 DPA10104-DPB10101 DPA10104-DPB11501 DPA10105-DPB10101 DPA10105-DPB11801 DPA10105-DPB15001 DPA10106-DPB10101 DPA10201-DPB10101 DPA10201-DPB11501 DPA10202-DPB10101 DPA10202-DPB110601 DPA10202-DPB11901 DPA10301-DPB10101 DPA10301-DPB10201 DPA10301-DPB10202 DPA10301-DPB10401 DPA10301-DPB10402 DPA10301-DPB110501 DPA10301-DPB110601 DPA10301-DPB11101 DPA10301-DPB11801 DPA10301-DPB12301 DPA10301-DPB13901 DPA10301-DPB14001 DPA10301-DPB14901 DPA10301-DPB15501 DPA10301-DPB16501 DPA10301-DPB17501 DPA10301-DPB18001 DPA10401-DPB10101 DPA10401-DPB10201 DPA10401-DPB10202 DPA10401-DPB10501 DPA10401-DPB11301 DPA10401-DPB113301 DPA10401-DPB11401 DQA10102-DQB10501 DQA10102-DQB10601 DQA10102-DQB10609 DQA10102-DQB10611 DQA10103-DQB10501; note = HLAs: DQA10103-DQB10601 DQA10103-DQB10609
RDQAEHLKTAVQMAVFIHNFK

SEQ ID NO: 5269 - protein, 22 aa, Human immunodeficiency virus 1
  source 1..22: note = HLAs: DRB1_0101 DRB1_0410 DRB1_0701 DRB1_1001 DRB1_1304 DRB1_1406 DPA10103-DPB10101 DPA10103-DPB10201 DPA10103-DPB10202 DPA10103-DPB10401 DPA10103-DPB10501 DPA10103-DPB11101 DPA10103-DPB112601 DPA10103-DPB11501 DPA10103-DPB11601 DPA10103-DPB11801 DPA10103-DPB11901 DPA10103-DPB12301 DPA10103-DPB13101 DPA10103-DPB13401 DPA10103-DPB13901 DPA10103-DPB14001 DPA10103-DPB14101 DPA10103-DPB14801 DPA10103-DPB15001 DPA10103-DPB15501 DPA10104-DPB10101 DPA10104-DPB11501 DPA10105-DPB10101 DPA10105-DPB10401 DPA10105-DPB11801 DPA10105-DPB15001 DPA10106-DPB10101 DPA10201-DPB10101 DPA10201-DPB110601 DPA10201-DPB11501 DPA10201-DPB11601 DPA10201-DPB11901 DPA10202-DPB10101 DPA10202-DPB10201 DPA10202-DPB10202 DPA10202-DPB10501 DPA10202-DPB110601 DPA10202-DPB11801 DPA10202-DPB11901 DPA10202-DPB13101 DPA10202-DPB13801 DPA10202-DPB16501 DPA10301-DPB10101 DPA10301-DPB10201 DPA10301-DPB10202 DPA10301-DPB10401 DPA10301-DPB10402 DPA10301-DPB110501 DPA10301-DPB110601 DPA10301-DPB11101 DPA10301-DPB11301; note = HLAs: DPA10301-DPB11801 DPA10301-DPB12301 DPA10301-DPB13901 DPA10301-DPB14001 DPA10301-DPB14901 DPA10301-DPB15501 DPA10301-DPB16501 DPA10301-DPB17501 DPA10301-DPB18001 DPA10401-DPB10101 DPA10401-DPB10201 DPA10401-DPB10202 DPA10401-DPB10301 DPA10401-DPB10402 DPA10401-DPB10501 DPA10401-DPB110501 DPA10401-DPB11301 DPA10401-DPB113301 DPA10401-DPB11401 DPA10401-DPB14901 DQA10102-DQB10501 DQA10102-DQB10503 DQA10102-DQB10601 DQA10102-DQB10602 DQA10102-DQB10609 DQA10102-DQB10611 DQA10103-DQB10501 DQA10103-DQB10601 DQA10103-DQB10609
RDQAEHLKTAVQMAVFIHNFKR

SEQ ID NO: 5270 - protein, 23 aa, Human immunodeficiency virus 1
  source 1..23: note = HLAs: DRB1_0101 DRB1_0404 DRB1_0410 DRB1_0701 DRB1_0804 DRB1_0806 DRB1_0813 DRB1_1001 DRB1_1102 DRB1_1103 DRB1_1104 DRB1_1301 DRB1_1304 DRB1_1406 DRB1_1501 DRB1_1601 DRB1_1602 DPA10103-DPB10101 DPA10103-DPB10201 DPA10103-DPB10202 DPA10103-DPB10401 DPA10103-DPB10501 DPA10103-DPB11101 DPA10103-DPB112601 DPA10103-DPB11501 DPA10103-DPB11601 DPA10103-DPB11801 DPA10103-DPB11901 DPA10103-DPB12301 DPA10103-DPB13101 DPA10103-DPB13401 DPA10103-DPB13901 DPA10103-DPB14001 DPA10103-DPB14101 DPA10103-DPB14801 DPA10103-DPB15001 DPA10103-DPB15501 DPA10103-DPB15901 DPA10104-DPB10101 DPA10104-DPB11501 DPA10105-DPB10101 DPA10105-DPB10401 DPA10105-DPB11801 DPA10105-DPB15001 DPA10106-DPB10101 DPA10201-DPB10101 DPA10201-DPB10202 DPA10201-DPB110601 DPA10201-DPB11501 DPA10201-DPB11601 DPA10201-DPB11901 DPA10202-DPB10101 DPA10202-DPB10201 DPA10202-DPB10202 DPA10202-DPB10401 DPA10202-DPB10501 DPA10202-DPB110601 DPA10202-DPB11101 DPA10202-DPB11801 DPA10202-DPB11901 DPA10202-DPB13101 DPA10202-DPB13801; note = HLAs: DPA10202-DPB15501 DPA10202-DPB16501 DPA10301-DPB10101 DPA10301-DPB10201 DPA10301-DPB10202 DPA10301-DPB10401 DPA10301-DPB10402 DPA10301-DPB110501 DPA10301-DPB110601 DPA10301-DPB11101 DPA10301-DPB11301 DPA10301-DPB11801 DPA10301-DPB12301 DPA10301-DPB13901 DPA10301-DPB14001 DPA10301-DPB14901 DPA10301-DPB15501 DPA10301-DPB16501 DPA10301-DPB17501 DPA10301-DPB18001 DPA10401-DPB10101 DPA10401-DPB10201 DPA10401-DPB10202 DPA10401-DPB10301 DPA10401-DPB10402 DPA10401-DPB10501 DPA10401-DPB110501 DPA10401-DPB11301 DPA10401-DPB113301 DPA10401-DPB11401 DPA10401-DPB14901 DQA10102-DQB10501 DQA10102-DQB10503 DQA10102-DQB10601 DQA10102-DQB10602 DQA10102-DQB10609 DQA10102-DQB10611 DQA10103-DQB10501 DQA10103-DQB10601 DQA10103-DQB10602 DQA10103-DQB10609
RDQAEHLKTAVQMAVFIHNFKRK

SEQ ID NO: 5271 - protein, 24 aa, Human immunodeficiency virus 1
  source 1..24: note = HLAs: DRB1_0101 DRB1_0404 DRB1_0410 DRB1_0701 DRB1_0801 DRB1_0804 DRB1_0806 DRB1_0813 DRB1_1001 DRB1_1101 DRB1_1102 DRB1_1103 DRB1_1104 DRB1_1301 DRB1_1304 DRB1_1305 DRB1_1406 DRB1_1501 DRB1_1601 DRB1_1602 DPA10103-DPB10101 DPA10103-DPB10201 DPA10103-DPB10202 DPA10103-DPB10401 DPA10103-DPB10501 DPA10103-DPB11101 DPA10103-DPB112601 DPA10103-DPB11501 DPA10103-DPB11601 DPA10103-DPB11801 DPA10103-DPB11901 DPA10103-DPB12301 DPA10103-DPB13101 DPA10103-DPB13401 DPA10103-DPB13901 DPA10103-DPB14001 DPA10103-DPB14101 DPA10103-DPB14801 DPA10103-DPB15001 DPA10103-DPB15501 DPA10103-DPB15901 DPA10104-DPB10101 DPA10104-DPB11501 DPA10105-DPB10101 DPA10105-DPB10401 DPA10105-DPB11801 DPA10105-DPB15001 DPA10106-DPB10101 DPA10201-DPB10101 DPA10201-DPB10202 DPA10201-DPB110601 DPA10201-DPB11501 DPA10201-DPB11601 DPA10201-DPB11901 DPA10202-DPB10101 DPA10202-DPB10201 DPA10202-DPB10202 DPA10202-DPB10401 DPA10202-DPB10501 DPA10202-DPB110601 DPA10202-DPB11101 DPA10202-DPB11801 DPA10202-DPB11901; note = HLAs: DPA10202-DPB13101 DPA10202-DPB13801 DPA10202-DPB15501 DPA10202-DPB16501 DPA10301-DPB10101 DPA10301-DPB10201 DPA10301-DPB10202 DPA10301-DPB10401 DPA10301-DPB10402 DPA10301-DPB110501 DPA10301-DPB110601 DPA10301-DPB11101 DPA10301-DPB11301 DPA10301-DPB11801 DPA10301-DPB12301 DPA10301-DPB13901 DPA10301-DPB14001 DPA10301-DPB14901 DPA10301-DPB15501 DPA10301-DPB16501 DPA10301-DPB17501 DPA10301-DPB18001 DPA10401-DPB10101 DPA10401-DPB10201 DPA10401-DPB10202 DPA10401-DPB10301 DPA10401-DPB10402 DPA10401-DPB10501 DPA10401-DPB110501 DPA10401-DPB11301 DPA10401-DPB113301 DPA10401-DPB11401 DPA10401-DPB14901 DQA10102-DQB10501 DQA10102-DQB10503 DQA10102-DQB10601 DQA10102-DQB10602 DQA10102-DQB10609 DQA10102-DQB10611 DQA10103-DQB10501 DQA10103-DQB10601 DQA10103-DQB10602 DQA10103-DQB10609
RDQAEHLKTAVQMAVFIHNFKRKG

SEQ ID NO: 5272 - protein, 25 aa, Human immunodeficiency virus 1
  source 1..25: note = HLAs: DRB1_0101 DRB1_0404 DRB1_0410 DRB1_0701 DRB1_0801 DRB1_0802 DRB1_0804 DRB1_0806 DRB1_0809 DRB1_0813 DRB1_0901 DRB1_1001 DRB1_1101 DRB1_1102 DRB1_1103 DRB1_1104 DRB1_1301 DRB1_1304 DRB1_1305 DRB1_1402 DRB1_1406 DRB1_1501 DRB1_1503 DRB1_1601 DRB1_1602 DPA10103-DPB10101 DPA10103-DPB10201 DPA10103-DPB10202 DPA10103-DPB10401 DPA10103-DPB10501 DPA10103-DPB11101 DPA10103-DPB112601 DPA10103-DPB11501 DPA10103-DPB11601 DPA10103-DPB11801 DPA10103-DPB11901 DPA10103-DPB12301 DPA10103-DPB13101 DPA10103-DPB13401 DPA10103-DPB13901 DPA10103-DPB14001 DPA10103-DPB14101 DPA10103-DPB14801 DPA10103-DPB15001 DPA10103-DPB15501 DPA10103-DPB15901 DPA10104-DPB10101 DPA10104-DPB11501 DPA10105-DPB10101 DPA10105-DPB10401 DPA10105-DPB11801 DPA10105-DPB15001 DPA10106-DPB10101 DPA10201-DPB10101 DPA10201-DPB10202 DPA10201-DPB110601 DPA10201-DPB11501 DPA10201-DPB11601 DPA10201-DPB11901 DPA10202-DPB10101 DPA10202-DPB10201 DPA10202-DPB10202 DPA10202-DPB10401 DPA10202-DPB10501 DPA10202-DPB110601 DPA10202-DPB11101; note = HLAs: DPA10202-DPB11801 DPA10202-DPB11901 DPA10202-DPB13101 DPA10202-DPB13801 DPA10202-DPB15501 DPA10202-DPB16501 DPA10301-DPB10101 DPA10301-DPB10201 DPA10301-DPB10202 DPA10301-DPB10401 DPA10301-DPB10402 DPA10301-DPB110501 DPA10301-DPB110601 DPA10301-DPB11101 DPA10301-DPB11301 DPA10301-DPB11801 DPA10301-DPB12301 DPA10301-DPB13901 DPA10301-DPB14001 DPA10301-DPB14901 DPA10301-DPB15501 DPA10301-DPB16501 DPA10301-DPB17501 DPA10301-DPB18001 DPA10401-DPB10101 DPA10401-DPB10201 DPA10401-DPB10202 DPA10401-DPB10301 DPA10401-DPB10402 DPA10401-DPB10501 DPA10401-DPB110501 DPA10401-DPB11301 DPA10401-DPB113301 DPA10401-DPB11401 DPA10401-DPB14901 DQA10102-DQB10501 DQA10102-DQB10503 DQA10102-DQB10601 DQA10102-DQB10602 DQA10102-DQB10609 DQA10102-DQB10611 DQA10103-DQB10501 DQA10103-DQB10601 DQA10103-DQB10602 DQA10103-DQB10609
RDQAEHLKTAVQMAVFIHNFKRKGG

SEQ ID NO: 5273 - protein, 15 aa, Human immunodeficiency virus 1
  source 1..15: note = HLAs: DPA10103-DPB10101 DPA10103-DPB11501 DPA10103-DPB13101 DPA10104-DPB10101 DPA10104-DPB11501 DPA10105-DPB10101 DPA10301-DPB10101 DPA10301-DPB10201 DPA10301-DPB10202 DPA10301-DPB10401 DPA10301-DPB110601 DPA10301-DPB11801 DPA10301-DPB12301 DPA10301-DPB13901 DPA10301-DPB14001 DPA10301-DPB16501 DPA10401-DPB10101 DPA10401-DPB10201 DPA10401-DPB10202
RELNKRTQDFWEVQL

SEQ ID NO: 5274 - protein, 16 aa, Human immunodeficiency virus 1
  source 1..16: note = HLAs: DPA10103-DPB11501 DPA10104-DPB11501 DPA10301-DPB10101 DPA10301-DPB10201 DPA10301-DPB10202 DPA10401-DPB10101 DQA10102-DQB10501
RELNKRTQDFWEVQLG

SEQ ID NO: 5275 - protein, 17 aa, Human immunodeficiency virus 1
  source 1..17: note = HLAs: DPA10103-DPB10101 DPA10103-DPB11501 DPA10103-DPB13101 DPA10104-DPB10101 DPA10104-DPB11501 DPA10105-DPB10101 DPA10301-DPB10101 DPA10301-DPB10201 DPA10301-DPB10202 DPA10301-DPB110601 DPA10301-DPB14001 DPA10301-DPB16501 DPA10401-DPB10101 DQA10102-DQB10501
RELNKRTQDFWEVQLGI

SEQ ID NO: 5276 - protein, 18 aa, Human immunodeficiency virus 1
  source 1..18: note = HLAs: DPA10301-DPB10101 DPA10401-DPB10101 DQA10102-DQB10501
RELNKRTQDFWEVQLGIP

SEQ ID NO: 5277 - protein, 19 aa, Human immunodeficiency virus 1
  source 1..19: note = HLAs: DPA10103-DPB10101 DPA10103-DPB11501 DPA10103-DPB13101 DPA10103-DPB15001 DPA10104-DPB10101 DPA10104-DPB11501 DPA10105-DPB10101 DPA10105-DPB15001 DPA10202-DPB10101 DPA10301-DPB10101 DPA10301-DPB10201 DPA10301-DPB10202 DPA10301-DPB10401 DPA10301-DPB110601 DPA10301-DPB11801 DPA10301-DPB12301 DPA10301-DPB13901 DPA10301-DPB14001 DPA10301-DPB16501 DPA10401-DPB10101 DPA10401-DPB10201 DPA10401-DPB10202 DQA10101-DQB10501 DQA10102-DQB10501 DQA10102-DQB10503 DQA10104-DQB10501 DQA10105-DQB10501
RELNKRTQDFWEVQLGIPH

SEQ ID NO: 5278 - protein, 20 aa, Human immunodeficiency virus 1
  source 1..20: note = HLAs: DRB1_1001 DPA10103-DPB10101 DPA10103-DPB11501 DPA10103-DPB11601 DPA10103-DPB11901 DPA10103-DPB13101 DPA10103-DPB13401 DPA10103-DPB15001 DPA10104-DPB10101 DPA10104-DPB11501 DPA10105-DPB10101 DPA10105-DPB15001 DPA10106-DPB10101 DPA10201-DPB10101 DPA10201-DPB11501 DPA10202-DPB10101 DPA10202-DPB110601 DPA10202-DPB11901 DPA10202-DPB13101 DPA10301-DPB10101 DPA10301-DPB10201 DPA10301-DPB10202 DPA10301-DPB10401 DPA10301-DPB10402 DPA10301-DPB110501 DPA10301-DPB110601 DPA10301-DPB11801 DPA10301-DPB12301 DPA10301-DPB13901 DPA10301-DPB14001 DPA10301-DPB14901 DPA10301-DPB16501 DPA10301-DPB18001 DPA10401-DPB10101 DPA10401-DPB10201 DPA10401-DPB10202 DPA10401-DPB10501 DQA10102-DQB10501 DQA10102-DQB10503 DQA10103-DQB10501
RELNKRTQDFWEVQLGIPHP

SEQ ID NO: 5279 - protein, 21 aa, Human immunodeficiency virus 1
  source 1..21: note = HLAs: DRB1_0101 DRB1_1001 DPA10103-DPB10101 DPA10103-DPB11501 DPA10103-DPB13101 DPA10103-DPB15001 DPA10104-DPB10101 DPA10104-DPB11501 DPA10105-DPB10101 DPA10105-DPB15001 DPA10202-DPB10101 DPA10301-DPB10101 DPA10301-DPB10201 DPA10301-DPB10202 DPA10301-DPB10401 DPA10301-DPB110601 DPA10301-DPB11801 DPA10301-DPB12301 DPA10301-DPB13901 DPA10301-DPB14001 DPA10301-DPB16501 DPA10401-DPB10101 DPA10401-DPB10201 DPA10401-DPB10202 DPA10401-DPB10501 DQA10102-DQB10501 DQA10102-DQB10503 DQA10102-DQB10601 DQA10103-DQB10501 DQA10103-DQB10601 DQA10201-DQB10301 DQA10501-DQB10301 DQA10501-DQB10319 DQA10503-DQB10301 DQA10505-DQB10301 DQA10505-DQB10309 DQA10505-DQB10319 DQA10508-DQB10301 DQA10509-DQB10301 DQA10601-DQB10301
RELNKRTQDFWEVQLGIPHPA

SEQ ID NO: 5280 - protein, 22 aa, Human immunodeficiency virus 1
  source 1..22: note = HLAs: DRB1_0101 DRB1_1001 DPA10103-DPB10101 DPA10103-DPB11501 DPA10103-DPB13101 DPA10103-DPB15001 DPA10104-DPB10101 DPA10104-DPB11501 DPA10105-DPB10101 DPA10105-DPB15001 DPA10202-DPB10101 DPA10301-DPB10101 DPA10301-DPB10201 DPA10301-DPB10202 DPA10301-DPB10401 DPA10301-DPB110601 DPA10301-DPB11801 DPA10301-DPB12301 DPA10301-DPB13901 DPA10301-DPB14001 DPA10301-DPB16501 DPA10401-DPB10101 DPA10401-DPB10201 DPA10401-DPB10202 DPA10401-DPB10501 DQA10102-DQB10501 DQA10102-DQB10503 DQA10102-DQB10601 DQA10103-DQB10501 DQA10103-DQB10601 DQA10201-DQB10301 DQA10301-DQB10301 DQA10302-DQB10301 DQA10303-DQB10301 DQA10501-DQB10301 DQA10501-DQB10319 DQA10503-DQB10301 DQA10505-DQB10301 DQA10505-DQB10309 DQA10505-DQB10319 DQA10506-DQB10303 DQA10508-DQB10301 DQA10509-DQB10301 DQA10601-DQB10301
RELNKRTQDFWEVQLGIPHPAG

SEQ ID NO: 5281 - protein, 23 aa, Human immunodeficiency virus 1
  source 1..23: note = HLAs: DRB1_0101 DRB1_0102 DRB1_1001 DPA10103-DPB10101 DPA10103-DPB11501 DPA10103-DPB13101 DPA10103-DPB15001 DPA10104-DPB10101 DPA10104-DPB11501 DPA10105-DPB10101 DPA10105-DPB15001 DPA10202-DPB10101 DPA10301-DPB10101 DPA10301-DPB10201 DPA10301-DPB10202 DPA10301-DPB10401 DPA10301-DPB110601 DPA10301-DPB11801 DPA10301-DPB12301 DPA10301-DPB13901 DPA10301-DPB14001 DPA10301-DPB16501 DPA10401-DPB10101 DPA10401-DPB10201 DPA10401-DPB10202 DPA10401-DPB10501 DQA10102-DQB10501 DQA10102-DQB10503 DQA10102-DQB10601 DQA10103-DQB10501 DQA10103-DQB10601 DQA10103-DQB10609 DQA10201-DQB10301 DQA10201-DQB10303 DQA10301-DQB10301 DQA10302-DQB10301 DQA10303-DQB10301 DQA10501-DQB10301 DQA10501-DQB10319 DQA10503-DQB10301 DQA10505-DQB10301 DQA10505-DQB10309 DQA10505-DQB10319 DQA10505-DQB10402 DQA10506-DQB10303 DQA10508-DQB10301 DQA10509-DQB10301 DQA10601-DQB10301
RELNKRTQDFWEVQLGIPHPAGL

SEQ ID NO: 5282 - protein, 24 aa, Human immunodeficiency virus 1
  source 1..24: note = HLAs: DRB1_0101 DRB1_0102 DRB1_0901 DRB1_1001 DPA10103-DPB10101 DPA10103-DPB11501 DPA10103-DPB11601 DPA10103-DPB13101 DPA10103-DPB15001 DPA10104-DPB10101 DPA10104-DPB11501 DPA10105-DPB10101 DPA10105-DPB15001 DPA10202-DPB10101 DPA10301-DPB10101 DPA10301-DPB10201 DPA10301-DPB10202 DPA10301-DPB10401 DPA10301-DPB110601 DPA10301-DPB11801 DPA10301-DPB12301 DPA10301-DPB13901 DPA10301-DPB14001 DPA10301-DPB16501 DPA10401-DPB10101 DPA10401-DPB10201 DPA10401-DPB10202 DPA10401-DPB10501 DQA10102-DQB10501 DQA10102-DQB10503 DQA10102-DQB10601 DQA10102-DQB10609 DQA10103-DQB10501 DQA10103-DQB10601 DQA10103-DQB10602 DQA10103-DQB10609 DQA10201-DQB10301 DQA10201-DQB10303 DQA10301-DQB10301 DQA10302-DQB10301 DQA10303-DQB10301 DQA10401-DQB10301 DQA10401-DQB10319 DQA10501-DQB10301 DQA10501-DQB10319 DQA10503-DQB10301 DQA10505-DQB10301 DQA10505-DQB10309 DQA10505-DQB10319 DQA10505-DQB10402 DQA10506-DQB10303 DQA10508-DQB10301 DQA10509-DQB10301 DQA10601-DQB10301
RELNKRTQDFWEVQLGIPHPAGLK

SEQ ID NO: 5283 - protein, 25 aa, Human immunodeficiency virus 1
  source 1..25: note = HLAs: DRB1_0101 DRB1_0102 DRB1_0901 DRB1_1001 DPA10103-DPB10101 DPA10103-DPB11501 DPA10103-DPB11601 DPA10103-DPB13101 DPA10103-DPB15001 DPA10104-DPB10101 DPA10104-DPB11501 DPA10105-DPB10101 DPA10105-DPB15001 DPA10202-DPB10101 DPA10301-DPB10101 DPA10301-DPB10201 DPA10301-DPB10202 DPA10301-DPB10401 DPA10301-DPB110601 DPA10301-DPB11801 DPA10301-DPB12301 DPA10301-DPB13901 DPA10301-DPB14001 DPA10301-DPB16501 DPA10401-DPB10101 DPA10401-DPB10201 DPA10401-DPB10202 DPA10401-DPB10501 DQA10102-DQB10501 DQA10102-DQB10503 DQA10102-DQB10601 DQA10102-DQB10609 DQA10103-DQB10501 DQA10103-DQB10601 DQA10103-DQB10602 DQA10103-DQB10609 DQA10201-DQB10301 DQA10201-DQB10303 DQA10301-DQB10301 DQA10302-DQB10301 DQA10303-DQB10301 DQA10401-DQB10301 DQA10401-DQB10319 DQA10501-DQB10301 DQA10501-DQB10319 DQA10503-DQB10301 DQA10505-DQB10301 DQA10505-DQB10309 DQA10505-DQB10319 DQA10505-DQB10402 DQA10506-DQB10303 DQA10508-DQB10301 DQA10509-DQB10301 DQA10601-DQB10301
RELNKRTQDFWEVQLGIPHPAGLKK

SEQ ID NO: 5284 - protein, 13 aa, Human immunodeficiency virus 1
  source 1..13: note = HLAs: DQA10201-DQB10301 DQA10501-DQB10301 DQA10501-DQB10319 DQA10503-DQB10301 DQA10505-DQB10301 DQA10505-DQB10309 DQA10505-DQB10319 DQA10508-DQB10301 DQA10509-DQB10301
REPRGSDIAGTTS

SEQ ID NO: 5285 - protein, 14 aa, Human immunodeficiency virus 1
  source 1..14: note = HLAs: DQA10201-DQB10301 DQA10301-DQB10301 DQA10302-DQB10301 DQA10303-DQB10301 DQA10401-DQB10301 DQA10401-DQB10319 DQA10501-DQB10301 DQA10501-DQB10319 DQA10503-DQB10301 DQA10505-DQB10301 DQA10505-DQB10309 DQA10505-DQB10319 DQA10508-DQB10301 DQA10509-DQB10301 DQA10601-DQB10301
REPRGSDIAGTTST

SEQ ID NO: 5286 - protein, 15 aa, Human immunodeficiency virus 1
  source 1..15: note = HLAs: DQA10201-DQB10301 DQA10201-DQB10303 DQA10301-DQB10301 DQA10302-DQB10301 DQA10303-DQB10301 DQA10401-DQB10301 DQA10401-DQB10319 DQA10501-DQB10301 DQA10501-DQB10319 DQA10503-DQB10301 DQA10505-DQB10301 DQA10505-DQB10309 DQA10505-DQB10319 DQA10506-DQB10303 DQA10508-DQB10301 DQA10509-DQB10301 DQA10601-DQB10301
REPRGSDIAGTTSTL

SEQ ID NO: 5287 - protein, 16 aa, Human immunodeficiency virus 1
  source 1..16: note = HLAs: DQA10102-DQB10601 DQA10103-DQB10601 DQA10201-DQB10301 DQA10201-DQB10303 DQA10301-DQB10301 DQA10302-DQB10301 DQA10303-DQB10301 DQA10401-DQB10301 DQA10401-DQB10319 DQA10501-DQB10301 DQA10501-DQB10319 DQA10503-DQB10301 DQA10505-DQB10301 DQA10505-DQB10309 DQA10505-DQB10319 DQA10506-DQB10303 DQA10508-DQB10301 DQA10509-DQB10301 DQA10601-DQB10301
REPRGSDIAGTTSTLQ

SEQ ID NO: 5288 - protein, 17 aa, Human immunodeficiency virus 1
  source 1..17: note = HLAs: DQA10102-DQB10601 DQA10103-DQB10601 DQA10201-DQB10301 DQA10201-DQB10303 DQA10301-DQB10301 DQA10302-DQB10301 DQA10303-DQB10301 DQA10401-DQB10301 DQA10401-DQB10319 DQA10501-DQB10301 DQA10501-DQB10319 DQA10503-DQB10301 DQA10505-DQB10301 DQA10505-DQB10309 DQA10505-DQB10319 DQA10506-DQB10303 DQA10508-DQB10301 DQA10509-DQB10301 DQA10601-DQB10301
REPRGSDIAGTTSTLQE

SEQ ID NO: 5289 - protein, 18 aa, Human immunodeficiency virus 1
  source 1..18: note = HLAs: DQA10201-DQB10301 DQA10401-DQB10301 DQA10401-DQB10319 DQA10501-DQB10301 DQA10501-DQB10319 DQA10503-DQB10301 DQA10505-DQB10301 DQA10505-DQB10309 DQA10505-DQB10319 DQA10508-DQB10301 DQA10509-DQB10301 DQA10601-DQB10301
REPRGSDIAGTTSTLQEQ

SEQ ID NO: 5290 - protein, 19 aa, Human immunodeficiency virus 1
  source 1..19: note = HLAs: DQA10102-DQB10601 DQA10103-DQB10601 DQA10201-DQB10301 DQA10201-DQB10303 DQA10301-DQB10301 DQA10302-DQB10301 DQA10303-DQB10301 DQA10401-DQB10301 DQA10401-DQB10319 DQA10501-DQB10301 DQA10501-DQB10319 DQA10503-DQB10301 DQA10505-DQB10301 DQA10505-DQB10309 DQA10505-DQB10319 DQA10506-DQB10303 DQA10508-DQB10301 DQA10509-DQB10301 DQA10601-DQB10301
REPRGSDIAGTTSTLQEQI

SEQ ID NO: 5291 - protein, 14 aa, Human immunodeficiency virus 1
  source 1..14: note = HLAs: DQA10201-DQB10301
RGSDIAGTTSTLQE

SEQ ID NO: 5292 - protein, 15 aa, Human immunodeficiency virus 1
  source 1..15: note = HLAs: DQA10102-DQB10601 DQA10201-DQB10301 DQA10501-DQB10301 DQA10501-DQB10319 DQA10503-DQB10301 DQA10505-DQB10301 DQA10505-DQB10309 DQA10505-DQB10319 DQA10508-DQB10301 DQA10509-DQB10301
RGSDIAGTTSTLQEQ

SEQ ID NO: 5293 - protein, 16 aa, Human immunodeficiency virus 1
  source 1..16: note = HLAs: DQA10102-DQB10601 DQA10103-DQB10601 DQA10201-DQB10301 DQA10501-DQB10301 DQA10501-DQB10319 DQA10503-DQB10301 DQA10505-DQB10301 DQA10505-DQB10309 DQA10505-DQB10319 DQA10508-DQB10301 DQA10509-DQB10301
RGSDIAGTTSTLQEQI

SEQ ID NO: 5294 - protein, 14 aa, Human immunodeficiency virus 1
  source 1..14: note = HLAs: DRB1_0301 DRB1_1102 DRB1_1103 DRB1_1114 DRB1_1301 DRB1_1302 DRB1_1304 DRB1_1406
RKAKIIRDYGKQMA

SEQ ID NO: 5295 - protein, 15 aa, Human immunodeficiency virus 1
  source 1..15: note = HLAs: DRB1_0101 DRB1_0301 DRB1_0804 DRB1_0806 DRB1_1102 DRB1_1103 DRB1_1104 DRB1_1114 DRB1_1301 DRB1_1302 DRB1_1304 DRB1_1402 DRB1_1406 DRB1_1501 DRB1_1503
RKAKIIRDYGKQMAG

SEQ ID NO: 5296 - protein, 16 aa, Human immunodeficiency virus 1
  source 1..16: note = HLAs: DRB1_0301 DRB1_0806 DRB1_1102 DRB1_1103 DRB1_1104 DRB1_1114 DRB1_1301 DRB1_1302 DRB1_1304 DRB1_1406 DQA10102-DQB10501
RKAKIIRDYGKQMAGD

SEQ ID NO: 5297 - protein, 17 aa, Human immunodeficiency virus 1
  source 1..17: note = HLAs: DRB1_0301 DRB1_0806 DRB1_1102 DRB1_1103 DRB1_1104 DRB1_1114 DRB1_1301 DRB1_1302 DRB1_1304 DRB1_1406
RKAKIIRDYGKQMAGDD

SEQ ID NO: 5298 - protein, 18 aa, Human immunodeficiency virus 1
  source 1..18: note = HLAs: DRB1_0301
RKAKIIRDYGKQMAGDDC

SEQ ID NO: 5299 - protein, 19 aa, Human immunodeficiency virus 1
  source 1..19: note = HLAs: DRB1_0301 DRB1_1102 DRB1_1103 DRB1_1114 DRB1_1301 DRB1_1302 DRB1_1304
RKAKIIRDYGKQMAGDDCV

SEQ ID NO: 5300 - protein, 20 aa, Human immunodeficiency virus 1
  source 1..20: note = HLAs: DRB1_0301 DRB1_0806 DRB1_1102 DRB1_1103 DRB1_1104 DRB1_1114 DRB1_1301 DRB1_1302 DRB1_1304 DRB1_1406 DRB1_1501 DQA10102-DQB10501
RKAKIIRDYGKQMAGDDCVA

SEQ ID NO: 5301 - protein, 21 aa, Human immunodeficiency virus 1
  source 1..21: note = HLAs: DRB1_0301 DRB1_1102 DRB1_1103 DRB1_1104 DRB1_1114 DRB1_1301 DRB1_1302 DRB1_1304
RKAKIIRDYGKQMAGDDCVAG

SEQ ID NO: 5302 - protein, 22 aa, Human immunodeficiency virus 1
  source 1..22: note = HLAs: DRB1_0301 DRB1_1102 DRB1_1103 DRB1_1104 DRB1_1114 DRB1_1301 DRB1_1302 DRB1_1304 DQA10102-DQB10501
RKAKIIRDYGKQMAGDDCVAGR

SEQ ID NO: 5303 - protein, 23 aa, Human immunodeficiency virus 1
  source 1..23: note = HLAs: DRB1_0301 DRB1_1102 DRB1_1103 DRB1_1104 DRB1_1114 DRB1_1301 DRB1_1302 DRB1_1304 DRB1_1406 DQA10102-DQB10501
RKAKIIRDYGKQMAGDDCVAGRQ

SEQ ID NO: 5304 - protein, 24 aa, Human immunodeficiency virus 1
  source 1..24: note = HLAs: DRB1_0301 DRB1_1102 DRB1_1103 DRB1_1104 DRB1_1114 DRB1_1301 DRB1_1302 DRB1_1304 DRB1_1406 DQA10102-DQB10501
RKAKIIRDYGKQMAGDDCVAGRQD

SEQ ID NO: 5305 - protein, 25 aa, Human immunodeficiency virus 1
  source 1..25: note = HLAs: DRB1_0301 DRB1_1102 DRB1_1103 DRB1_1104 DRB1_1114 DRB1_1301 DRB1_1302 DRB1_1304 DRB1_1406 DQA10102-DQB10501
RKAKIIRDYGKQMAGDDCVAGRQDE

SEQ ID NO: 5306 - protein, 15 aa, Human immunodeficiency virus 1
  source 1..15: note = HLAs: DQA10201-DQB10301 DQA10501-DQB10301 DQA10501-DQB10319 DQA10503-DQB10301 DQA10505-DQB10301 DQA10505-DQB10309 DQA10505-DQB10319 DQA10508-DQB10301 DQA10509-DQB10301
RKGGIGGYSAGERII

SEQ ID NO: 5307 - protein, 16 aa, Human immunodeficiency virus 1
  source 1..16: note = HLAs: DQA10201-DQB10301
RKGGIGGYSAGERIID

SEQ ID NO: 5308 - protein, 19 aa, Human immunodeficiency virus 1
  source 1..19: note = HLAs: DQA10102-DQB10609
RKGGIGGYSAGERIIDIIA

SEQ ID NO: 5309 - protein, 14 aa, Human immunodeficiency virus 1
  source 1..14: note = HLAs: DRB1_1101 DRB1_1104 DRB1_1305
RKLVDFRELNKRTQ

SEQ ID NO: 5310 - protein, 15 aa, Human immunodeficiency virus 1
  source 1..15: note = HLAs: DRB1_0801 DRB1_0804 DRB1_0806 DRB1_1101 DRB1_1102 DRB1_1103 DRB1_1104 DRB1_1301 DRB1_1304 DRB1_1305 DRB1_1406 DPA10103-DPB11501 DPA10104-DPB11501 DPA10202-DPB13101 DPA10301-DPB11801 DPA10301-DPB14001
RKLVDFRELNKRTQD

SEQ ID NO: 5311 - protein, 16 aa, Human immunodeficiency virus 1
  source 1..16: note = HLAs: DRB1_0801 DRB1_0806 DRB1_1101 DRB1_1103 DRB1_1104 DRB1_1305
RKLVDFRELNKRTQDF

SEQ ID NO: 5312 - protein, 17 aa, Human immunodeficiency virus 1
  source 1..17: note = HLAs: DRB1_0801 DRB1_0806 DRB1_1101 DRB1_1103 DRB1_1104 DRB1_1304 DRB1_1305
RKLVDFRELNKRTQDFW

SEQ ID NO: 5313 - protein, 18 aa, Human immunodeficiency virus 1
  source 1..18: note = HLAs: DRB1_1101 DRB1_1305
RKLVDFRELNKRTQDFWE

SEQ ID NO: 5314 - protein, 19 aa, Human immunodeficiency virus 1
  source 1..19: note = HLAs: DRB1_0801 DRB1_0806 DRB1_1101 DRB1_1103 DRB1_1104 DRB1_1305 DPA10103-DPB11501 DPA10104-DPB11501 DPA10301-DPB10101 DPA10301-DPB14001
RKLVDFRELNKRTQDFWEV

SEQ ID NO: 5315 - protein, 20 aa, Human immunodeficiency virus 1
  source 1..20: note = HLAs: DRB1_0801 DRB1_0802 DRB1_0804 DRB1_0806 DRB1_0809 DRB1_1001 DRB1_1101 DRB1_1103 DRB1_1104 DRB1_1304 DRB1_1305 DPA10103-DPB11501 DPA10103-DPB11601 DPA10103-DPB13101 DPA10103-DPB15001 DPA10104-DPB11501 DPA10105-DPB15001 DPA10202-DPB10101 DPA10202-DPB10501 DPA10202-DPB110601 DPA10202-DPB11901 DPA10202-DPB13101 DPA10202-DPB13801 DPA10301-DPB10101 DPA10301-DPB10201 DPA10301-DPB10202 DPA10301-DPB110601 DPA10301-DPB11801 DPA10301-DPB14001 DPA10301-DPB16501 DPA10401-DPB10101 DPA10401-DPB10501
RKLVDFRELNKRTQDFWEVQ

SEQ ID NO: 5316 - protein, 21 aa, Human immunodeficiency virus 1
  source 1..21: note = HLAs: DRB1_0801 DRB1_0806 DRB1_1101 DRB1_1103 DRB1_1104 DRB1_1304 DRB1_1305 DPA10103-DPB11501 DPA10103-DPB11601 DPA10103-DPB13101 DPA10103-DPB15001 DPA10104-DPB11501 DPA10105-DPB15001 DPA10301-DPB10101 DPA10301-DPB10201 DPA10301-DPB10202 DPA10301-DPB110601 DPA10301-DPB11801 DPA10301-DPB14001 DPA10301-DPB16501 DPA10401-DPB10101 DPA10401-DPB10501
RKLVDFRELNKRTQDFWEVQL

SEQ ID NO: 5317 - protein, 22 aa, Human immunodeficiency virus 1
  source 1..22: note = HLAs: DRB1_0801 DRB1_0806 DRB1_1101 DRB1_1103 DRB1_1104 DRB1_1304 DRB1_1305 DPA10103-DPB11501 DPA10103-DPB11601 DPA10103-DPB13101 DPA10103-DPB15001 DPA10104-DPB11501 DPA10105-DPB15001 DPA10202-DPB13101 DPA10301-DPB10101 DPA10301-DPB10201 DPA10301-DPB10202 DPA10301-DPB110601 DPA10301-DPB11801 DPA10301-DPB14001 DPA10301-DPB16501 DPA10401-DPB10101 DPA10401-DPB10501 DQA10102-DQB10501
RKLVDFRELNKRTQDFWEVQLG

SEQ ID NO: 5318 - protein, 23 aa, Human immunodeficiency virus 1
  source 1..23: note = HLAs: DRB1_0801 DRB1_0806 DRB1_1101 DRB1_1103 DRB1_1104 DRB1_1304 DRB1_1305 DPA10103-DPB10101 DPA10103-DPB11501 DPA10103-DPB11601 DPA10103-DPB13101 DPA10103-DPB15001 DPA10104-DPB10101 DPA10104-DPB11501 DPA10105-DPB10101 DPA10105-DPB15001 DPA10202-DPB10101 DPA10202-DPB110601 DPA10202-DPB11901 DPA10202-DPB13101 DPA10301-DPB10101 DPA10301-DPB10201 DPA10301-DPB10202 DPA10301-DPB110601 DPA10301-DPB11801 DPA10301-DPB14001 DPA10301-DPB16501 DPA10401-DPB10101 DPA10401-DPB10501 DQA10102-DQB10501
RKLVDFRELNKRTQDFWEVQLGI

SEQ ID NO: 5319 - protein, 24 aa, Human immunodeficiency virus 1
  source 1..24: note = HLAs: DRB1_0801 DRB1_0806 DRB1_1101 DRB1_1103 DRB1_1104 DRB1_1304 DRB1_1305 DPA10103-DPB10101 DPA10103-DPB11501 DPA10103-DPB11601 DPA10103-DPB11901 DPA10103-DPB13101 DPA10103-DPB15001 DPA10104-DPB10101 DPA10104-DPB11501 DPA10105-DPB10101 DPA10105-DPB15001 DPA10202-DPB10101 DPA10202-DPB110601 DPA10202-DPB11901 DPA10202-DPB13101 DPA10301-DPB10101 DPA10301-DPB10201 DPA10301-DPB10202 DPA10301-DPB10401 DPA10301-DPB110601 DPA10301-DPB11801 DPA10301-DPB12301 DPA10301-DPB13901 DPA10301-DPB14001 DPA10301-DPB16501 DPA10401-DPB10101 DPA10401-DPB10201 DPA10401-DPB10202 DPA10401-DPB10501 DQA10102-DQB10501
RKLVDFRELNKRTQDFWEVQLGIP

SEQ ID NO: 5320 - protein, 25 aa, Human immunodeficiency virus 1
  source 1..25: note = HLAs: DRB1_0801 DRB1_0806 DRB1_1001 DRB1_1101 DRB1_1103 DRB1_1104 DRB1_1304 DRB1_1305 DPA10103-DPB10101 DPA10103-DPB10501 DPA10103-DPB11501 DPA10103-DPB11601 DPA10103-DPB11901 DPA10103-DPB13101 DPA10103-DPB13401 DPA10103-DPB15001 DPA10104-DPB10101 DPA10104-DPB11501 DPA10105-DPB10101 DPA10105-DPB15001 DPA10202-DPB10101 DPA10202-DPB110601 DPA10202-DPB11901 DPA10202-DPB13101 DPA10301-DPB10101 DPA10301-DPB10201 DPA10301-DPB10202 DPA10301-DPB10401 DPA10301-DPB110601 DPA10301-DPB11801 DPA10301-DPB12301 DPA10301-DPB13901 DPA10301-DPB14001 DPA10301-DPB16501 DPA10401-DPB10101 DPA10401-DPB10201 DPA10401-DPB10202 DPA10401-DPB10501 DQA10102-DQB10501 DQA10102-DQB10503
RKLVDFRELNKRTQDFWEVQLGIPH

SEQ ID NO: 5321 - protein, 13 aa, Human immunodeficiency virus 1
  source 1..13: note = HLAs: DRB1_0301 DRB1_0401 DRB1_0408 DQA10102-DQB10501
RKVLFLDGIDKAQ

SEQ ID NO: 5322 - protein, 14 aa, Human immunodeficiency virus 1
  source 1..14: note = HLAs: DRB1_0101 DRB1_0301 DRB1_0401 DRB1_0404 DRB1_0405 DRB1_0408 DRB1_0410 DRB1_1001 DRB1_1114 DRB1_1302 DRB1_1406 DPA10301-DPB10101 DPA10301-DPB11801 DPA10401-DPB10101 DQA10102-DQB10501 DQA10102-DQB10503
RKVLFLDGIDKAQE

SEQ ID NO: 5323 - protein, 15 aa, Human immunodeficiency virus 1
  source 1..15: note = HLAs: DRB1_0101 DRB1_0102 DRB1_0301 DRB1_0401 DRB1_0404 DRB1_0405 DRB1_0408 DRB1_0410 DRB1_0806 DRB1_1001 DRB1_1102 DRB1_1103 DRB1_1104 DRB1_1114 DRB1_1301 DRB1_1302 DRB1_1303 DRB1_1304 DRB1_1402 DRB1_1406 DRB1_1501 DRB1_1601 DRB1_1602 DPA10103-DPB11501 DPA10104-DPB11501 DPA10301-DPB10101 DPA10301-DPB110601 DPA10301-DPB11801 DPA10301-DPB14001 DPA10401-DPB10101 DQA10102-DQB10501 DQA10102-DQB10503 DQA10103-DQB10501
RKVLFLDGIDKAQEE

SEQ ID NO: 5324 - protein, 16 aa, Human immunodeficiency virus 1
  source 1..16: note = HLAs: DRB1_0101 DRB1_0301 DRB1_0401 DRB1_0404 DRB1_0405 DRB1_0408 DRB1_0410 DRB1_1001 DRB1_1114 DRB1_1302 DRB1_1406 DPA10103-DPB11501 DPA10104-DPB11501 DPA10202-DPB10101 DPA10301-DPB10101 DPA10301-DPB11801 DPA10301-DPB16501 DPA10401-DPB10101 DQA10102-DQB10501 DQA10102-DQB10503 DQA10103-DQB10501
RKVLFLDGIDKAQEEH

SEQ ID NO: 5325 - protein, 17 aa, Human immunodeficiency virus 1
  source 1..17: note = HLAs: DRB1_0101 DRB1_0301 DRB1_0401 DRB1_0404 DRB1_0408 DRB1_0410 DRB1_1001 DRB1_1406 DPA10103-DPB11501 DPA10104-DPB11501 DPA10301-DPB10101 DPA10301-DPB11801 DPA10401-DPB10101 DQA10102-DQB10501 DQA10102-DQB10503 DQA10103-DQB10501
RKVLFLDGIDKAQEEHE

SEQ ID NO: 5326 - protein, 13 aa, Human immunodeficiency virus 1
  source 1..13: note = HLAs: DRB1_1001 DRB1_1602 DPA10301-DPB10101 DPA10301-DPB10201 DPA10301-DPB10202 DPA10401-DPB10101 DQA10102-DQB10501
RKYTAFTIPSINN

SEQ ID NO: 5327 - protein, 14 aa, Human immunodeficiency virus 1
  source 1..14: note = HLAs: DRB1_0101 DRB1_0405 DRB1_0408 DRB1_0701 DRB1_0901 DRB1_1001 DRB1_1601 DRB1_1602 DPA10103-DPB11501 DPA10103-DPB15001 DPA10104-DPB11501 DPA10105-DPB15001 DPA10202-DPB10101 DPA10301-DPB10101 DPA10301-DPB10201 DPA10301-DPB10202 DPA10301-DPB10401 DPA10301-DPB12301 DPA10301-DPB13901 DPA10301-DPB14001 DPA10301-DPB16501 DPA10401-DPB10101 DPA10401-DPB10301 DPA10401-DPB11401 DQA10102-DQB10501 DQA10102-DQB10503 DQA10102-DQB10601 DQA10102-DQB10609 DQA10103-DQB10501 DQA10103-DQB10601 DQA10103-DQB10609 DQA10201-DQB10301 DQA10201-DQB10303 DQA10505-DQB10402 DQA10506-DQB10303
RKYTAFTIPSINNE

SEQ ID NO: 5328 - protein, 15 aa, Human immunodeficiency virus 1
  source 1..15: note = HLAs: DRB1_0101 DRB1_0401 DRB1_0404 DRB1_0405 DRB1_0408 DRB1_0410 DRB1_0701 DRB1_0801 DRB1_0813 DRB1_0901 DRB1_1001 DRB1_1501 DRB1_1502 DRB1_1503 DRB1_1601 DRB1_1602 DPA10103-DPB10101 DPA10103-DPB11501 DPA10103-DPB13101 DPA10103-DPB13401 DPA10103-DPB15001 DPA10104-DPB10101 DPA10104-DPB11501 DPA10105-DPB10101 DPA10105-DPB15001 DPA10201-DPB11501 DPA10202-DPB10101 DPA10202-DPB10202 DPA10202-DPB13101 DPA10202-DPB15501 DPA10301-DPB10101 DPA10301-DPB10201 DPA10301-DPB10202 DPA10301-DPB10401 DPA10301-DPB110601 DPA10301-DPB11801 DPA10301-DPB12301 DPA10301-DPB13901 DPA10301-DPB14001 DPA10301-DPB15501 DPA10301-DPB16501 DPA10401-DPB10101 DPA10401-DPB10201 DPA10401-DPB10202 DPA10401-DPB10301 DPA10401-DPB11401 DQA10102-DQB10501 DQA10102-DQB10503 DQA10102-DQB10601 DQA10102-DQB10609 DQA10103-DQB10501 DQA10103-DQB10601 DQA10103-DQB10604 DQA10103-DQB10609 DQA10201-DQB10301 DQA10201-DQB10303 DQA10501-DQB10301 DQA10501-DQB10319 DQA10503-DQB10301 DQA10505-DQB10301 DQA10505-DQB10309 DQA10505-DQB10319; note = HLAs: DQA10505-DQB10402 DQA10506-DQB10303 DQA10508-DQB10301 DQA10509-DQB10301
RKYTAFTIPSINNET

SEQ ID NO: 5329 - protein, 16 aa, Human immunodeficiency virus 1
  source 1..16: note = HLAs: DRB1_0101 DRB1_0405 DRB1_0408 DRB1_0701 DRB1_0901 DRB1_1001 DRB1_1601 DRB1_1602 DPA10103-DPB10101 DPA10103-DPB11501 DPA10103-DPB15001 DPA10104-DPB10101 DPA10104-DPB11501 DPA10105-DPB10101 DPA10105-DPB15001 DPA10202-DPB10101 DPA10301-DPB10101 DPA10301-DPB10201 DPA10301-DPB10202 DPA10301-DPB10401 DPA10301-DPB110601 DPA10301-DPB12301 DPA10301-DPB13901 DPA10301-DPB14001 DPA10301-DPB16501 DPA10401-DPB10101 DPA10401-DPB10201 DPA10401-DPB10202 DPA10401-DPB10301 DPA10401-DPB11401 DQA10102-DQB10501 DQA10102-DQB10503 DQA10102-DQB10601 DQA10102-DQB10609 DQA10103-DQB10501 DQA10103-DQB10601 DQA10103-DQB10604 DQA10103-DQB10609 DQA10201-DQB10301 DQA10201-DQB10303 DQA10505-DQB10402 DQA10506-DQB10303
RKYTAFTIPSINNETP

SEQ ID NO: 5330 - protein, 17 aa, Human immunodeficiency virus 1
  source 1..17: note = HLAs: DRB1_0101 DRB1_0405 DRB1_0408 DRB1_0701 DRB1_0901 DRB1_1001 DRB1_1601 DRB1_1602 DPA10103-DPB10101 DPA10103-DPB11501 DPA10103-DPB15001 DPA10104-DPB10101 DPA10104-DPB11501 DPA10105-DPB10101 DPA10105-DPB15001 DPA10202-DPB10101 DPA10301-DPB10101 DPA10301-DPB10201 DPA10301-DPB10202 DPA10301-DPB10401 DPA10301-DPB110601 DPA10301-DPB11801 DPA10301-DPB12301 DPA10301-DPB13901 DPA10301-DPB14001 DPA10301-DPB16501 DPA10401-DPB10101 DPA10401-DPB10202 DPA10401-DPB10301 DPA10401-DPB11401 DQA10102-DQB10501 DQA10102-DQB10503 DQA10102-DQB10601 DQA10102-DQB10609 DQA10103-DQB10501 DQA10103-DQB10601 DQA10103-DQB10609 DQA10201-DQB10301 DQA10201-DQB10303 DQA10505-DQB10402 DQA10506-DQB10303
RKYTAFTIPSINNETPG

SEQ ID NO: 5331 - protein, 18 aa, Human immunodeficiency virus 1
  source 1..18: note = HLAs: DRB1_1001 DPA10301-DPB10101 DPA10301-DPB10201 DPA10301-DPB10202 DPA10401-DPB10101 DQA10102-DQB10501
RKYTAFTIPSINNETPGI

SEQ ID NO: 5332 - protein, 19 aa, Human immunodeficiency virus 1
  source 1..19: note = HLAs: DRB1_0101 DRB1_0405 DRB1_0408 DRB1_0701 DRB1_0901 DRB1_1001 DRB1_1602 DPA10103-DPB10101 DPA10103-DPB11501 DPA10103-DPB15001 DPA10104-DPB10101 DPA10104-DPB11501 DPA10105-DPB10101 DPA10105-DPB15001 DPA10202-DPB10101 DPA10301-DPB10101 DPA10301-DPB10201 DPA10301-DPB10202 DPA10301-DPB10401 DPA10301-DPB110601 DPA10301-DPB12301 DPA10301-DPB13901 DPA10301-DPB14001 DPA10301-DPB16501 DPA10401-DPB10101 DPA10401-DPB10301 DQA10102-DQB10501 DQA10102-DQB10503 DQA10102-DQB10601 DQA10102-DQB10609 DQA10103-DQB10501 DQA10103-DQB10601 DQA10103-DQB10609 DQA10201-DQB10301 DQA10201-DQB10303 DQA10505-DQB10402
RKYTAFTIPSINNETPGIR

SEQ ID NO: 5333 - protein, 20 aa, Human immunodeficiency virus 1
  source 1..20: note = HLAs: DRB1_0101 DRB1_0405 DRB1_0408 DRB1_0410 DRB1_0701 DRB1_0901 DRB1_1001 DRB1_1501 DRB1_1502 DRB1_1601 DRB1_1602 DPA10103-DPB10101 DPA10103-DPB11501 DPA10103-DPB11601 DPA10103-DPB13101 DPA10103-DPB15001 DPA10104-DPB10101 DPA10104-DPB11501 DPA10105-DPB10101 DPA10105-DPB15001 DPA10202-DPB10101 DPA10202-DPB10202 DPA10202-DPB110601 DPA10202-DPB11901 DPA10202-DPB13101 DPA10301-DPB10101 DPA10301-DPB10201 DPA10301-DPB10202 DPA10301-DPB10401 DPA10301-DPB110601 DPA10301-DPB11101 DPA10301-DPB11801 DPA10301-DPB12301 DPA10301-DPB13901 DPA10301-DPB14001 DPA10301-DPB15501 DPA10301-DPB16501 DPA10401-DPB10101 DPA10401-DPB10201 DPA10401-DPB10202 DPA10401-DPB10301 DPA10401-DPB10501 DPA10401-DPB11401 DQA10102-DQB10501 DQA10102-DQB10503 DQA10102-DQB10601 DQA10102-DQB10609 DQA10103-DQB10501 DQA10103-DQB10503 DQA10103-DQB10601 DQA10103-DQB10604 DQA10103-DQB10609 DQA10201-DQB10301 DQA10201-DQB10303 DQA10505-DQB10402 DQA10506-DQB10303
RKYTAFTIPSINNETPGIRY

SEQ ID NO: 5334 - protein, 21 aa, Human immunodeficiency virus 1
  source 1..21: note = HLAs: DRB1_0101 DRB1_0405 DRB1_0701 DRB1_0901 DRB1_1001 DRB1_1602 DPA10103-DPB11501 DPA10103-DPB15001 DPA10104-DPB11501 DPA10105-DPB15001 DPA10301-DPB10101 DPA10301-DPB10201 DPA10301-DPB10202 DPA10301-DPB10401 DPA10301-DPB11801 DPA10301-DPB12301 DPA10301-DPB13901 DPA10301-DPB14001 DPA10301-DPB16501 DPA10401-DPB10101 DQA10102-DQB10501 DQA10103-DQB10501 DQA10103-DQB10609 DQA10505-DQB10402
RKYTAFTIPSINNETPGIRYQ

SEQ ID NO: 5335 - protein, 22 aa, Human immunodeficiency virus 1
  source 1..22: note = HLAs: DRB1_0101 DRB1_0405 DRB1_0701 DRB1_0901 DRB1_1001 DRB1_1602 DPA10103-DPB11501 DPA10103-DPB15001 DPA10104-DPB11501 DPA10105-DPB15001 DPA10301-DPB10101 DPA10301-DPB10201 DPA10301-DPB10202 DPA10301-DPB10401 DPA10301-DPB11801 DPA10301-DPB12301 DPA10301-DPB13901 DPA10301-DPB14001 DPA10301-DPB16501 DPA10401-DPB10101 DQA10102-DQB10501 DQA10102-DQB10503 DQA10103-DQB10501 DQA10103-DQB10609 DQA10505-DQB10402
RKYTAFTIPSINNETPGIRYQY

SEQ ID NO: 5336 - protein, 23 aa, Human immunodeficiency virus 1
  source 1..23: note = HLAs: DRB1_0101 DRB1_0405 DRB1_0701 DRB1_0901 DRB1_1001 DRB1_1602 DPA10103-DPB11501 DPA10103-DPB15001 DPA10104-DPB11501 DPA10105-DPB15001 DPA10301-DPB10101 DPA10301-DPB10201 DPA10301-DPB10202 DPA10301-DPB10401 DPA10301-DPB11801 DPA10301-DPB12301 DPA10301-DPB13901 DPA10301-DPB14001 DPA10301-DPB16501 DPA10401-DPB10101 DQA10102-DQB10501 DQA10102-DQB10503 DQA10102-DQB10601 DQA10103-DQB10501 DQA10103-DQB10609 DQA10505-DQB10402
RKYTAFTIPSINNETPGIRYQYN

SEQ ID NO: 5337 - protein, 24 aa, Human immunodeficiency virus 1
  source 1..24: note = HLAs: DRB1_0101 DRB1_0405 DRB1_0701 DRB1_0901 DRB1_1001 DRB1_1602 DPA10103-DPB11501 DPA10103-DPB15001 DPA10104-DPB11501 DPA10105-DPB15001 DPA10301-DPB10101 DPA10301-DPB10201 DPA10301-DPB10202 DPA10301-DPB10401 DPA10301-DPB11801 DPA10301-DPB12301 DPA10301-DPB13901 DPA10301-DPB14001 DPA10301-DPB16501 DPA10401-DPB10101 DQA10102-DQB10501 DQA10102-DQB10503 DQA10102-DQB10601 DQA10103-DQB10501 DQA10103-DQB10601 DQA10103-DQB10609 DQA10505-DQB10402
RKYTAFTIPSINNETPGIRYQYNV

SEQ ID NO: 5338 - protein, 25 aa, Human immunodeficiency virus 1
  source 1..25: note = HLAs: DRB1_0101 DRB1_0405 DRB1_0408 DRB1_0701 DRB1_0901 DRB1_1001 DRB1_1602 DPA10103-DPB10101 DPA10103-DPB11501 DPA10103-DPB15001 DPA10104-DPB10101 DPA10104-DPB11501 DPA10105-DPB10101 DPA10105-DPB15001 DPA10202-DPB10101 DPA10301-DPB10101 DPA10301-DPB10201 DPA10301-DPB10202 DPA10301-DPB10401 DPA10301-DPB11801 DPA10301-DPB12301 DPA10301-DPB13901 DPA10301-DPB14001 DPA10301-DPB16501 DPA10401-DPB10101 DQA10102-DQB10501 DQA10102-DQB10503 DQA10102-DQB10601 DQA10103-DQB10501 DQA10103-DQB10601 DQA10103-DQB10609 DQA10505-DQB10402
RKYTAFTIPSINNETPGIRYQYNVL

SEQ ID NO: 5339 - protein, 14 aa, Human immunodeficiency virus 1
  source 1..14: note = HLAs: DRB1_0301
RRKAKIIRDYGKQM

SEQ ID NO: 5340 - protein, 15 aa, Human immunodeficiency virus 1
  source 1..15: note = HLAs: DRB1_0101 DRB1_0301 DRB1_0804 DRB1_0806 DRB1_1102 DRB1_1103 DRB1_1104 DRB1_1114 DRB1_1301 DRB1_1302 DRB1_1304 DRB1_1402 DRB1_1406 DRB1_1501
RRKAKIIRDYGKQMA

SEQ ID NO: 5341 - protein, 16 aa, Human immunodeficiency virus 1
  source 1..16: note = HLAs: DRB1_0301 DRB1_0806 DRB1_1102 DRB1_1103 DRB1_1104 DRB1_1114 DRB1_1301 DRB1_1302 DRB1_1304 DRB1_1406 DRB1_1501 DQA10102-DQB10501
RRKAKIIRDYGKQMAG

SEQ ID NO: 5342 - protein, 17 aa, Human immunodeficiency virus 1
  source 1..17: note = HLAs: DRB1_0301 DRB1_0806 DRB1_1102 DRB1_1103 DRB1_1104 DRB1_1114 DRB1_1301 DRB1_1302 DRB1_1304 DRB1_1406
RRKAKIIRDYGKQMAGD

SEQ ID NO: 5343 - protein, 18 aa, Human immunodeficiency virus 1
  source 1..18: note = HLAs: DRB1_0301 DRB1_1103
RRKAKIIRDYGKQMAGDD

SEQ ID NO: 5344 - protein, 19 aa, Human immunodeficiency virus 1
  source 1..19: note = HLAs: DRB1_0301 DRB1_1102 DRB1_1103 DRB1_1114 DRB1_1301 DRB1_1302 DRB1_1304
RRKAKIIRDYGKQMAGDDC

SEQ ID NO: 5345 - protein, 20 aa, Human immunodeficiency virus 1
  source 1..20: note = HLAs: DRB1_0301 DRB1_0804 DRB1_0806 DRB1_1102 DRB1_1103 DRB1_1104 DRB1_1114 DRB1_1301 DRB1_1302 DRB1_1304 DRB1_1406 DRB1_1501 DQA10102-DQB10501
RRKAKIIRDYGKQMAGDDCV

SEQ ID NO: 5346 - protein, 21 aa, Human immunodeficiency virus 1
  source 1..21: note = HLAs: DRB1_0301 DRB1_0806 DRB1_1102 DRB1_1103 DRB1_1104 DRB1_1114 DRB1_1301 DRB1_1302 DRB1_1304 DRB1_1406 DQA10102-DQB10501
RRKAKIIRDYGKQMAGDDCVA

SEQ ID NO: 5347 - protein, 22 aa, Human immunodeficiency virus 1
  source 1..22: note = HLAs: DRB1_0301 DRB1_0806 DRB1_1102 DRB1_1103 DRB1_1104 DRB1_1114 DRB1_1301 DRB1_1302 DRB1_1304 DRB1_1406 DQA10102-DQB10501
RRKAKIIRDYGKQMAGDDCVAG

SEQ ID NO: 5348 - protein, 23 aa, Human immunodeficiency virus 1
  source 1..23: note = HLAs: DRB1_0301 DRB1_0806 DRB1_1102 DRB1_1103 DRB1_1104 DRB1_1114 DRB1_1301 DRB1_1302 DRB1_1304 DRB1_1406 DQA10102-DQB10501
RRKAKIIRDYGKQMAGDDCVAGR

SEQ ID NO: 5349 - protein, 24 aa, Human immunodeficiency virus 1
  source 1..24: note = HLAs: DRB1_0301 DRB1_0806 DRB1_1102 DRB1_1103 DRB1_1104 DRB1_1114 DRB1_1301 DRB1_1302 DRB1_1304 DRB1_1406 DQA10102-DQB10501
RRKAKIIRDYGKQMAGDDCVAGRQ

SEQ ID NO: 5350 - protein, 25 aa, Human immunodeficiency virus 1
  source 1..25: note = HLAs: DRB1_0301 DRB1_0806 DRB1_1102 DRB1_1103 DRB1_1104 DRB1_1114 DRB1_1301 DRB1_1302 DRB1_1304 DRB1_1406 DQA10102-DQB10501
RRKAKIIRDYGKQMAGDDCVAGRQD

SEQ ID NO: 5351 - protein, 14 aa, Human immunodeficiency virus 1
  source 1..14: note = HLAs: DRB1_0806 DRB1_1304 DPA10301-DPB10101 DPA10401-DPB10101 DQA10102-DQB10501 DQA10102-DQB10601 DQA10102-DQB10602 DQA10102-DQB10609 DQA10102-DQB10610 DQA10102-DQB10611
RTLNAWVKVVEEKA

SEQ ID NO: 5352 - protein, 15 aa, Human immunodeficiency virus 1
  source 1..15: note = HLAs: DRB1_0101 DRB1_0410 DRB1_0801 DRB1_0804 DRB1_0806 DRB1_1001 DRB1_1102 DRB1_1103 DRB1_1104 DRB1_1301 DRB1_1304 DRB1_1406 DPA10103-DPB11501 DPA10104-DPB11501 DPA10202-DPB10101 DPA10301-DPB10101 DPA10301-DPB10201 DPA10301-DPB10202 DPA10301-DPB110601 DPA10301-DPB11801 DPA10301-DPB14001 DPA10301-DPB16501 DPA10401-DPB10101 DQA10102-DQB10501 DQA10102-DQB10503 DQA10102-DQB10601 DQA10102-DQB10602 DQA10102-DQB10604 DQA10102-DQB10609 DQA10102-DQB10610 DQA10102-DQB10611 DQA10103-DQB10601 DQA10103-DQB10602 DQA10103-DQB10609 DQA10505-DQB10402
RTLNAWVKVVEEKAF

SEQ ID NO: 5353 - protein, 16 aa, Human immunodeficiency virus 1
  source 1..16: note = HLAs: DRB1_0806 DRB1_1001 DRB1_1304 DPA10103-DPB11501 DPA10104-DPB11501 DPA10202-DPB10101 DPA10301-DPB10101 DPA10301-DPB10202 DPA10301-DPB110601 DPA10301-DPB11801 DPA10301-DPB14001 DPA10301-DPB16501 DPA10401-DPB10101 DQA10102-DQB10501 DQA10102-DQB10503 DQA10102-DQB10601 DQA10102-DQB10602 DQA10102-DQB10604 DQA10102-DQB10609 DQA10102-DQB10610 DQA10102-DQB10611 DQA10103-DQB10601 DQA10103-DQB10602 DQA10103-DQB10609
RTLNAWVKVVEEKAFS

SEQ ID NO: 5354 - protein, 17 aa, Human immunodeficiency virus 1
  source 1..17: note = HLAs: DRB1_0806 DRB1_1001 DRB1_1304 DPA10103-DPB11501 DPA10104-DPB11501 DPA10202-DPB10101 DPA10301-DPB10101 DPA10301-DPB110601 DPA10301-DPB11801 DPA10301-DPB14001 DPA10301-DPB16501 DPA10401-DPB10101 DQA10102-DQB10501 DQA10102-DQB10601 DQA10102-DQB10602 DQA10102-DQB10609 DQA10102-DQB10610 DQA10102-DQB10611 DQA10103-DQB10601 DQA10103-DQB10609
RTLNAWVKVVEEKAFSP

SEQ ID NO: 5355 - protein, 18 aa, Human immunodeficiency virus 1
  source 1..18: note = HLAs: DPA10301-DPB10101 DPA10401-DPB10101 DQA10102-DQB10501 DQA10102-DQB10602 DQA10102-DQB10609 DQA10102-DQB10610 DQA10102-DQB10611
RTLNAWVKVVEEKAFSPE

SEQ ID NO: 5356 - protein, 19 aa, Human immunodeficiency virus 1
  source 1..19: note = HLAs: DRB1_0806 DRB1_1001 DRB1_1304 DPA10103-DPB11501 DPA10104-DPB11501 DPA10202-DPB10101 DPA10301-DPB10101 DPA10301-DPB10201 DPA10301-DPB10202 DPA10301-DPB110601 DPA10301-DPB11801 DPA10301-DPB14001 DPA10301-DPB16501 DPA10401-DPB10101 DQA10102-DQB10501 DQA10102-DQB10601 DQA10102-DQB10602 DQA10102-DQB10609 DQA10102-DQB10610 DQA10102-DQB10611 DQA10103-DQB10609
RTLNAWVKVVEEKAFSPEV

SEQ ID NO: 5357 - protein, 20 aa, Human immunodeficiency virus 1
  source 1..20: note = HLAs: DRB1_0101 DRB1_0806 DRB1_1001 DRB1_1304 DPA10103-DPB10101 DPA10103-DPB11501 DPA10103-DPB13101 DPA10103-DPB15001 DPA10104-DPB10101 DPA10104-DPB11501 DPA10105-DPB10101 DPA10105-DPB15001 DPA10202-DPB10101 DPA10202-DPB110601 DPA10202-DPB11901 DPA10202-DPB16501 DPA10301-DPB10101 DPA10301-DPB10201 DPA10301-DPB10202 DPA10301-DPB10401 DPA10301-DPB110601 DPA10301-DPB11801 DPA10301-DPB12301 DPA10301-DPB13901 DPA10301-DPB14001 DPA10301-DPB16501 DPA10401-DPB10101 DPA10401-DPB10202 DPA10401-DPB10501 DPA10401-DPB11401 DQA10102-DQB10501 DQA10102-DQB10503 DQA10102-DQB10601 DQA10102-DQB10602 DQA10102-DQB10604 DQA10102-DQB10609 DQA10102-DQB10610 DQA10102-DQB10611 DQA10103-DQB10501 DQA10103-DQB10601 DQA10103-DQB10609 DQA10505-DQB10402
RTLNAWVKVVEEKAFSPEVI

SEQ ID NO: 5358 - protein, 21 aa, Human immunodeficiency virus 1
  source 1..21: note = HLAs: DRB1_0806 DRB1_1001 DRB1_1304 DPA10103-DPB10101 DPA10103-DPB11501 DPA10104-DPB10101 DPA10104-DPB11501 DPA10105-DPB10101 DPA10202-DPB10101 DPA10301-DPB10101 DPA10301-DPB10201 DPA10301-DPB10202 DPA10301-DPB110601 DPA10301-DPB11801 DPA10301-DPB14001 DPA10301-DPB16501 DPA10401-DPB10101 DQA10102-DQB10501 DQA10102-DQB10503 DQA10102-DQB10602 DQA10102-DQB10609 DQA10102-DQB10610 DQA10102-DQB10611 DQA10103-DQB10501 DQA10103-DQB10609
RTLNAWVKVVEEKAFSPEVIP

SEQ ID NO: 5359 - protein, 22 aa, Human immunodeficiency virus 1
  source 1..22: note = HLAs: DRB1_0806 DRB1_1001 DRB1_1304 DPA10103-DPB10101 DPA10103-DPB11501 DPA10103-DPB15001 DPA10104-DPB10101 DPA10104-DPB11501 DPA10105-DPB10101 DPA10105-DPB15001 DPA10202-DPB10101 DPA10301-DPB10101 DPA10301-DPB10201 DPA10301-DPB10202 DPA10301-DPB110601 DPA10301-DPB11801 DPA10301-DPB14001 DPA10301-DPB16501 DPA10401-DPB10101 DPA10401-DPB10501 DQA10102-DQB10501 DQA10102-DQB10503 DQA10102-DQB10602 DQA10102-DQB10609 DQA10102-DQB10610 DQA10102-DQB10611 DQA10103-DQB10501 DQA10103-DQB10609
RTLNAWVKVVEEKAFSPEVIPM

SEQ ID NO: 5360 - protein, 23 aa, Human immunodeficiency virus 1
  source 1..23: note = HLAs: DRB1_0101 DRB1_0806 DRB1_1001 DRB1_1304 DPA10103-DPB10101 DPA10103-DPB11501 DPA10103-DPB13101 DPA10103-DPB15001 DPA10104-DPB10101 DPA10104-DPB11501 DPA10105-DPB10101 DPA10105-DPB15001 DPA10202-DPB10101 DPA10202-DPB13101 DPA10301-DPB10101 DPA10301-DPB10201 DPA10301-DPB10202 DPA10301-DPB10401 DPA10301-DPB110601 DPA10301-DPB11801 DPA10301-DPB12301 DPA10301-DPB13901 DPA10301-DPB14001 DPA10301-DPB16501 DPA10401-DPB10101 DPA10401-DPB10201 DPA10401-DPB10202 DPA10401-DPB10501 DQA10102-DQB10501 DQA10102-DQB10503 DQA10102-DQB10601 DQA10102-DQB10602 DQA10102-DQB10604 DQA10102-DQB10609 DQA10102-DQB10610 DQA10102-DQB10611 DQA10103-DQB10501 DQA10103-DQB10609 DQA10505-DQB10402
RTLNAWVKVVEEKAFSPEVIPMF

SEQ ID NO: 5361 - protein, 14 aa, Human immunodeficiency virus 1
  source 1..14: note = HLAs: DPA10301-DPB10101 DPA10301-DPB10201 DPA10301-DPB16501 DPA10401-DPB10101 DQA10102-DQB10501
RTQDFWEVQLGIPH

SEQ ID NO: 5362 - protein, 15 aa, Human immunodeficiency virus 1
  source 1..15: note = HLAs: DRB1_0101 DRB1_1001 DPA10103-DPB11501 DPA10104-DPB11501 DPA10202-DPB10101 DPA10301-DPB10101 DPA10301-DPB10201 DPA10301-DPB10202 DPA10301-DPB10401 DPA10301-DPB110601 DPA10301-DPB11801 DPA10301-DPB12301 DPA10301-DPB13901 DPA10301-DPB14001 DPA10301-DPB16501 DPA10401-DPB10101 DQA10102-DQB10501
RTQDFWEVQLGIPHP

SEQ ID NO: 5363 - protein, 16 aa, Human immunodeficiency virus 1
  source 1..16: note = HLAs: DRB1_0101 DRB1_1001 DPA10103-DPB10101 DPA10103-DPB11501 DPA10104-DPB10101 DPA10104-DPB11501 DPA10105-DPB10101 DPA10202-DPB10101 DPA10301-DPB10101 DPA10301-DPB10201 DPA10301-DPB10202 DPA10301-DPB10401 DPA10301-DPB110601 DPA10301-DPB11801 DPA10301-DPB12301 DPA10301-DPB13901 DPA10301-DPB16501 DPA10401-DPB10101 DQA10102-DQB10501 DQA10102-DQB10503 DQA10102-DQB10601 DQA10103-DQB10501 DQA10103-DQB10601 DQA10201-DQB10301 DQA10201-DQB10303 DQA10301-DQB10301 DQA10302-DQB10301 DQA10303-DQB10301 DQA10401-DQB10301 DQA10401-DQB10319 DQA10501-DQB10301 DQA10501-DQB10319 DQA10503-DQB10301 DQA10505-DQB10301 DQA10505-DQB10309 DQA10505-DQB10319 DQA10505-DQB10402 DQA10506-DQB10303 DQA10508-DQB10301 DQA10509-DQB10301 DQA10601-DQB10301
RTQDFWEVQLGIPHPA

SEQ ID NO: 5364 - protein, 17 aa, Human immunodeficiency virus 1
  source 1..17: note = HLAs: DRB1_0101 DRB1_0102 DRB1_0901 DRB1_1001 DPA10103-DPB11501 DPA10104-DPB11501 DPA10202-DPB10101 DPA10301-DPB10101 DPA10301-DPB10201 DPA10301-DPB10202 DPA10301-DPB10401 DPA10301-DPB110601 DPA10301-DPB11801 DPA10301-DPB12301 DPA10301-DPB13901 DPA10301-DPB16501 DPA10401-DPB10101 DQA10101-DQB10601 DQA10102-DQB10501 DQA10102-DQB10503 DQA10102-DQB10601 DQA10103-DQB10601 DQA10201-DQB10301 DQA10201-DQB10303 DQA10301-DQB10301 DQA10302-DQB10301 DQA10303-DQB10301 DQA10401-DQB10301 DQA10401-DQB10319 DQA10501-DQB10301 DQA10501-DQB10319 DQA10503-DQB10301 DQA10505-DQB10301 DQA10505-DQB10309 DQA10505-DQB10319 DQA10505-DQB10402 DQA10506-DQB10303 DQA10508-DQB10301 DQA10509-DQB10301 DQA10601-DQB10301
RTQDFWEVQLGIPHPAG

SEQ ID NO: 5365 - protein, 18 aa, Human immunodeficiency virus 1
  source 1..18: note = HLAs: DRB1_1001 DPA10301-DPB10101 DPA10401-DPB10101 DQA10102-DQB10501 DQA10102-DQB10503 DQA10102-DQB10601 DQA10103-DQB10601 DQA10201-DQB10301 DQA10201-DQB10303 DQA10301-DQB10301 DQA10302-DQB10301 DQA10303-DQB10301 DQA10401-DQB10301 DQA10401-DQB10319 DQA10501-DQB10301 DQA10501-DQB10319 DQA10503-DQB10301 DQA10505-DQB10301 DQA10505-DQB10309 DQA10505-DQB10319 DQA10506-DQB10303 DQA10508-DQB10301 DQA10509-DQB10301 DQA10601-DQB10301
RTQDFWEVQLGIPHPAGL

SEQ ID NO: 5366 - protein, 19 aa, Human immunodeficiency virus 1
  source 1..19: note = HLAs: DRB1_0101 DRB1_0102 DRB1_0901 DRB1_1001 DPA10103-DPB11501 DPA10104-DPB11501 DPA10202-DPB10101 DPA10301-DPB10101 DPA10301-DPB10201 DPA10301-DPB10202 DPA10301-DPB10401 DPA10301-DPB110601 DPA10301-DPB11801 DPA10301-DPB12301 DPA10301-DPB13901 DPA10301-DPB16501 DPA10401-DPB10101 DQA10101-DQB10601 DQA10102-DQB10501 DQA10102-DQB10503 DQA10102-DQB10601 DQA10103-DQB10501 DQA10103-DQB10601 DQA10103-DQB10602 DQA10201-DQB10301 DQA10201-DQB10303 DQA10301-DQB10301 DQA10302-DQB10301 DQA10303-DQB10301 DQA10401-DQB10301 DQA10401-DQB10319 DQA10501-DQB10301 DQA10501-DQB10319 DQA10503-DQB10301 DQA10505-DQB10301 DQA10505-DQB10309 DQA10505-DQB10319 DQA10505-DQB10402 DQA10506-DQB10303 DQA10508-DQB10301 DQA10509-DQB10301 DQA10601-DQB10301
RTQDFWEVQLGIPHPAGLK

SEQ ID NO: 5367 - protein, 20 aa, Human immunodeficiency virus 1
  source 1..20: note = HLAs: DRB1_0101 DRB1_0102 DRB1_0901 DRB1_1001 DPA10103-DPB10101 DPA10103-DPB11501 DPA10103-DPB13101 DPA10103-DPB15001 DPA10104-DPB10101 DPA10104-DPB11501 DPA10105-DPB10101 DPA10105-DPB15001 DPA10202-DPB10101 DPA10301-DPB10101 DPA10301-DPB10201 DPA10301-DPB10202 DPA10301-DPB10401 DPA10301-DPB110601 DPA10301-DPB11801 DPA10301-DPB12301 DPA10301-DPB13901 DPA10301-DPB14001 DPA10301-DPB16501 DPA10401-DPB10101 DQA10101-DQB10601 DQA10102-DQB10501 DQA10102-DQB10503 DQA10102-DQB10601 DQA10102-DQB10602 DQA10102-DQB10611 DQA10103-DQB10501 DQA10103-DQB10503 DQA10103-DQB10601 DQA10103-DQB10602 DQA10103-DQB10609 DQA10201-DQB10301 DQA10201-DQB10303 DQA10301-DQB10301 DQA10302-DQB10301 DQA10303-DQB10301 DQA10401-DQB10301 DQA10401-DQB10319 DQA10501-DQB10301 DQA10501-DQB10319 DQA10503-DQB10301 DQA10505-DQB10301 DQA10505-DQB10309 DQA10505-DQB10319 DQA10505-DQB10402 DQA10506-DQB10303 DQA10508-DQB10301 DQA10509-DQB10301 DQA10601-DQB10301
RTQDFWEVQLGIPHPAGLKK

SEQ ID NO: 5368 - protein, 21 aa, Human immunodeficiency virus 1
  source 1..21: note = HLAs: DRB1_0101 DRB1_0102 DRB1_0901 DRB1_1001 DPA10301-DPB10101 DPA10401-DPB10101 DQA10102-DQB10501 DQA10102-DQB10503 DQA10102-DQB10601 DQA10103-DQB10501 DQA10103-DQB10601 DQA10201-DQB10301 DQA10201-DQB10303 DQA10301-DQB10301 DQA10302-DQB10301 DQA10303-DQB10301 DQA10401-DQB10301 DQA10401-DQB10319 DQA10501-DQB10301 DQA10501-DQB10319 DQA10503-DQB10301 DQA10505-DQB10301 DQA10505-DQB10309 DQA10505-DQB10319 DQA10505-DQB10402 DQA10506-DQB10303 DQA10508-DQB10301 DQA10509-DQB10301 DQA10601-DQB10301
RTQDFWEVQLGIPHPAGLKKK

SEQ ID NO: 5369 - protein, 22 aa, Human immunodeficiency virus 1
  source 1..22: note = HLAs: DRB1_0101 DRB1_0102 DRB1_0901 DRB1_1001 DPA10301-DPB10101 DPA10401-DPB10101 DQA10102-DQB10501 DQA10102-DQB10503 DQA10102-DQB10601 DQA10103-DQB10501 DQA10103-DQB10601 DQA10201-DQB10301 DQA10201-DQB10303 DQA10301-DQB10301 DQA10302-DQB10301 DQA10303-DQB10301 DQA10401-DQB10301 DQA10401-DQB10319 DQA10501-DQB10301 DQA10501-DQB10319 DQA10503-DQB10301 DQA10505-DQB10301 DQA10505-DQB10309 DQA10505-DQB10319 DQA10505-DQB10402 DQA10506-DQB10303 DQA10508-DQB10301 DQA10509-DQB10301 DQA10601-DQB10301
RTQDFWEVQLGIPHPAGLKKKK

SEQ ID NO: 5370 - protein, 23 aa, Human immunodeficiency virus 1
  source 1..23: note = HLAs: DRB1_0101 DRB1_0102 DRB1_0901 DRB1_1001 DPA10301-DPB10101 DPA10401-DPB10101 DQA10102-DQB10501 DQA10102-DQB10503 DQA10102-DQB10601 DQA10103-DQB10501 DQA10103-DQB10601 DQA10201-DQB10301 DQA10201-DQB10303 DQA10301-DQB10301 DQA10302-DQB10301 DQA10303-DQB10301 DQA10401-DQB10301 DQA10401-DQB10319 DQA10501-DQB10301 DQA10501-DQB10319 DQA10503-DQB10301 DQA10505-DQB10301 DQA10505-DQB10309 DQA10505-DQB10319 DQA10505-DQB10402 DQA10506-DQB10303 DQA10508-DQB10301 DQA10509-DQB10301 DQA10601-DQB10301
RTQDFWEVQLGIPHPAGLKKKKS

SEQ ID NO: 5371 - protein, 24 aa, Human immunodeficiency virus 1
  source 1..24: note = HLAs: DRB1_0101 DRB1_0102 DRB1_0901 DRB1_1001 DPA10301-DPB10101 DPA10301-DPB11801 DPA10401-DPB10101 DQA10102-DQB10501 DQA10102-DQB10503 DQA10102-DQB10601 DQA10103-DQB10501 DQA10103-DQB10601 DQA10201-DQB10301 DQA10201-DQB10303 DQA10301-DQB10301 DQA10302-DQB10301 DQA10303-DQB10301 DQA10401-DQB10301 DQA10401-DQB10319 DQA10501-DQB10301 DQA10501-DQB10319 DQA10503-DQB10301 DQA10505-DQB10301 DQA10505-DQB10309 DQA10505-DQB10319 DQA10505-DQB10402 DQA10506-DQB10303 DQA10508-DQB10301 DQA10509-DQB10301 DQA10601-DQB10301
RTQDFWEVQLGIPHPAGLKKKKSV

SEQ ID NO: 5372 - protein, 25 aa, Human immunodeficiency virus 1
  source 1..25: note = HLAs: DRB1_0101 DRB1_0102 DRB1_0901 DRB1_1001 DPA10301-DPB10101 DPA10301-DPB11801 DPA10401-DPB10101 DQA10102-DQB10501 DQA10102-DQB10503 DQA10102-DQB10601 DQA10103-DQB10501 DQA10103-DQB10601 DQA10201-DQB10301 DQA10201-DQB10303 DQA10301-DQB10301 DQA10302-DQB10301 DQA10303-DQB10301 DQA10401-DQB10301 DQA10401-DQB10319 DQA10501-DQB10301 DQA10501-DQB10319 DQA10503-DQB10301 DQA10505-DQB10301 DQA10505-DQB10309 DQA10505-DQB10319 DQA10505-DQB10402 DQA10506-DQB10303 DQA10508-DQB10301 DQA10509-DQB10301 DQA10601-DQB10301
RTQDFWEVQLGIPHPAGLKKKKSVT

SEQ ID NO: 5373 - protein, 13 aa, Human immunodeficiency virus 1
  source 1..13: note = HLAs: DRB1_0101 DRB1_0102 DRB1_0404 DRB1_0408 DRB1_0410 DRB1_0701 DRB1_0801 DRB1_0802 DRB1_0804 DRB1_0806 DRB1_0809 DRB1_0813 DRB1_0901 DRB1_1001 DRB1_1101 DRB1_1102 DRB1_1103 DRB1_1104 DRB1_1114 DRB1_1201 DRB1_1301 DRB1_1302 DRB1_1304 DRB1_1305 DRB1_1401 DRB1_1402 DRB1_1403 DRB1_1404 DRB1_1406 DRB1_1454 DRB1_1501 DRB1_1502 DRB1_1503 DRB1_1601 DRB1_1602 DPA10103-DPB11501 DPA10104-DPB11501 DPA10201-DPB11501 DPA10202-DPB10101 DPA10202-DPB10201 DPA10202-DPB10202 DPA10202-DPB11801 DPA10301-DPB10101 DPA10301-DPB10201 DPA10301-DPB10202 DPA10301-DPB10401 DPA10301-DPB10402 DPA10301-DPB110501 DPA10301-DPB110601 DPA10301-DPB11801 DPA10301-DPB12301 DPA10301-DPB13901 DPA10301-DPB14001 DPA10301-DPB14901 DPA10301-DPB16501 DPA10301-DPB17501 DPA10301-DPB18001 DPA10401-DPB10101 DPA10401-DPB10201 DPA10401-DPB10202 DQA10102-DQB10501 DQA10103-DQB10501
RWIILGLNKIVRM

SEQ ID NO: 5374 - protein, 14 aa, Human immunodeficiency virus 1
  source 1..14: note = HLAs: DRB1_0101 DRB1_0102 DRB1_0103 DRB1_0301 DRB1_0401 DRB1_0404 DRB1_0405 DRB1_0408 DRB1_0410 DRB1_0701 DRB1_0801 DRB1_0802 DRB1_0803 DRB1_0804 DRB1_0806 DRB1_0809 DRB1_0813 DRB1_0901 DRB1_1001 DRB1_1101 DRB1_1102 DRB1_1103 DRB1_1104 DRB1_1114 DRB1_1201 DRB1_1202 DRB1_1301 DRB1_1302 DRB1_1303 DRB1_1304 DRB1_1305 DRB1_1312 DRB1_1401 DRB1_1402 DRB1_1403 DRB1_1404 DRB1_1405 DRB1_1406 DRB1_1407 DRB1_1418 DRB1_1454 DRB1_1501 DRB1_1502 DRB1_1503 DRB1_1601 DRB1_1602 DPA10103-DPB10101 DPA10103-DPB10201 DPA10103-DPB10202 DPA10103-DPB11501 DPA10103-DPB11801 DPA10103-DPB13401 DPA10103-DPB14001 DPA10103-DPB14801 DPA10104-DPB10101 DPA10104-DPB11501 DPA10105-DPB10101 DPA10105-DPB11801 DPA10201-DPB11501 DPA10202-DPB10101 DPA10202-DPB10201 DPA10202-DPB10202 DPA10202-DPB10501 DPA10202-DPB110601 DPA10202-DPB11801 DPA10202-DPB11901 DPA10202-DPB13101 DPA10202-DPB13801 DPA10202-DPB15501 DPA10202-DPB16501 DPA10301-DPB10101 DPA10301-DPB10201 DPA10301-DPB10202 DPA10301-DPB10401 DPA10301-DPB10402; note = HLAs: DPA10301-DPB110501 DPA10301-DPB110601 DPA10301-DPB11801 DPA10301-DPB12301 DPA10301-DPB13901 DPA10301-DPB14001 DPA10301-DPB14901 DPA10301-DPB15501 DPA10301-DPB16501 DPA10301-DPB17501 DPA10301-DPB18001 DPA10401-DPB10101 DPA10401-DPB10201 DPA10401-DPB10202 DPA10401-DPB10501 DQA10102-DQB10501 DQA10102-DQB10503 DQA10102-DQB10609 DQA10103-DQB10501 DQA10103-DQB10601 DQA10103-DQB10608 DQA10103-DQB10609
RWIILGLNKIVRMY

SEQ ID NO: 5375 - protein, 15 aa, Human immunodeficiency virus 1
  source 1..15: note = HLAs: DRB1_0101 DRB1_0102 DRB1_0103 DRB1_0301 DRB1_0401 DRB1_0402 DRB1_0404 DRB1_0405 DRB1_0408 DRB1_0410 DRB1_0701 DRB1_0801 DRB1_0802 DRB1_0803 DRB1_0804 DRB1_0806 DRB1_0809 DRB1_0813 DRB1_0901 DRB1_1001 DRB1_1101 DRB1_1102 DRB1_1103 DRB1_1104 DRB1_1114 DRB1_1201 DRB1_1202 DRB1_1301 DRB1_1302 DRB1_1303 DRB1_1304 DRB1_1305 DRB1_1312 DRB1_1401 DRB1_1402 DRB1_1403 DRB1_1404 DRB1_1405 DRB1_1406 DRB1_1407 DRB1_1418 DRB1_1454 DRB1_1501 DRB1_1502 DRB1_1503 DRB1_1601 DRB1_1602 DPA10103-DPB10101 DPA10103-DPB10201 DPA10103-DPB10202 DPA10103-DPB10501 DPA10103-DPB11501 DPA10103-DPB11601 DPA10103-DPB11801 DPA10103-DPB11901 DPA10103-DPB13101 DPA10103-DPB13401 DPA10103-DPB14001 DPA10103-DPB14101 DPA10103-DPB14801 DPA10103-DPB15001 DPA10103-DPB15901 DPA10104-DPB10101 DPA10104-DPB11501 DPA10105-DPB10101 DPA10105-DPB11801 DPA10105-DPB15001 DPA10106-DPB10101 DPA10201-DPB10101 DPA10201-DPB10501 DPA10201-DPB110601 DPA10201-DPB11501 DPA10201-DPB11601 DPA10201-DPB11801 DPA10201-DPB11901 DPA10201-DPB13401; note = HLAs: DPA10202-DPB10101 DPA10202-DPB10201 DPA10202-DPB10202 DPA10202-DPB10401 DPA10202-DPB10402 DPA10202-DPB10501 DPA10202-DPB110001 DPA10202-DPB110501 DPA10202-DPB110601 DPA10202-DPB11801 DPA10202-DPB11901 DPA10202-DPB13101 DPA10202-DPB13801 DPA10202-DPB15501 DPA10202-DPB16501 DPA10301-DPB10101 DPA10301-DPB10201 DPA10301-DPB10202 DPA10301-DPB10401 DPA10301-DPB10402 DPA10301-DPB110501 DPA10301-DPB110601 DPA10301-DPB11801 DPA10301-DPB12301 DPA10301-DPB13901 DPA10301-DPB14001 DPA10301-DPB14901 DPA10301-DPB15501 DPA10301-DPB16501 DPA10301-DPB17501 DPA10301-DPB18001 DPA10401-DPB10101 DPA10401-DPB10201 DPA10401-DPB10202 DPA10401-DPB10402 DPA10401-DPB10501 DPA10401-DPB110501 DPA10401-DPB11301 DPA10401-DPB113301 DPA10401-DPB14901 DQA10102-DQB10501 DQA10102-DQB10503 DQA10102-DQB10601 DQA10102-DQB10609 DQA10103-DQB10501 DQA10103-DQB10503 DQA10103-DQB10601 DQA10103-DQB10602 DQA10103-DQB10608 DQA10103-DQB10609
RWIILGLNKIVRMYS

SEQ ID NO: 5376 - protein, 16 aa, Human immunodeficiency virus 1
  source 1..16: note = HLAs: DRB1_0101 DRB1_0102 DRB1_0103 DRB1_0301 DRB1_0401 DRB1_0402 DRB1_0404 DRB1_0405 DRB1_0408 DRB1_0410 DRB1_0701 DRB1_0801 DRB1_0802 DRB1_0803 DRB1_0804 DRB1_0806 DRB1_0809 DRB1_0813 DRB1_0901 DRB1_1001 DRB1_1101 DRB1_1102 DRB1_1103 DRB1_1104 DRB1_1114 DRB1_1201 DRB1_1202 DRB1_1301 DRB1_1302 DRB1_1303 DRB1_1304 DRB1_1305 DRB1_1312 DRB1_1401 DRB1_1402 DRB1_1403 DRB1_1404 DRB1_1405 DRB1_1406 DRB1_1407 DRB1_1418 DRB1_1454 DRB1_1501 DRB1_1502 DRB1_1503 DRB1_1601 DRB1_1602 DPA10103-DPB10101 DPA10103-DPB10201 DPA10103-DPB10202 DPA10103-DPB10501 DPA10103-DPB11501 DPA10103-DPB11601 DPA10103-DPB11801 DPA10103-DPB11901 DPA10103-DPB13101 DPA10103-DPB13401 DPA10103-DPB14001 DPA10103-DPB14801 DPA10103-DPB15001 DPA10104-DPB10101 DPA10104-DPB11501 DPA10105-DPB10101 DPA10105-DPB11801 DPA10105-DPB15001 DPA10106-DPB10101 DPA10201-DPB10101 DPA10201-DPB10501 DPA10201-DPB110601 DPA10201-DPB11501 DPA10201-DPB11801 DPA10201-DPB11901 DPA10202-DPB10101 DPA10202-DPB10201 DPA10202-DPB10202 DPA10202-DPB10401; note = HLAs: DPA10202-DPB10501 DPA10202-DPB110001 DPA10202-DPB110601 DPA10202-DPB11801 DPA10202-DPB11901 DPA10202-DPB12101 DPA10202-DPB13001 DPA10202-DPB13101 DPA10202-DPB13801 DPA10202-DPB15501 DPA10202-DPB16501 DPA10301-DPB10101 DPA10301-DPB10201 DPA10301-DPB10202 DPA10301-DPB10401 DPA10301-DPB10402 DPA10301-DPB110501 DPA10301-DPB110601 DPA10301-DPB11801 DPA10301-DPB12301 DPA10301-DPB13901 DPA10301-DPB14001 DPA10301-DPB14901 DPA10301-DPB15501 DPA10301-DPB16501 DPA10301-DPB17501 DPA10301-DPB18001 DPA10401-DPB10101 DPA10401-DPB10201 DPA10401-DPB10202 DPA10401-DPB10402 DPA10401-DPB10501 DPA10401-DPB110501 DPA10401-DPB11301 DPA10401-DPB113301 DPA10401-DPB14901 DQA10102-DQB10501 DQA10102-DQB10503 DQA10102-DQB10601 DQA10102-DQB10602 DQA10102-DQB10609 DQA10102-DQB10611 DQA10103-DQB10501 DQA10103-DQB10503 DQA10103-DQB10601 DQA10103-DQB10602 DQA10103-DQB10608 DQA10103-DQB10609
RWIILGLNKIVRMYSP

SEQ ID NO: 5377 - protein, 17 aa, Human immunodeficiency virus 1
  source 1..17: note = HLAs: DRB1_0101 DRB1_0102 DRB1_0103 DRB1_0301 DRB1_0401 DRB1_0402 DRB1_0404 DRB1_0405 DRB1_0408 DRB1_0410 DRB1_0701 DRB1_0801 DRB1_0802 DRB1_0803 DRB1_0804 DRB1_0806 DRB1_0809 DRB1_0813 DRB1_0901 DRB1_1001 DRB1_1101 DRB1_1102 DRB1_1103 DRB1_1104 DRB1_1114 DRB1_1201 DRB1_1202 DRB1_1301 DRB1_1302 DRB1_1303 DRB1_1304 DRB1_1305 DRB1_1312 DRB1_1401 DRB1_1402 DRB1_1403 DRB1_1404 DRB1_1405 DRB1_1406 DRB1_1407 DRB1_1418 DRB1_1454 DRB1_1501 DRB1_1502 DRB1_1503 DRB1_1601 DRB1_1602 DPA10103-DPB10101 DPA10103-DPB10201 DPA10103-DPB10202 DPA10103-DPB10501 DPA10103-DPB11501 DPA10103-DPB11601 DPA10103-DPB11801 DPA10103-DPB11901 DPA10103-DPB13101 DPA10103-DPB13401 DPA10103-DPB14001 DPA10103-DPB14101 DPA10103-DPB14801 DPA10103-DPB15001 DPA10104-DPB10101 DPA10104-DPB11501 DPA10105-DPB10101 DPA10105-DPB11801 DPA10105-DPB15001 DPA10201-DPB10501 DPA10201-DPB110601 DPA10201-DPB11501 DPA10201-DPB11801 DPA10201-DPB11901 DPA10202-DPB10101 DPA10202-DPB10201 DPA10202-DPB10202 DPA10202-DPB10401 DPA10202-DPB10501; note = HLAs: DPA10202-DPB110001 DPA10202-DPB110601 DPA10202-DPB11801 DPA10202-DPB11901 DPA10202-DPB13101 DPA10202-DPB13801 DPA10202-DPB15501 DPA10202-DPB16501 DPA10301-DPB10101 DPA10301-DPB10201 DPA10301-DPB10202 DPA10301-DPB10401 DPA10301-DPB10402 DPA10301-DPB110501 DPA10301-DPB110601 DPA10301-DPB11801 DPA10301-DPB12301 DPA10301-DPB13901 DPA10301-DPB14001 DPA10301-DPB14901 DPA10301-DPB15501 DPA10301-DPB16501 DPA10301-DPB17501 DPA10301-DPB18001 DPA10401-DPB10101 DPA10401-DPB10201 DPA10401-DPB10202 DPA10401-DPB10402 DPA10401-DPB10501 DPA10401-DPB110501 DPA10401-DPB14901 DQA10102-DQB10501 DQA10102-DQB10503 DQA10102-DQB10601 DQA10102-DQB10609 DQA10103-DQB10501 DQA10103-DQB10601 DQA10103-DQB10602 DQA10103-DQB10608 DQA10103-DQB10609
RWIILGLNKIVRMYSPV

SEQ ID NO: 5378 - protein, 18 aa, Human immunodeficiency virus 1
  source 1..18: note = HLAs: DRB1_0101 DRB1_0102 DRB1_0404 DRB1_0405 DRB1_0408 DRB1_0410 DRB1_0801 DRB1_0802 DRB1_0804 DRB1_0806 DRB1_0809 DRB1_0813 DRB1_1001 DRB1_1101 DRB1_1102 DRB1_1103 DRB1_1104 DRB1_1114 DRB1_1201 DRB1_1202 DRB1_1301 DRB1_1302 DRB1_1304 DRB1_1305 DRB1_1401 DRB1_1402 DRB1_1403 DRB1_1404 DRB1_1405 DRB1_1406 DRB1_1454 DRB1_1501 DRB1_1502 DRB1_1503 DRB1_1601 DRB1_1602 DPA10103-DPB11501 DPA10104-DPB11501 DPA10202-DPB10101 DPA10202-DPB10202 DPA10202-DPB10501 DPA10202-DPB110601 DPA10202-DPB11901 DPA10202-DPB13801 DPA10301-DPB10101 DPA10301-DPB10201 DPA10301-DPB10202 DPA10301-DPB10401 DPA10301-DPB10402 DPA10301-DPB110501 DPA10301-DPB110601 DPA10301-DPB11801 DPA10301-DPB12301 DPA10301-DPB13901 DPA10301-DPB14001 DPA10301-DPB14901 DPA10301-DPB16501 DPA10301-DPB18001 DPA10401-DPB10101 DPA10401-DPB10201 DPA10401-DPB10202 DQA10102-DQB10501 DQA10102-DQB10503 DQA10102-DQB10609 DQA10103-DQB10501 DQA10103-DQB10601 DQA10103-DQB10609
RWIILGLNKIVRMYSPVS

SEQ ID NO: 5379 - protein, 19 aa, Human immunodeficiency virus 1
  source 1..19: note = HLAs: DRB1_0101 DRB1_0102 DRB1_0401 DRB1_0402 DRB1_0404 DRB1_0405 DRB1_0408 DRB1_0410 DRB1_0701 DRB1_0801 DRB1_0802 DRB1_0803 DRB1_0804 DRB1_0806 DRB1_0809 DRB1_0813 DRB1_0901 DRB1_1001 DRB1_1101 DRB1_1102 DRB1_1103 DRB1_1104 DRB1_1114 DRB1_1201 DRB1_1202 DRB1_1301 DRB1_1302 DRB1_1303 DRB1_1304 DRB1_1305 DRB1_1312 DRB1_1401 DRB1_1402 DRB1_1403 DRB1_1404 DRB1_1405 DRB1_1406 DRB1_1407 DRB1_1418 DRB1_1454 DRB1_1501 DRB1_1502 DRB1_1503 DRB1_1601 DRB1_1602 DPA10103-DPB10101 DPA10103-DPB10201 DPA10103-DPB10202 DPA10103-DPB10501 DPA10103-DPB11501 DPA10103-DPB11601 DPA10103-DPB11801 DPA10103-DPB11901 DPA10103-DPB13101 DPA10103-DPB13401 DPA10103-DPB14001 DPA10103-DPB14801 DPA10103-DPB15001 DPA10104-DPB10101 DPA10104-DPB11501 DPA10105-DPB10101 DPA10105-DPB11801 DPA10105-DPB15001 DPA10201-DPB11501 DPA10202-DPB10101 DPA10202-DPB10201 DPA10202-DPB10202 DPA10202-DPB10501 DPA10202-DPB110601 DPA10202-DPB11301 DPA10202-DPB11801 DPA10202-DPB11901 DPA10202-DPB13101 DPA10202-DPB13801 DPA10202-DPB15501; note = HLAs: DPA10202-DPB16501 DPA10301-DPB10101 DPA10301-DPB10201 DPA10301-DPB10202 DPA10301-DPB10401 DPA10301-DPB10402 DPA10301-DPB110501 DPA10301-DPB110601 DPA10301-DPB11301 DPA10301-DPB11801 DPA10301-DPB12301 DPA10301-DPB13901 DPA10301-DPB14001 DPA10301-DPB14901 DPA10301-DPB15501 DPA10301-DPB16501 DPA10301-DPB17501 DPA10301-DPB18001 DPA10401-DPB10101 DPA10401-DPB10201 DPA10401-DPB10202 DPA10401-DPB10501 DPA10401-DPB11301 DPA10401-DPB113301 DPA10401-DPB11401 DQA10102-DQB10501 DQA10102-DQB10503 DQA10102-DQB10601 DQA10102-DQB10602 DQA10102-DQB10609 DQA10102-DQB10611 DQA10103-DQB10501 DQA10103-DQB10503 DQA10103-DQB10601 DQA10103-DQB10602 DQA10103-DQB10603 DQA10103-DQB10604 DQA10103-DQB10608 DQA10103-DQB10609 DQA10501-DQB10501 DQA10505-DQB10402 DQA10505-DQB10501
RWIILGLNKIVRMYSPVSI

SEQ ID NO: 5380 - protein, 20 aa, Human immunodeficiency virus 1
  source 1..20: note = HLAs: DRB1_0101 DRB1_0102 DRB1_0103 DRB1_0301 DRB1_0401 DRB1_0402 DRB1_0403 DRB1_0404 DRB1_0405 DRB1_0406 DRB1_0407 DRB1_0408 DRB1_0410 DRB1_0701 DRB1_0801 DRB1_0802 DRB1_0803 DRB1_0804 DRB1_0806 DRB1_0809 DRB1_0813 DRB1_0901 DRB1_1001 DRB1_1101 DRB1_1102 DRB1_1103 DRB1_1104 DRB1_1114 DRB1_1201 DRB1_1202 DRB1_1301 DRB1_1302 DRB1_1303 DRB1_1304 DRB1_1305 DRB1_1312 DRB1_1401 DRB1_1402 DRB1_1403 DRB1_1404 DRB1_1405 DRB1_1406 DRB1_1407 DRB1_1418 DRB1_1454 DRB1_1501 DRB1_1502 DRB1_1503 DRB1_1601 DRB1_1602 DPA10103-DPB10101 DPA10103-DPB10201 DPA10103-DPB10202 DPA10103-DPB10301 DPA10103-DPB10501 DPA10103-DPB10601 DPA10103-DPB10901 DPA10103-DPB11001 DPA10103-DPB11101 DPA10103-DPB112401 DPA10103-DPB11301 DPA10103-DPB113101 DPA10103-DPB113301 DPA10103-DPB11401 DPA10103-DPB11501 DPA10103-DPB11601 DPA10103-DPB11701 DPA10103-DPB11801 DPA10103-DPB11901 DPA10103-DPB12001 DPA10103-DPB12101 DPA10103-DPB12901 DPA10103-DPB13001 DPA10103-DPB13101 DPA10103-DPB13401 DPA10103-DPB14001 DPA10103-DPB14101; note = HLAs: DPA10103-DPB14801 DPA10103-DPB15001 DPA10103-DPB15501 DPA10103-DPB15901 DPA10104-DPB10101 DPA10104-DPB10301 DPA10104-DPB11001 DPA10104-DPB11301 DPA10104-DPB11501 DPA10105-DPB10101 DPA10105-DPB10301 DPA10105-DPB11801 DPA10105-DPB15001 DPA10106-DPB10101 DPA10106-DPB11101 DPA10201-DPB10101 DPA10201-DPB10301 DPA10201-DPB10501 DPA10201-DPB10601 DPA10201-DPB10901 DPA10201-DPB110601 DPA10201-DPB11101 DPA10201-DPB11301 DPA10201-DPB113101 DPA10201-DPB113301 DPA10201-DPB11401 DPA10201-DPB11501 DPA10201-DPB11601 DPA10201-DPB11701 DPA10201-DPB11801 DPA10201-DPB11901 DPA10201-DPB13001 DPA10201-DPB14501 DPA10201-DPB15501 DPA10201-DPB19101 DPA10202-DPB10101 DPA10202-DPB10201 DPA10202-DPB10202 DPA10202-DPB10301 DPA10202-DPB10401 DPA10202-DPB10402 DPA10202-DPB10501 DPA10202-DPB10901 DPA10202-DPB110001 DPA10202-DPB110501 DPA10202-DPB110601 DPA10202-DPB11101 DPA10202-DPB11301 DPA10202-DPB113101 DPA10202-DPB11401 DPA10202-DPB11701 DPA10202-DPB11801 DPA10202-DPB11901 DPA10202-DPB12101; note = HLAs: DPA10202-DPB12901 DPA10202-DPB13001 DPA10202-DPB13101 DPA10202-DPB13801 DPA10202-DPB14501 DPA10202-DPB15501 DPA10202-DPB16501 DPA10202-DPB18501 DPA10301-DPB10101 DPA10301-DPB10201 DPA10301-DPB10202 DPA10301-DPB10301 DPA10301-DPB10401 DPA10301-DPB10402 DPA10301-DPB10901 DPA10301-DPB110501 DPA10301-DPB110601 DPA10301-DPB11101 DPA10301-DPB11301 DPA10301-DPB11701 DPA10301-DPB11801 DPA10301-DPB12301 DPA10301-DPB13901 DPA10301-DPB14001 DPA10301-DPB14901 DPA10301-DPB15501 DPA10301-DPB16501 DPA10301-DPB17501 DPA10301-DPB18001 DPA10401-DPB10101 DPA10401-DPB10201 DPA10401-DPB10202 DPA10401-DPB10301 DPA10401-DPB10402 DPA10401-DPB10501 DPA10401-DPB110501 DPA10401-DPB11301 DPA10401-DPB113301 DPA10401-DPB11401 DPA10401-DPB14901 DQA10102-DQB10501 DQA10102-DQB10503 DQA10102-DQB10601 DQA10102-DQB10602 DQA10102-DQB10609 DQA10102-DQB10611 DQA10103-DQB10501 DQA10103-DQB10502 DQA10103-DQB10503 DQA10103-DQB10601 DQA10103-DQB10602 DQA10103-DQB10603 DQA10103-DQB10604 DQA10103-DQB10608 DQA10103-DQB10609; note = HLAs: DQA10103-DQB10614 DQA10501-DQB10501 DQA10505-DQB10402 DQA10505-DQB10501
RWIILGLNKIVRMYSPVSIL

SEQ ID NO: 5381 - protein, 21 aa, Human immunodeficiency virus 1
  source 1..21: note = HLAs: DRB1_0101 DRB1_0102 DRB1_0401 DRB1_0402 DRB1_0404 DRB1_0405 DRB1_0407 DRB1_0408 DRB1_0410 DRB1_0701 DRB1_0801 DRB1_0802 DRB1_0803 DRB1_0804 DRB1_0806 DRB1_0809 DRB1_0813 DRB1_0901 DRB1_1001 DRB1_1101 DRB1_1102 DRB1_1103 DRB1_1104 DRB1_1114 DRB1_1201 DRB1_1202 DRB1_1301 DRB1_1302 DRB1_1303 DRB1_1304 DRB1_1305 DRB1_1312 DRB1_1401 DRB1_1402 DRB1_1403 DRB1_1404 DRB1_1405 DRB1_1406 DRB1_1407 DRB1_1418 DRB1_1454 DRB1_1501 DRB1_1502 DRB1_1503 DRB1_1601 DRB1_1602 DPA10103-DPB10101 DPA10103-DPB10201 DPA10103-DPB10202 DPA10103-DPB10301 DPA10103-DPB10501 DPA10103-DPB10601 DPA10103-DPB10901 DPA10103-DPB11001 DPA10103-DPB11101 DPA10103-DPB112401 DPA10103-DPB11301 DPA10103-DPB113101 DPA10103-DPB113301 DPA10103-DPB11401 DPA10103-DPB11501 DPA10103-DPB11601 DPA10103-DPB11701 DPA10103-DPB11801 DPA10103-DPB11901 DPA10103-DPB12001 DPA10103-DPB12101 DPA10103-DPB12901 DPA10103-DPB13001 DPA10103-DPB13101 DPA10103-DPB13401 DPA10103-DPB14001 DPA10103-DPB14801 DPA10103-DPB15001 DPA10103-DPB15501; note = HLAs: DPA10104-DPB10101 DPA10104-DPB10301 DPA10104-DPB11001 DPA10104-DPB11301 DPA10104-DPB11501 DPA10105-DPB10101 DPA10105-DPB10301 DPA10105-DPB11801 DPA10105-DPB15001 DPA10201-DPB110601 DPA10201-DPB11401 DPA10201-DPB11501 DPA10201-DPB11901 DPA10201-DPB15501 DPA10202-DPB10101 DPA10202-DPB10201 DPA10202-DPB10202 DPA10202-DPB10501 DPA10202-DPB10901 DPA10202-DPB110601 DPA10202-DPB11101 DPA10202-DPB11301 DPA10202-DPB113101 DPA10202-DPB11401 DPA10202-DPB11701 DPA10202-DPB11801 DPA10202-DPB11901 DPA10202-DPB12101 DPA10202-DPB13001 DPA10202-DPB13101 DPA10202-DPB13801 DPA10202-DPB15501 DPA10202-DPB16501 DPA10202-DPB18501 DPA10301-DPB10101 DPA10301-DPB10201 DPA10301-DPB10202 DPA10301-DPB10301 DPA10301-DPB10401 DPA10301-DPB10402 DPA10301-DPB10901 DPA10301-DPB110501 DPA10301-DPB110601 DPA10301-DPB11101 DPA10301-DPB11301 DPA10301-DPB11701 DPA10301-DPB11801 DPA10301-DPB12301 DPA10301-DPB13901 DPA10301-DPB14001 DPA10301-DPB14901 DPA10301-DPB15501 DPA10301-DPB16501 DPA10301-DPB17501; note = HLAs: DPA10301-DPB18001 DPA10401-DPB10101 DPA10401-DPB10201 DPA10401-DPB10202 DPA10401-DPB10301 DPA10401-DPB10402 DPA10401-DPB10501 DPA10401-DPB110501 DPA10401-DPB11301 DPA10401-DPB113301 DPA10401-DPB11401 DPA10401-DPB14901 DQA10102-DQB10501 DQA10102-DQB10503 DQA10102-DQB10601 DQA10102-DQB10609 DQA10103-DQB10501 DQA10103-DQB10503 DQA10103-DQB10601 DQA10103-DQB10602 DQA10103-DQB10608 DQA10103-DQB10609 DQA10505-DQB10402
RWIILGLNKIVRMYSPVSILD

SEQ ID NO: 5382 - protein, 22 aa, Human immunodeficiency virus 1
  source 1..22: note = HLAs: DRB1_0101 DRB1_0102 DRB1_0401 DRB1_0402 DRB1_0403 DRB1_0404 DRB1_0405 DRB1_0406 DRB1_0407 DRB1_0408 DRB1_0410 DRB1_0701 DRB1_0801 DRB1_0802 DRB1_0803 DRB1_0804 DRB1_0806 DRB1_0809 DRB1_0813 DRB1_0901 DRB1_1001 DRB1_1101 DRB1_1102 DRB1_1103 DRB1_1104 DRB1_1114 DRB1_1201 DRB1_1202 DRB1_1301 DRB1_1302 DRB1_1303 DRB1_1304 DRB1_1305 DRB1_1312 DRB1_1401 DRB1_1402 DRB1_1403 DRB1_1404 DRB1_1405 DRB1_1406 DRB1_1407 DRB1_1418 DRB1_1454 DRB1_1501 DRB1_1502 DRB1_1503 DRB1_1601 DRB1_1602 DPA10103-DPB10101 DPA10103-DPB10201 DPA10103-DPB10202 DPA10103-DPB10301 DPA10103-DPB10401 DPA10103-DPB10501 DPA10103-DPB10601 DPA10103-DPB10901 DPA10103-DPB11001 DPA10103-DPB11101 DPA10103-DPB112401 DPA10103-DPB112601 DPA10103-DPB11301 DPA10103-DPB113101 DPA10103-DPB113301 DPA10103-DPB11401 DPA10103-DPB11501 DPA10103-DPB11601 DPA10103-DPB11701 DPA10103-DPB11801 DPA10103-DPB11901 DPA10103-DPB12001 DPA10103-DPB12101 DPA10103-DPB12301 DPA10103-DPB12901 DPA10103-DPB13001 DPA10103-DPB13101 DPA10103-DPB13401; note = HLAs: DPA10103-DPB13901 DPA10103-DPB14001 DPA10103-DPB14101 DPA10103-DPB14801 DPA10103-DPB15001 DPA10103-DPB15501 DPA10103-DPB15901 DPA10104-DPB10101 DPA10104-DPB10301 DPA10104-DPB11001 DPA10104-DPB11301 DPA10104-DPB11501 DPA10105-DPB10101 DPA10105-DPB10301 DPA10105-DPB10401 DPA10105-DPB11801 DPA10105-DPB15001 DPA10106-DPB10101 DPA10201-DPB10101 DPA10201-DPB10501 DPA10201-DPB10901 DPA10201-DPB110601 DPA10201-DPB11301 DPA10201-DPB113301 DPA10201-DPB11401 DPA10201-DPB11501 DPA10201-DPB11601 DPA10201-DPB11901 DPA10201-DPB13001 DPA10201-DPB15501 DPA10202-DPB10101 DPA10202-DPB10201 DPA10202-DPB10202 DPA10202-DPB10301 DPA10202-DPB10401 DPA10202-DPB10501 DPA10202-DPB10901 DPA10202-DPB110601 DPA10202-DPB11101 DPA10202-DPB11301 DPA10202-DPB113101 DPA10202-DPB11401 DPA10202-DPB11701 DPA10202-DPB11801 DPA10202-DPB11901 DPA10202-DPB12101 DPA10202-DPB12901 DPA10202-DPB13001 DPA10202-DPB13101 DPA10202-DPB13801 DPA10202-DPB14501 DPA10202-DPB15501 DPA10202-DPB16501 DPA10202-DPB18501 DPA10301-DPB10101; note = HLAs: DPA10301-DPB10201 DPA10301-DPB10202 DPA10301-DPB10301 DPA10301-DPB10401 DPA10301-DPB10402 DPA10301-DPB10901 DPA10301-DPB110501 DPA10301-DPB110601 DPA10301-DPB11101 DPA10301-DPB11301 DPA10301-DPB11701 DPA10301-DPB11801 DPA10301-DPB12301 DPA10301-DPB13901 DPA10301-DPB14001 DPA10301-DPB14901 DPA10301-DPB15501 DPA10301-DPB16501 DPA10301-DPB17501 DPA10301-DPB18001 DPA10401-DPB10101 DPA10401-DPB10201 DPA10401-DPB10202 DPA10401-DPB10301 DPA10401-DPB10402 DPA10401-DPB10501 DPA10401-DPB110501 DPA10401-DPB11301 DPA10401-DPB113301 DPA10401-DPB11401 DPA10401-DPB14901 DQA10102-DQB10501 DQA10102-DQB10503 DQA10102-DQB10601 DQA10102-DQB10609 DQA10103-DQB10501 DQA10103-DQB10503 DQA10103-DQB10601 DQA10103-DQB10602 DQA10103-DQB10604 DQA10103-DQB10608 DQA10103-DQB10609 DQA10501-DQB10501 DQA10505-DQB10402 DQA10505-DQB10501
RWIILGLNKIVRMYSPVSILDI

SEQ ID NO: 5383 - protein, 14 aa, Human immunodeficiency virus 1
  source 1..14: note = HLAs: DRB1_1001
RYQYNVLPQGWKGS

SEQ ID NO: 5384 - protein, 15 aa, Human immunodeficiency virus 1
  source 1..15: note = HLAs: DRB1_0101 DRB1_1001 DRB1_1101 DRB1_1104 DRB1_1305
RYQYNVLPQGWKGSP

SEQ ID NO: 5385 - protein, 16 aa, Human immunodeficiency virus 1
  source 1..16: note = HLAs: DRB1_1001
RYQYNVLPQGWKGSPA

SEQ ID NO: 5386 - protein, 17 aa, Human immunodeficiency virus 1
  source 1..17: note = HLAs: DRB1_0101 DRB1_1001
RYQYNVLPQGWKGSPAI

SEQ ID NO: 5387 - protein, 19 aa, Human immunodeficiency virus 1
  source 1..19: note = HLAs: DRB1_1001 DQA10505-DQB10402
RYQYNVLPQGWKGSPAIFQ

SEQ ID NO: 5388 - protein, 20 aa, Human immunodeficiency virus 1
  source 1..20: note = HLAs: DRB1_0101 DRB1_0901 DRB1_1001 DRB1_1101 DRB1_1305 DPA10401-DPB10101 DQA10102-DQB10501 DQA10102-DQB10601 DQA10103-DQB10601 DQA10201-DQB10301 DQA10505-DQB10402
RYQYNVLPQGWKGSPAIFQS

SEQ ID NO: 5389 - protein, 21 aa, Human immunodeficiency virus 1
  source 1..21: note = HLAs: DRB1_0101 DRB1_1001 DQA10103-DQB10601 DQA10201-DQB10301 DQA10505-DQB10402
RYQYNVLPQGWKGSPAIFQSS

SEQ ID NO: 5390 - protein, 22 aa, Human immunodeficiency virus 1
  source 1..22: note = HLAs: DRB1_0101 DRB1_0901 DRB1_1001 DQA10102-DQB10501 DQA10103-DQB10601 DQA10201-DQB10301 DQA10505-DQB10402
RYQYNVLPQGWKGSPAIFQSSM

SEQ ID NO: 5391 - protein, 14 aa, Human immunodeficiency virus 1
  source 1..14: note = HLAs: DQA10201-DQB10301
SALSEGATPQDLNT

SEQ ID NO: 5392 - protein, 15 aa, Human immunodeficiency virus 1
  source 1..15: note = HLAs: DQA10102-DQB10601 DQA10201-DQB10301 DQA10501-DQB10301 DQA10501-DQB10319 DQA10503-DQB10301 DQA10505-DQB10301 DQA10505-DQB10309 DQA10505-DQB10319 DQA10508-DQB10301 DQA10509-DQB10301
SALSEGATPQDLNTM

SEQ ID NO: 5393 - protein, 16 aa, Human immunodeficiency virus 1
  source 1..16: note = HLAs: DQA10201-DQB10301
SALSEGATPQDLNTML

SEQ ID NO: 5394 - protein, 17 aa, Human immunodeficiency virus 1
  source 1..17: note = HLAs: DQA10201-DQB10301
SALSEGATPQDLNTMLN

SEQ ID NO: 5395 - protein, 20 aa, Human immunodeficiency virus 1
  source 1..20: note = HLAs: DQA10102-DQB10501 DQA10102-DQB10601 DQA10201-DQB10301
SALSEGATPQDLNTMLNTVG

SEQ ID NO: 5396 - protein, 22 aa, Human immunodeficiency virus 1
  source 1..22: note = HLAs: DRB1_0404
SALSEGATPQDLNTMLNTVGGH

SEQ ID NO: 5397 - protein, 23 aa, Human immunodeficiency virus 1
  source 1..23: note = HLAs: DRB1_0404 DRB1_0408 DRB1_1001 DQA10102-DQB10501
SALSEGATPQDLNTMLNTVGGHQ

SEQ ID NO: 5398 - protein, 24 aa, Human immunodeficiency virus 1
  source 1..24: note = HLAs: DRB1_0404 DRB1_0408 DRB1_1001 DQA10102-DQB10501
SALSEGATPQDLNTMLNTVGGHQA

SEQ ID NO: 5399 - protein, 25 aa, Human immunodeficiency virus 1
  source 1..25: note = HLAs: DRB1_0101 DRB1_0404 DRB1_0408 DRB1_1001 DQA10102-DQB10501 DQA10102-DQB10601 DQA10201-DQB10301
SALSEGATPQDLNTMLNTVGGHQAA

SEQ ID NO: 5400 - protein, 15 aa, Human immunodeficiency virus 1
  source 1..15: note = HLAs: DRB1_0101 DRB1_1001
SDFNLPPVVAKEIVA

SEQ ID NO: 5401 - protein, 14 aa, Human immunodeficiency virus 1
  source 1..14: note = HLAs: DQA10201-DQB10301
SDIAGTTSTLQEQI

SEQ ID NO: 5402 - protein, 19 aa, Human immunodeficiency virus 1
  source 1..19: note = HLAs: DRB1_0404
SEGATPQDLNTMLNTVGGH

SEQ ID NO: 5403 - protein, 20 aa, Human immunodeficiency virus 1
  source 1..20: note = HLAs: DRB1_0404 DRB1_0408 DRB1_1001 DQA10102-DQB10501
SEGATPQDLNTMLNTVGGHQ

SEQ ID NO: 5404 - protein, 21 aa, Human immunodeficiency virus 1
  source 1..21: note = HLAs: DRB1_0404 DRB1_0408 DRB1_1001 DQA10102-DQB10501
SEGATPQDLNTMLNTVGGHQA

SEQ ID NO: 5405 - protein, 22 aa, Human immunodeficiency virus 1
  source 1..22: note = HLAs: DRB1_0404 DRB1_0408 DRB1_1001 DQA10102-DQB10501
SEGATPQDLNTMLNTVGGHQAA

SEQ ID NO: 5406 - protein, 23 aa, Human immunodeficiency virus 1
  source 1..23: note = HLAs: DRB1_0101 DRB1_0404 DRB1_0408 DRB1_1001 DQA10102-DQB10501
SEGATPQDLNTMLNTVGGHQAAM

SEQ ID NO: 5407 - protein, 24 aa, Human immunodeficiency virus 1
  source 1..24: note = HLAs: DRB1_0101 DRB1_0404 DRB1_0408 DRB1_1001 DQA10102-DQB10501 DQA10102-DQB10601 DQA10103-DQB10601
SEGATPQDLNTMLNTVGGHQAAMQ

SEQ ID NO: 5408 - protein, 25 aa, Human immunodeficiency virus 1
  source 1..25: note = HLAs: DRB1_0101 DRB1_0404 DRB1_0408 DRB1_1001 DQA10102-DQB10501 DQA10102-DQB10601 DQA10103-DQB10601 DQA10201-DQB10301
SEGATPQDLNTMLNTVGGHQAAMQM

SEQ ID NO: 5409 - protein, 14 aa, Human immunodeficiency virus 1
  source 1..14: note = HLAs: DRB1_0301 DQA10102-DQB10501 DQA10102-DQB10609
SEVNIVTDSQYALG

SEQ ID NO: 5410 - protein, 15 aa, Human immunodeficiency virus 1
  source 1..15: note = HLAs: DRB1_0301 DRB1_1114 DRB1_1302 DRB1_1406 DQA10102-DQB10501 DQA10102-DQB10609 DQA10103-DQB10609
SEVNIVTDSQYALGI

SEQ ID NO: 5411 - protein, 16 aa, Human immunodeficiency virus 1
  source 1..16: note = HLAs: DRB1_0301 DPA10301-DPB10101 DPA10401-DPB10101 DQA10102-DQB10501 DQA10102-DQB10503 DQA10102-DQB10609 DQA10103-DQB10501 DQA10103-DQB10609
SEVNIVTDSQYALGII

SEQ ID NO: 5412 - protein, 13 aa, Human immunodeficiency virus 1
  source 1..13: note = HLAs: DRB1_0101 DRB1_0401 DRB1_0408 DRB1_1001 DQA10201-DQB10301 DQA10301-DQB10302 DQA10302-DQB10302 DQA10303-DQB10302 DQA10401-DQB10301 DQA10401-DQB10319 DQA10501-DQB10201 DQA10501-DQB10203 DQA10505-DQB10201 DQA10505-DQB10202
SGYIEAEVIPAET

SEQ ID NO: 5413 - protein, 14 aa, Human immunodeficiency virus 1
  source 1..14: note = HLAs: DRB1_0101 DRB1_0401 DRB1_0408 DRB1_0901 DRB1_1001 DQA10102-DQB10501 DQA10201-DQB10301 DQA10201-DQB10303 DQA10301-DQB10302 DQA10301-DQB10304 DQA10302-DQB10302 DQA10302-DQB10304 DQA10303-DQB10302 DQA10303-DQB10304 DQA10401-DQB10301 DQA10401-DQB10319 DQA10401-DQB10402 DQA10402-DQB10402 DQA10501-DQB10201 DQA10501-DQB10203 DQA10501-DQB10301 DQA10501-DQB10319 DQA10503-DQB10301 DQA10505-DQB10201 DQA10505-DQB10202 DQA10505-DQB10301 DQA10505-DQB10302 DQA10505-DQB10309 DQA10505-DQB10319 DQA10506-DQB10303 DQA10508-DQB10301 DQA10509-DQB10301
SGYIEAEVIPAETG

SEQ ID NO: 5414 - protein, 15 aa, Human immunodeficiency virus 1
  source 1..15: note = HLAs: DRB1_0101 DRB1_0102 DRB1_0401 DRB1_0404 DRB1_0405 DRB1_0408 DRB1_0813 DRB1_0901 DRB1_1001 DPA10301-DPB10101 DPA10401-DPB10101 DQA10102-DQB10501 DQA10102-DQB10601 DQA10102-DQB10609 DQA10103-DQB10601 DQA10201-DQB10301 DQA10201-DQB10303 DQA10301-DQB10301 DQA10301-DQB10302 DQA10302-DQB10301 DQA10302-DQB10302 DQA10303-DQB10301 DQA10303-DQB10302 DQA10401-DQB10301 DQA10401-DQB10319 DQA10501-DQB10201 DQA10501-DQB10203 DQA10501-DQB10301 DQA10501-DQB10319 DQA10503-DQB10301 DQA10505-DQB10201 DQA10505-DQB10202 DQA10505-DQB10301 DQA10505-DQB10302 DQA10505-DQB10309 DQA10505-DQB10319 DQA10506-DQB10303 DQA10508-DQB10301 DQA10509-DQB10301 DQA10601-DQB10301
SGYIEAEVIPAETGQ

SEQ ID NO: 5415 - protein, 16 aa, Human immunodeficiency virus 1
  source 1..16: note = HLAs: DRB1_0101 DRB1_0401 DRB1_0408 DRB1_0901 DRB1_1001 DPA10301-DPB10101 DPA10401-DPB10101 DQA10102-DQB10501 DQA10102-DQB10601 DQA10102-DQB10609 DQA10103-DQB10601 DQA10201-DQB10301 DQA10201-DQB10302 DQA10201-DQB10303 DQA10301-DQB10301 DQA10301-DQB10302 DQA10301-DQB10304 DQA10302-DQB10301 DQA10302-DQB10302 DQA10302-DQB10304 DQA10303-DQB10301 DQA10303-DQB10302 DQA10303-DQB10304 DQA10401-DQB10301 DQA10401-DQB10319 DQA10401-DQB10402 DQA10402-DQB10402 DQA10501-DQB10201 DQA10501-DQB10203 DQA10501-DQB10301 DQA10501-DQB10319 DQA10503-DQB10301 DQA10505-DQB10201 DQA10505-DQB10202 DQA10505-DQB10301 DQA10505-DQB10302 DQA10505-DQB10309 DQA10505-DQB10319 DQA10506-DQB10303 DQA10508-DQB10301 DQA10509-DQB10301 DQA10601-DQB10301
SGYIEAEVIPAETGQE

SEQ ID NO: 5416 - protein, 17 aa, Human immunodeficiency virus 1
  source 1..17: note = HLAs: DRB1_0101 DRB1_0401 DRB1_0408 DRB1_0901 DRB1_1001 DPA10301-DPB10101 DPA10401-DPB10101 DQA10102-DQB10501 DQA10102-DQB10601 DQA10201-DQB10301 DQA10401-DQB10301 DQA10401-DQB10319 DQA10501-DQB10201 DQA10501-DQB10301 DQA10501-DQB10319 DQA10503-DQB10301 DQA10505-DQB10201 DQA10505-DQB10202 DQA10505-DQB10301 DQA10505-DQB10309 DQA10505-DQB10319 DQA10508-DQB10301 DQA10509-DQB10301
SGYIEAEVIPAETGQET

SEQ ID NO: 5417 - protein, 18 aa, Human immunodeficiency virus 1
  source 1..18: note = HLAs: DRB1_1001 DQA10201-DQB10301
SGYIEAEVIPAETGQETA

SEQ ID NO: 5418 - protein, 19 aa, Human immunodeficiency virus 1
  source 1..19: note = HLAs: DRB1_0101 DRB1_0401 DRB1_0408 DRB1_0901 DRB1_1001 DQA10102-DQB10501 DQA10102-DQB10601 DQA10102-DQB10609 DQA10201-DQB10301 DQA10501-DQB10201 DQA10501-DQB10203 DQA10505-DQB10201 DQA10505-DQB10202
SGYIEAEVIPAETGQETAY

SEQ ID NO: 5419 - protein, 20 aa, Human immunodeficiency virus 1
  source 1..20: note = HLAs: DRB1_0101 DRB1_0401 DRB1_0405 DRB1_0408 DRB1_0901 DRB1_1001 DPA10301-DPB10101 DPA10401-DPB10101 DQA10102-DQB10501 DQA10102-DQB10601 DQA10102-DQB10609 DQA10103-DQB10601 DQA10201-DQB10301 DQA10201-DQB10303 DQA10501-DQB10201 DQA10501-DQB10301 DQA10501-DQB10319 DQA10503-DQB10301 DQA10505-DQB10201 DQA10505-DQB10202 DQA10505-DQB10301 DQA10505-DQB10309 DQA10505-DQB10319 DQA10508-DQB10301 DQA10509-DQB10301
SGYIEAEVIPAETGQETAYF

SEQ ID NO: 5420 - protein, 15 aa, Human immunodeficiency virus 1
  source 1..15: note = HLAs: DRB1_1304
SILDIRQGPKEPFRD

SEQ ID NO: 5421 - protein, 17 aa, Human immunodeficiency virus 1
  source 1..17: note = HLAs: DRB1_0404
SINNETPGIRYQYNVLP

SEQ ID NO: 5422 - protein, 19 aa, Human immunodeficiency virus 1
  source 1..19: note = HLAs: DRB1_0101 DRB1_0401 DRB1_0404 DRB1_0405 DRB1_0408 DRB1_0410 DRB1_0813 DRB1_1001 DQA10102-DQB10501
SINNETPGIRYQYNVLPQG

SEQ ID NO: 5423 - protein, 20 aa, Human immunodeficiency virus 1
  source 1..20: note = HLAs: DRB1_0101 DRB1_0102 DRB1_0401 DRB1_0404 DRB1_0405 DRB1_0408 DRB1_0410 DRB1_0801 DRB1_0802 DRB1_0804 DRB1_0806 DRB1_0809 DRB1_0813 DRB1_1001 DRB1_1102 DRB1_1114 DRB1_1301 DRB1_1302 DRB1_1304 DRB1_1402 DRB1_1406 DRB1_1501 DRB1_1502 DRB1_1503 DRB1_1602 DPA10103-DPB11501 DPA10103-DPB15001 DPA10104-DPB11501 DPA10105-DPB15001 DPA10202-DPB10101 DPA10301-DPB10101 DPA10301-DPB10201 DPA10301-DPB10202 DPA10301-DPB110601 DPA10301-DPB11801 DPA10301-DPB16501 DPA10401-DPB10101 DPA10401-DPB10501 DQA10102-DQB10501 DQA10102-DQB10503 DQA10103-DQB10501
SINNETPGIRYQYNVLPQGW

SEQ ID NO: 5424 - protein, 21 aa, Human immunodeficiency virus 1
  source 1..21: note = HLAs: DRB1_0101 DRB1_0401 DRB1_0404 DRB1_0405 DRB1_0408 DRB1_0410 DRB1_0802 DRB1_0809 DRB1_0813 DRB1_1001 DRB1_1114 DRB1_1302 DRB1_1304 DRB1_1406 DRB1_1501 DRB1_1602 DPA10301-DPB10101 DPA10301-DPB10201 DPA10301-DPB10202 DPA10301-DPB110601 DPA10401-DPB10101 DQA10102-DQB10501 DQA10102-DQB10503 DQA10103-DQB10501
SINNETPGIRYQYNVLPQGWK

SEQ ID NO: 5425 - protein, 22 aa, Human immunodeficiency virus 1
  source 1..22: note = HLAs: DRB1_0101 DRB1_0102 DRB1_0401 DRB1_0404 DRB1_0405 DRB1_0408 DRB1_0410 DRB1_0801 DRB1_0802 DRB1_0809 DRB1_0813 DRB1_1001 DRB1_1101 DRB1_1102 DRB1_1114 DRB1_1301 DRB1_1302 DRB1_1304 DRB1_1305 DRB1_1402 DRB1_1406 DRB1_1501 DRB1_1602 DPA10301-DPB10101 DPA10301-DPB10201 DPA10301-DPB10202 DPA10301-DPB110601 DPA10401-DPB10101 DQA10102-DQB10501 DQA10102-DQB10503 DQA10103-DQB10501
SINNETPGIRYQYNVLPQGWKG

SEQ ID NO: 5426 - protein, 23 aa, Human immunodeficiency virus 1
  source 1..23: note = HLAs: DRB1_0101 DRB1_0102 DRB1_0401 DRB1_0404 DRB1_0405 DRB1_0408 DRB1_0410 DRB1_0801 DRB1_0802 DRB1_0806 DRB1_0809 DRB1_0813 DRB1_1001 DRB1_1101 DRB1_1102 DRB1_1104 DRB1_1114 DRB1_1301 DRB1_1302 DRB1_1304 DRB1_1305 DRB1_1402 DRB1_1406 DRB1_1501 DRB1_1502 DRB1_1601 DRB1_1602 DPA10301-DPB10101 DPA10301-DPB10201 DPA10301-DPB10202 DPA10301-DPB110601 DPA10301-DPB11801 DPA10401-DPB10101 DQA10102-DQB10501 DQA10102-DQB10503 DQA10103-DQB10501
SINNETPGIRYQYNVLPQGWKGS

SEQ ID NO: 5427 - protein, 24 aa, Human immunodeficiency virus 1
  source 1..24: note = HLAs: DRB1_0101 DRB1_0102 DRB1_0401 DRB1_0404 DRB1_0405 DRB1_0408 DRB1_0410 DRB1_0801 DRB1_0802 DRB1_0806 DRB1_0809 DRB1_0813 DRB1_1001 DRB1_1101 DRB1_1102 DRB1_1104 DRB1_1114 DRB1_1301 DRB1_1302 DRB1_1304 DRB1_1305 DRB1_1402 DRB1_1406 DRB1_1501 DRB1_1502 DRB1_1601 DRB1_1602 DPA10301-DPB10101 DPA10301-DPB10201 DPA10301-DPB10202 DPA10301-DPB110601 DPA10301-DPB11801 DPA10401-DPB10101 DQA10102-DQB10501 DQA10102-DQB10503 DQA10103-DQB10501
SINNETPGIRYQYNVLPQGWKGSP

SEQ ID NO: 5428 - protein, 25 aa, Human immunodeficiency virus 1
  source 1..25: note = HLAs: DRB1_0101 DRB1_0102 DRB1_0401 DRB1_0404 DRB1_0405 DRB1_0408 DRB1_0410 DRB1_0801 DRB1_0802 DRB1_0806 DRB1_0809 DRB1_0813 DRB1_1001 DRB1_1101 DRB1_1102 DRB1_1104 DRB1_1114 DRB1_1301 DRB1_1302 DRB1_1304 DRB1_1305 DRB1_1402 DRB1_1406 DRB1_1501 DRB1_1502 DRB1_1601 DRB1_1602 DPA10301-DPB10101 DPA10301-DPB10201 DPA10301-DPB10202 DPA10301-DPB110601 DPA10301-DPB11801 DPA10401-DPB10101 DQA10102-DQB10501 DQA10102-DQB10503 DQA10103-DQB10501
SINNETPGIRYQYNVLPQGWKGSPA

SEQ ID NO: 5429 - protein, 20 aa, Human immunodeficiency virus 1
  source 1..20: note = HLAs: DPA10401-DPB10101 DQA10103-DQB10601
SKIGPENPYNTPVFAIKKKD

SEQ ID NO: 5430 - protein, 21 aa, Human immunodeficiency virus 1
  source 1..21: note = HLAs: DRB1_1104
SKIGPENPYNTPVFAIKKKDS

SEQ ID NO: 5431 - protein, 22 aa, Human immunodeficiency virus 1
  source 1..22: note = HLAs: DRB1_0806 DRB1_1101 DRB1_1103 DRB1_1104 DRB1_1305
SKIGPENPYNTPVFAIKKKDST

SEQ ID NO: 5432 - protein, 23 aa, Human immunodeficiency virus 1
  source 1..23: note = HLAs: DRB1_0804 DRB1_0806 DRB1_1101 DRB1_1102 DRB1_1103 DRB1_1104 DRB1_1301 DRB1_1304 DRB1_1305
SKIGPENPYNTPVFAIKKKDSTK

SEQ ID NO: 5433 - protein, 24 aa, Human immunodeficiency virus 1
  source 1..24: note = HLAs: DRB1_0801 DRB1_0804 DRB1_0806 DRB1_1101 DRB1_1102 DRB1_1103 DRB1_1104 DRB1_1301 DRB1_1304 DRB1_1305 DRB1_1406
SKIGPENPYNTPVFAIKKKDSTKW

SEQ ID NO: 5434 - protein, 14 aa, Human immunodeficiency virus 1
  source 1..14: note = HLAs: DRB1_0806 DRB1_1102 DRB1_1103 DRB1_1104 DRB1_1301 DRB1_1304 DRB1_1406
SMNKELKKIIGQVR

SEQ ID NO: 5435 - protein, 15 aa, Human immunodeficiency virus 1
  source 1..15: note = HLAs: DRB1_0101 DRB1_0102 DRB1_0804 DRB1_0806 DRB1_1101 DRB1_1102 DRB1_1103 DRB1_1104 DRB1_1202 DRB1_1301 DRB1_1304 DRB1_1305 DRB1_1406 DRB1_1601
SMNKELKKIIGQVRD

SEQ ID NO: 5436 - protein, 16 aa, Human immunodeficiency virus 1
  source 1..16: note = HLAs: DRB1_0806 DRB1_1102 DRB1_1103 DRB1_1104 DRB1_1301 DRB1_1304 DRB1_1406 DRB1_1601
SMNKELKKIIGQVRDQ

SEQ ID NO: 5437 - protein, 17 aa, Human immunodeficiency virus 1
  source 1..17: note = HLAs: DRB1_0101 DRB1_0804 DRB1_0806 DRB1_1101 DRB1_1102 DRB1_1103 DRB1_1104 DRB1_1301 DRB1_1304 DRB1_1305 DRB1_1406 DRB1_1601
SMNKELKKIIGQVRDQA

SEQ ID NO: 5438 - protein, 18 aa, Human immunodeficiency virus 1
  source 1..18: note = HLAs: DRB1_1102 DRB1_1103 DRB1_1104 DRB1_1301 DRB1_1406
SMNKELKKIIGQVRDQAE

SEQ ID NO: 5439 - protein, 19 aa, Human immunodeficiency virus 1
  source 1..19: note = HLAs: DRB1_0804 DRB1_0806 DRB1_1101 DRB1_1102 DRB1_1103 DRB1_1104 DRB1_1301 DRB1_1304 DRB1_1305 DRB1_1406 DQA10102-DQB10501 DQA10102-DQB10609
SMNKELKKIIGQVRDQAEH

SEQ ID NO: 5440 - protein, 20 aa, Human immunodeficiency virus 1
  source 1..20: note = HLAs: DRB1_0101 DRB1_0404 DRB1_0410 DRB1_0801 DRB1_0802 DRB1_0804 DRB1_0806 DRB1_0809 DRB1_1001 DRB1_1101 DRB1_1102 DRB1_1103 DRB1_1104 DRB1_1202 DRB1_1301 DRB1_1304 DRB1_1305 DRB1_1406 DRB1_1501 DRB1_1503 DRB1_1601 DPA10202-DPB10501 DPA10202-DPB110601 DPA10202-DPB11901 DPA10202-DPB13801 DPA10301-DPB11801 DQA10102-DQB10501 DQA10102-DQB10503 DQA10102-DQB10604 DQA10102-DQB10609 DQA10103-DQB10501
SMNKELKKIIGQVRDQAEHL

SEQ ID NO: 5441 - protein, 13 aa, Human immunodeficiency virus 1
  source 1..13: note = HLAs: DRB1_0101 DRB1_0102 DRB1_0404 DRB1_0408 DRB1_1001 DQA10102-DQB10501
SPEVIPMFSALSE

SEQ ID NO: 5442 - protein, 14 aa, Human immunodeficiency virus 1
  source 1..14: note = HLAs: DRB1_0101 DRB1_0102 DRB1_0401 DRB1_0404 DRB1_0405 DRB1_0408 DRB1_0410 DRB1_1001 DRB1_1501 DQA10102-DQB10501 DQA10103-DQB10501
SPEVIPMFSALSEG

SEQ ID NO: 5443 - protein, 15 aa, Human immunodeficiency virus 1
  source 1..15: note = HLAs: DRB1_0101 DRB1_0102 DRB1_0401 DRB1_0402 DRB1_0404 DRB1_0405 DRB1_0408 DRB1_0410 DRB1_0701 DRB1_0801 DRB1_0802 DRB1_0804 DRB1_0806 DRB1_0809 DRB1_0813 DRB1_0901 DRB1_1001 DRB1_1101 DRB1_1102 DRB1_1103 DRB1_1104 DRB1_1301 DRB1_1304 DRB1_1305 DRB1_1406 DRB1_1501 DRB1_1502 DRB1_1503 DRB1_1601 DRB1_1602 DPA10103-DPB11501 DPA10104-DPB11501 DPA10301-DPB10101 DPA10301-DPB11801 DPA10301-DPB14001 DPA10401-DPB10101 DQA10102-DQB10501 DQA10102-DQB10503 DQA10102-DQB10601 DQA10102-DQB10602 DQA10102-DQB10609 DQA10102-DQB10611 DQA10103-DQB10501 DQA10103-DQB10601 DQA10103-DQB10602 DQA10103-DQB10609 DQA10201-DQB10301 DQA10201-DQB10302 DQA10201-DQB10303 DQA10301-DQB10301 DQA10302-DQB10301 DQA10303-DQB10301 DQA10501-DQB10301 DQA10501-DQB10319 DQA10503-DQB10301 DQA10505-DQB10301 DQA10505-DQB10302 DQA10505-DQB10309 DQA10505-DQB10319 DQA10505-DQB10402 DQA10506-DQB10303 DQA10508-DQB10301 DQA10509-DQB10301 DQA10601-DQB10301
SPEVIPMFSALSEGA

SEQ ID NO: 5444 - protein, 16 aa, Human immunodeficiency virus 1
  source 1..16: note = HLAs: DRB1_0101 DRB1_0102 DRB1_0401 DRB1_0404 DRB1_0405 DRB1_0408 DRB1_0410 DRB1_0802 DRB1_0804 DRB1_0806 DRB1_0809 DRB1_0813 DRB1_0901 DRB1_1001 DRB1_1104 DRB1_1406 DRB1_1501 DRB1_1601 DRB1_1602 DPA10103-DPB11501 DPA10104-DPB11501 DPA10301-DPB10101 DPA10401-DPB10101 DQA10102-DQB10501 DQA10102-DQB10503 DQA10102-DQB10601 DQA10102-DQB10602 DQA10102-DQB10609 DQA10102-DQB10611 DQA10103-DQB10501 DQA10103-DQB10601 DQA10103-DQB10602 DQA10103-DQB10609 DQA10201-DQB10301 DQA10201-DQB10302 DQA10201-DQB10303 DQA10301-DQB10301 DQA10302-DQB10301 DQA10303-DQB10301 DQA10401-DQB10301 DQA10401-DQB10319 DQA10501-DQB10203 DQA10501-DQB10301 DQA10501-DQB10319 DQA10503-DQB10301 DQA10505-DQB10301 DQA10505-DQB10302 DQA10505-DQB10309 DQA10505-DQB10319 DQA10505-DQB10402 DQA10506-DQB10303 DQA10508-DQB10301 DQA10509-DQB10301 DQA10601-DQB10301
SPEVIPMFSALSEGAT

SEQ ID NO: 5445 - protein, 17 aa, Human immunodeficiency virus 1
  source 1..17: note = HLAs: DRB1_0101 DRB1_0102 DRB1_0401 DRB1_0404 DRB1_0405 DRB1_0408 DRB1_0410 DRB1_0802 DRB1_0804 DRB1_0806 DRB1_0809 DRB1_0813 DRB1_0901 DRB1_1001 DRB1_1101 DRB1_1104 DRB1_1305 DRB1_1406 DRB1_1501 DRB1_1503 DRB1_1601 DRB1_1602 DPA10103-DPB11501 DPA10104-DPB11501 DPA10301-DPB10101 DPA10301-DPB11801 DPA10401-DPB10101 DQA10102-DQB10501 DQA10102-DQB10503 DQA10102-DQB10601 DQA10102-DQB10602 DQA10102-DQB10609 DQA10102-DQB10611 DQA10103-DQB10501 DQA10103-DQB10601 DQA10103-DQB10602 DQA10103-DQB10609 DQA10201-DQB10301 DQA10201-DQB10302 DQA10201-DQB10303 DQA10301-DQB10301 DQA10302-DQB10301 DQA10303-DQB10301 DQA10401-DQB10301 DQA10401-DQB10319 DQA10501-DQB10301 DQA10501-DQB10319 DQA10503-DQB10301 DQA10505-DQB10301 DQA10505-DQB10302 DQA10505-DQB10309 DQA10505-DQB10319 DQA10505-DQB10402 DQA10506-DQB10303 DQA10508-DQB10301 DQA10509-DQB10301 DQA10601-DQB10301
SPEVIPMFSALSEGATP

SEQ ID NO: 5446 - protein, 18 aa, Human immunodeficiency virus 1
  source 1..18: note = HLAs: DRB1_0101 DRB1_0102 DRB1_0404 DRB1_0408 DRB1_1001 DQA10102-DQB10501 DQA10102-DQB10503 DQA10102-DQB10601 DQA10102-DQB10602 DQA10102-DQB10611 DQA10103-DQB10501 DQA10201-DQB10301 DQA10201-DQB10303 DQA10501-DQB10301 DQA10501-DQB10319 DQA10503-DQB10301 DQA10505-DQB10301 DQA10505-DQB10302 DQA10505-DQB10309 DQA10505-DQB10319 DQA10506-DQB10303 DQA10508-DQB10301 DQA10509-DQB10301
SPEVIPMFSALSEGATPQ

SEQ ID NO: 5447 - protein, 19 aa, Human immunodeficiency virus 1
  source 1..19: note = HLAs: DRB1_0101 DRB1_0102 DRB1_0401 DRB1_0404 DRB1_0405 DRB1_0408 DRB1_0410 DRB1_0802 DRB1_0804 DRB1_0809 DRB1_0901 DRB1_1001 DRB1_1501 DRB1_1602 DPA10301-DPB10101 DPA10401-DPB10101 DQA10102-DQB10501 DQA10102-DQB10503 DQA10102-DQB10601 DQA10102-DQB10602 DQA10102-DQB10609 DQA10102-DQB10611 DQA10103-DQB10501 DQA10103-DQB10601 DQA10103-DQB10609 DQA10201-DQB10301 DQA10201-DQB10302 DQA10201-DQB10303 DQA10501-DQB10301 DQA10501-DQB10319 DQA10503-DQB10301 DQA10505-DQB10301 DQA10505-DQB10302 DQA10505-DQB10309 DQA10505-DQB10319 DQA10505-DQB10402 DQA10506-DQB10303 DQA10508-DQB10301 DQA10509-DQB10301 DQA10601-DQB10301
SPEVIPMFSALSEGATPQD

SEQ ID NO: 5448 - protein, 20 aa, Human immunodeficiency virus 1
  source 1..20: note = HLAs: DRB1_0101 DRB1_0102 DRB1_0401 DRB1_0404 DRB1_0405 DRB1_0408 DRB1_0410 DRB1_0801 DRB1_0802 DRB1_0804 DRB1_0806 DRB1_0809 DRB1_0813 DRB1_0901 DRB1_1001 DRB1_1104 DRB1_1406 DRB1_1501 DRB1_1601 DRB1_1602 DPA10103-DPB11501 DPA10104-DPB11501 DPA10301-DPB10101 DPA10301-DPB10201 DPA10301-DPB11801 DPA10401-DPB10101 DQA10102-DQB10501 DQA10102-DQB10503 DQA10102-DQB10601 DQA10102-DQB10602 DQA10102-DQB10609 DQA10102-DQB10611 DQA10103-DQB10501 DQA10103-DQB10503 DQA10103-DQB10601 DQA10103-DQB10602 DQA10103-DQB10608 DQA10103-DQB10609 DQA10201-DQB10301 DQA10201-DQB10302 DQA10201-DQB10303 DQA10301-DQB10301 DQA10302-DQB10301 DQA10303-DQB10301 DQA10401-DQB10301 DQA10401-DQB10319 DQA10501-DQB10301 DQA10501-DQB10319 DQA10503-DQB10301 DQA10505-DQB10301 DQA10505-DQB10302 DQA10505-DQB10309 DQA10505-DQB10319 DQA10505-DQB10402 DQA10506-DQB10303 DQA10508-DQB10301 DQA10509-DQB10301 DQA10601-DQB10301
SPEVIPMFSALSEGATPQDL

SEQ ID NO: 5449 - protein, 21 aa, Human immunodeficiency virus 1
  source 1..21: note = HLAs: DRB1_0101 DRB1_0102 DRB1_0401 DRB1_0404 DRB1_0405 DRB1_0408 DRB1_0410 DRB1_0802 DRB1_0804 DRB1_0809 DRB1_0901 DRB1_1001 DRB1_1501 DRB1_1601 DRB1_1602 DPA10301-DPB10101 DPA10401-DPB10101 DQA10102-DQB10501 DQA10102-DQB10503 DQA10102-DQB10601 DQA10102-DQB10609 DQA10103-DQB10501 DQA10103-DQB10601 DQA10103-DQB10609 DQA10201-DQB10301 DQA10201-DQB10303 DQA10501-DQB10301 DQA10501-DQB10319 DQA10503-DQB10301 DQA10505-DQB10301 DQA10505-DQB10309 DQA10505-DQB10319 DQA10506-DQB10303 DQA10508-DQB10301 DQA10509-DQB10301 DQA10601-DQB10301
SPEVIPMFSALSEGATPQDLN

SEQ ID NO: 5450 - protein, 22 aa, Human immunodeficiency virus 1
  source 1..22: note = HLAs: DRB1_0101 DRB1_0102 DRB1_0401 DRB1_0404 DRB1_0405 DRB1_0408 DRB1_0410 DRB1_0802 DRB1_0804 DRB1_0809 DRB1_0901 DRB1_1001 DRB1_1501 DRB1_1601 DRB1_1602 DPA10301-DPB10101 DPA10401-DPB10101 DQA10102-DQB10501 DQA10102-DQB10503 DQA10102-DQB10601 DQA10102-DQB10609 DQA10103-DQB10501 DQA10103-DQB10601 DQA10103-DQB10609 DQA10201-DQB10301 DQA10201-DQB10303 DQA10501-DQB10301 DQA10501-DQB10319 DQA10503-DQB10301 DQA10505-DQB10301 DQA10505-DQB10309 DQA10505-DQB10319 DQA10506-DQB10303 DQA10508-DQB10301 DQA10509-DQB10301 DQA10601-DQB10301
SPEVIPMFSALSEGATPQDLNT

SEQ ID NO: 5451 - protein, 23 aa, Human immunodeficiency virus 1
  source 1..23: note = HLAs: DRB1_0101 DRB1_0102 DRB1_0401 DRB1_0404 DRB1_0405 DRB1_0408 DRB1_0410 DRB1_0802 DRB1_0804 DRB1_0809 DRB1_0901 DRB1_1001 DRB1_1501 DRB1_1601 DRB1_1602 DPA10301-DPB10101 DPA10401-DPB10101 DQA10102-DQB10501 DQA10102-DQB10503 DQA10102-DQB10601 DQA10102-DQB10609 DQA10102-DQB10611 DQA10103-DQB10501 DQA10103-DQB10601 DQA10103-DQB10609 DQA10201-DQB10301 DQA10201-DQB10303 DQA10501-DQB10301 DQA10501-DQB10319 DQA10503-DQB10301 DQA10505-DQB10301 DQA10505-DQB10309 DQA10505-DQB10319 DQA10506-DQB10303 DQA10508-DQB10301 DQA10509-DQB10301 DQA10601-DQB10301
SPEVIPMFSALSEGATPQDLNTM

SEQ ID NO: 5452 - protein, 24 aa, Human immunodeficiency virus 1
  source 1..24: note = HLAs: DRB1_0101 DRB1_0102 DRB1_0401 DRB1_0404 DRB1_0405 DRB1_0408 DRB1_0410 DRB1_0802 DRB1_0804 DRB1_0809 DRB1_0901 DRB1_1001 DRB1_1501 DRB1_1601 DRB1_1602 DPA10301-DPB10101 DPA10401-DPB10101 DQA10102-DQB10501 DQA10102-DQB10503 DQA10102-DQB10601 DQA10102-DQB10609 DQA10102-DQB10611 DQA10103-DQB10501 DQA10103-DQB10601 DQA10103-DQB10609 DQA10201-DQB10301 DQA10201-DQB10303 DQA10401-DQB10301 DQA10401-DQB10319 DQA10501-DQB10301 DQA10501-DQB10319 DQA10503-DQB10301 DQA10505-DQB10301 DQA10505-DQB10309 DQA10505-DQB10319 DQA10506-DQB10303 DQA10508-DQB10301 DQA10509-DQB10301 DQA10601-DQB10301
SPEVIPMFSALSEGATPQDLNTML

SEQ ID NO: 5453 - protein, 25 aa, Human immunodeficiency virus 1
  source 1..25: note = HLAs: DRB1_0101 DRB1_0102 DRB1_0401 DRB1_0404 DRB1_0405 DRB1_0408 DRB1_0410 DRB1_0802 DRB1_0804 DRB1_0809 DRB1_0901 DRB1_1001 DRB1_1104 DRB1_1501 DRB1_1601 DRB1_1602 DPA10301-DPB10101 DPA10401-DPB10101 DQA10102-DQB10501 DQA10102-DQB10503 DQA10102-DQB10601 DQA10102-DQB10609 DQA10102-DQB10611 DQA10103-DQB10501 DQA10103-DQB10601 DQA10103-DQB10609 DQA10201-DQB10301 DQA10201-DQB10303 DQA10401-DQB10301 DQA10401-DQB10319 DQA10501-DQB10301 DQA10501-DQB10319 DQA10503-DQB10301 DQA10505-DQB10301 DQA10505-DQB10309 DQA10505-DQB10319 DQA10506-DQB10303 DQA10508-DQB10301 DQA10509-DQB10301 DQA10601-DQB10301
SPEVIPMFSALSEGATPQDLNTMLN

SEQ ID NO: 5454 - protein, 15 aa, Human immunodeficiency virus 1
  source 1..15: note = HLAs: DRB1_0101 DRB1_0102 DRB1_0401 DRB1_0405 DRB1_0408 DRB1_1001 DRB1_1303
SPGIWQLDCTHLEGK

SEQ ID NO: 5455 - protein, 16 aa, Human immunodeficiency virus 1
  source 1..16: note = HLAs: DRB1_0401 DRB1_0405 DRB1_0408
SPGIWQLDCTHLEGKI

SEQ ID NO: 5456 - protein, 17 aa, Human immunodeficiency virus 1
  source 1..17: note = HLAs: DRB1_0101 DRB1_0401 DRB1_0405 DRB1_0408
SPGIWQLDCTHLEGKII

SEQ ID NO: 5457 - protein, 19 aa, Human immunodeficiency virus 1
  source 1..19: note = HLAs: DRB1_0101 DRB1_0401 DRB1_0405
SPGIWQLDCTHLEGKIILV

SEQ ID NO: 5458 - protein, 20 aa, Human immunodeficiency virus 1
  source 1..20: note = HLAs: DRB1_0101 DRB1_0102 DRB1_0401 DRB1_0405 DRB1_1001 DRB1_1303 DPA10103-DPB11501 DPA10104-DPB11501 DPA10202-DPB10101 DPA10301-DPB10101 DPA10301-DPB10201 DPA10301-DPB10202 DPA10301-DPB10401 DPA10301-DPB110601 DPA10301-DPB11801 DPA10301-DPB12301 DPA10301-DPB13901 DPA10301-DPB14001 DPA10301-DPB16501 DPA10401-DPB10101 DQA10102-DQB10501
SPGIWQLDCTHLEGKIILVA

SEQ ID NO: 5459 - protein, 21 aa, Human immunodeficiency virus 1
  source 1..21: note = HLAs: DRB1_0101 DRB1_0405 DRB1_1001 DPA10301-DPB10101 DPA10301-DPB10201 DPA10301-DPB10202 DPA10301-DPB110601 DPA10301-DPB11801 DPA10301-DPB14001 DPA10401-DPB10101 DQA10102-DQB10501
SPGIWQLDCTHLEGKIILVAV

SEQ ID NO: 5460 - protein, 22 aa, Human immunodeficiency virus 1
  source 1..22: note = HLAs: DRB1_0101 DRB1_0401 DRB1_0405 DRB1_1001 DPA10103-DPB11501 DPA10104-DPB11501 DPA10301-DPB10101 DPA10301-DPB10201 DPA10301-DPB10202 DPA10301-DPB110601 DPA10301-DPB11801 DPA10301-DPB14001 DPA10301-DPB16501 DPA10401-DPB10101 DQA10102-DQB10501
SPGIWQLDCTHLEGKIILVAVH

SEQ ID NO: 5461 - protein, 23 aa, Human immunodeficiency virus 1
  source 1..23: note = HLAs: DRB1_0101 DRB1_0401 DRB1_0405 DRB1_1001 DPA10103-DPB11501 DPA10104-DPB11501 DPA10301-DPB10101 DPA10301-DPB10201 DPA10301-DPB10202 DPA10301-DPB110601 DPA10301-DPB11801 DPA10301-DPB14001 DPA10301-DPB16501 DPA10401-DPB10101 DPA10401-DPB10201 DPA10401-DPB10202 DQA10102-DQB10501
SPGIWQLDCTHLEGKIILVAVHV

SEQ ID NO: 5462 - protein, 24 aa, Human immunodeficiency virus 1
  source 1..24: note = HLAs: DRB1_0101 DRB1_0102 DRB1_0401 DRB1_0405 DRB1_0410 DRB1_1001 DPA10103-DPB11501 DPA10104-DPB11501 DPA10202-DPB10101 DPA10301-DPB10101 DPA10301-DPB10201 DPA10301-DPB10202 DPA10301-DPB10401 DPA10301-DPB110601 DPA10301-DPB11801 DPA10301-DPB12301 DPA10301-DPB13901 DPA10301-DPB14001 DPA10301-DPB16501 DPA10401-DPB10101 DPA10401-DPB10201 DPA10401-DPB10202 DQA10102-DQB10501 DQA10103-DQB10501
SPGIWQLDCTHLEGKIILVAVHVA

SEQ ID NO: 5463 - protein, 25 aa, Human immunodeficiency virus 1
  source 1..25: note = HLAs: DRB1_0101 DRB1_0102 DRB1_0401 DRB1_0404 DRB1_0405 DRB1_0408 DRB1_0410 DRB1_1001 DRB1_1406 DPA10103-DPB11501 DPA10104-DPB11501 DPA10202-DPB10101 DPA10301-DPB10101 DPA10301-DPB10201 DPA10301-DPB10202 DPA10301-DPB10401 DPA10301-DPB110601 DPA10301-DPB11801 DPA10301-DPB12301 DPA10301-DPB13901 DPA10301-DPB14001 DPA10301-DPB16501 DPA10401-DPB10101 DPA10401-DPB10201 DPA10401-DPB10202 DQA10102-DQB10501 DQA10103-DQB10501
SPGIWQLDCTHLEGKIILVAVHVAS

SEQ ID NO: 5464 - protein, 15 aa, Human immunodeficiency virus 1
  source 1..15: note = HLAs: DRB1_1103 DRB1_1406
SPIETVPVKLKPGMD

SEQ ID NO: 5465 - protein, 15 aa, Human immunodeficiency virus 1
  source 1..15: note = HLAs: DRB1_1102 DRB1_1103 DRB1_1104 DRB1_1114 DRB1_1301 DRB1_1302 DRB1_1304 DRB1_1406
SQGVVESMNKELKKI

SEQ ID NO: 5466 - protein, 16 aa, Human immunodeficiency virus 1
  source 1..16: note = HLAs: DRB1_1103 DRB1_1104 DRB1_1304 DRB1_1406
SQGVVESMNKELKKII

SEQ ID NO: 5467 - protein, 17 aa, Human immunodeficiency virus 1
  source 1..17: note = HLAs: DRB1_1102 DRB1_1103 DRB1_1104 DRB1_1301 DRB1_1304 DRB1_1406
SQGVVESMNKELKKIIG

SEQ ID NO: 5468 - protein, 19 aa, Human immunodeficiency virus 1
  source 1..19: note = HLAs: DRB1_1103 DRB1_1104 DRB1_1304 DRB1_1406
SQGVVESMNKELKKIIGQV

SEQ ID NO: 5469 - protein, 20 aa, Human immunodeficiency virus 1
  source 1..20: note = HLAs: DRB1_0101 DRB1_0801 DRB1_0804 DRB1_0806 DRB1_1101 DRB1_1102 DRB1_1103 DRB1_1104 DRB1_1114 DRB1_1301 DRB1_1302 DRB1_1304 DRB1_1305 DRB1_1406 DPA10202-DPB10501 DPA10202-DPB110601 DPA10202-DPB11901 DPA10202-DPB13101 DPA10202-DPB13801 DPA10301-DPB11801
SQGVVESMNKELKKIIGQVR

SEQ ID NO: 5470 - protein, 13 aa, Human immunodeficiency virus 1
  source 1..13: note = HLAs: DRB1_1001 DQA10102-DQB10501 DQA10102-DQB10601 DQA10102-DQB10602 DQA10102-DQB10609 DQA10102-DQB10611 DQA10201-DQB10301 DQA10401-DQB10301 DQA10401-DQB10319 DQA10501-DQB10301 DQA10501-DQB10319 DQA10503-DQB10301 DQA10505-DQB10301 DQA10505-DQB10309 DQA10505-DQB10319 DQA10508-DQB10301 DQA10509-DQB10301
SQYALGIIQAQPD

SEQ ID NO: 5471 - protein, 14 aa, Human immunodeficiency virus 1
  source 1..14: note = HLAs: DRB1_0101 DRB1_0405 DRB1_0408 DRB1_0410 DRB1_1001 DPA10301-DPB10101 DPA10401-DPB10101 DQA10102-DQB10501 DQA10102-DQB10503 DQA10102-DQB10601 DQA10102-DQB10602 DQA10102-DQB10609 DQA10102-DQB10611 DQA10103-DQB10501 DQA10103-DQB10601 DQA10103-DQB10602 DQA10103-DQB10609 DQA10201-DQB10301 DQA10201-DQB10302 DQA10201-DQB10303 DQA10301-DQB10301 DQA10301-DQB10304 DQA10302-DQB10301 DQA10302-DQB10304 DQA10303-DQB10301 DQA10303-DQB10304 DQA10401-DQB10301 DQA10401-DQB10319 DQA10401-DQB10402 DQA10402-DQB10402 DQA10501-DQB10301 DQA10501-DQB10319 DQA10503-DQB10301 DQA10505-DQB10301 DQA10505-DQB10302 DQA10505-DQB10309 DQA10505-DQB10319 DQA10506-DQB10303 DQA10508-DQB10301 DQA10509-DQB10301 DQA10601-DQB10301
SQYALGIIQAQPDK

SEQ ID NO: 5472 - protein, 15 aa, Human immunodeficiency virus 1
  source 1..15: note = HLAs: DRB1_0101 DRB1_0102 DRB1_0401 DRB1_0404 DRB1_0405 DRB1_0408 DRB1_0410 DRB1_0813 DRB1_0901 DRB1_1001 DPA10301-DPB10101 DPA10401-DPB10101 DQA10101-DQB10601 DQA10102-DQB10501 DQA10102-DQB10503 DQA10102-DQB10601 DQA10102-DQB10602 DQA10102-DQB10609 DQA10102-DQB10610 DQA10102-DQB10611 DQA10103-DQB10501 DQA10103-DQB10601 DQA10103-DQB10602 DQA10103-DQB10609 DQA10201-DQB10301 DQA10201-DQB10302 DQA10201-DQB10303 DQA10301-DQB10301 DQA10301-DQB10304 DQA10302-DQB10301 DQA10302-DQB10304 DQA10303-DQB10301 DQA10303-DQB10304 DQA10401-DQB10301 DQA10401-DQB10319 DQA10501-DQB10203 DQA10501-DQB10301 DQA10501-DQB10319 DQA10503-DQB10301 DQA10505-DQB10301 DQA10505-DQB10302 DQA10505-DQB10309 DQA10505-DQB10319 DQA10505-DQB10402 DQA10506-DQB10303 DQA10508-DQB10301 DQA10509-DQB10301 DQA10601-DQB10301
SQYALGIIQAQPDKS

SEQ ID NO: 5473 - protein, 16 aa, Human immunodeficiency virus 1
  source 1..16: note = HLAs: DRB1_0101 DRB1_0401 DRB1_0404 DRB1_0405 DRB1_0408 DRB1_0410 DRB1_1001 DPA10301-DPB10101 DPA10401-DPB10101 DQA10101-DQB10601 DQA10102-DQB10501 DQA10102-DQB10503 DQA10102-DQB10601 DQA10102-DQB10602 DQA10102-DQB10604 DQA10102-DQB10609 DQA10102-DQB10611 DQA10103-DQB10501 DQA10103-DQB10601 DQA10103-DQB10602 DQA10103-DQB10609 DQA10201-DQB10301 DQA10201-DQB10302 DQA10201-DQB10303 DQA10301-DQB10301 DQA10301-DQB10303 DQA10301-DQB10304 DQA10302-DQB10301 DQA10302-DQB10303 DQA10302-DQB10304 DQA10303-DQB10301 DQA10303-DQB10303 DQA10303-DQB10304 DQA10401-DQB10301 DQA10401-DQB10319 DQA10401-DQB10402 DQA10402-DQB10402 DQA10501-DQB10203 DQA10501-DQB10301 DQA10501-DQB10319 DQA10503-DQB10301 DQA10505-DQB10301 DQA10505-DQB10302 DQA10505-DQB10309 DQA10505-DQB10319 DQA10505-DQB10402 DQA10506-DQB10303 DQA10508-DQB10301 DQA10509-DQB10301 DQA10601-DQB10301
SQYALGIIQAQPDKSE

SEQ ID NO: 5474 - protein, 17 aa, Human immunodeficiency virus 1
  source 1..17: note = HLAs: DRB1_0101 DRB1_0102 DRB1_0401 DRB1_0404 DRB1_0405 DRB1_0408 DRB1_0410 DRB1_1001 DPA10301-DPB10101 DPA10401-DPB10101 DQA10101-DQB10601 DQA10102-DQB10501 DQA10102-DQB10503 DQA10102-DQB10601 DQA10102-DQB10602 DQA10102-DQB10609 DQA10102-DQB10611 DQA10103-DQB10501 DQA10103-DQB10601 DQA10103-DQB10602 DQA10103-DQB10609 DQA10201-DQB10301 DQA10201-DQB10303 DQA10301-DQB10301 DQA10301-DQB10304 DQA10302-DQB10301 DQA10302-DQB10304 DQA10303-DQB10301 DQA10303-DQB10304 DQA10401-DQB10301 DQA10401-DQB10319 DQA10501-DQB10301 DQA10501-DQB10319 DQA10503-DQB10301 DQA10505-DQB10301 DQA10505-DQB10302 DQA10505-DQB10309 DQA10505-DQB10319 DQA10506-DQB10303 DQA10508-DQB10301 DQA10509-DQB10301 DQA10601-DQB10301
SQYALGIIQAQPDKSES

SEQ ID NO: 5475 - protein, 18 aa, Human immunodeficiency virus 1
  source 1..18: note = HLAs: DRB1_1001 DQA10102-DQB10501 DQA10102-DQB10503 DQA10102-DQB10601 DQA10102-DQB10602 DQA10102-DQB10609 DQA10102-DQB10611 DQA10103-DQB10601 DQA10201-DQB10301 DQA10301-DQB10301 DQA10302-DQB10301 DQA10303-DQB10301 DQA10401-DQB10301 DQA10401-DQB10319 DQA10501-DQB10301 DQA10501-DQB10319 DQA10503-DQB10301 DQA10505-DQB10301 DQA10505-DQB10309 DQA10505-DQB10319 DQA10508-DQB10301 DQA10509-DQB10301
SQYALGIIQAQPDKSESE

SEQ ID NO: 5476 - protein, 19 aa, Human immunodeficiency virus 1
  source 1..19: note = HLAs: DRB1_0101 DRB1_0405 DRB1_0408 DRB1_0410 DRB1_1001 DPA10301-DPB10101 DPA10401-DPB10101 DQA10102-DQB10501 DQA10102-DQB10503 DQA10102-DQB10601 DQA10102-DQB10602 DQA10102-DQB10609 DQA10102-DQB10611 DQA10103-DQB10501 DQA10103-DQB10601 DQA10103-DQB10609 DQA10201-DQB10301 DQA10201-DQB10303 DQA10301-DQB10301 DQA10302-DQB10301 DQA10303-DQB10301 DQA10401-DQB10301 DQA10401-DQB10319 DQA10501-DQB10301 DQA10501-DQB10319 DQA10503-DQB10301 DQA10505-DQB10301 DQA10505-DQB10302 DQA10505-DQB10309 DQA10505-DQB10319 DQA10506-DQB10303 DQA10508-DQB10301 DQA10509-DQB10301 DQA10601-DQB10301
SQYALGIIQAQPDKSESEL

SEQ ID NO: 5477 - protein, 20 aa, Human immunodeficiency virus 1
  source 1..20: note = HLAs: DRB1_0101 DRB1_0401 DRB1_0404 DRB1_0405 DRB1_0408 DRB1_0410 DRB1_0813 DRB1_1001 DPA10103-DPB15001 DPA10105-DPB15001 DPA10301-DPB10101 DPA10301-DPB110601 DPA10301-DPB11801 DPA10301-DPB16501 DPA10401-DPB10101 DQA10102-DQB10501 DQA10102-DQB10503 DQA10102-DQB10601 DQA10102-DQB10602 DQA10102-DQB10609 DQA10102-DQB10611 DQA10103-DQB10501 DQA10103-DQB10601 DQA10103-DQB10602 DQA10103-DQB10609 DQA10201-DQB10301 DQA10201-DQB10303 DQA10301-DQB10301 DQA10302-DQB10301 DQA10303-DQB10301 DQA10401-DQB10301 DQA10401-DQB10319 DQA10501-DQB10301 DQA10501-DQB10319 DQA10503-DQB10301 DQA10505-DQB10301 DQA10505-DQB10309 DQA10505-DQB10319 DQA10505-DQB10402 DQA10506-DQB10303 DQA10508-DQB10301 DQA10509-DQB10301 DQA10601-DQB10301
SQYALGIIQAQPDKSESELV

SEQ ID NO: 5478 - protein, 13 aa, Human immunodeficiency virus 1
  source 1..13: note = HLAs: DPA10103-DPB11501 DPA10104-DPB11501 DPA10201-DPB11501 DPA10301-DPB10101 DPA10301-DPB10201 DPA10301-DPB10202 DPA10301-DPB10401 DPA10301-DPB11801 DPA10301-DPB12301 DPA10301-DPB13901 DPA10301-DPB14001
SSGIRKVLFLDGI

SEQ ID NO: 5479 - protein, 13 aa, Human immunodeficiency virus 1
  source 1..13: note = HLAs: DRB1_0405 DPA10103-DPB11501 DPA10104-DPB11501
STKWRKLVDFREL

SEQ ID NO: 5480 - protein, 14 aa, Human immunodeficiency virus 1
  source 1..14: note = HLAs: DRB1_0405 DPA10103-DPB10101 DPA10103-DPB11501 DPA10103-DPB11601 DPA10103-DPB11901 DPA10103-DPB13101 DPA10103-DPB15001 DPA10104-DPB10101 DPA10104-DPB11501 DPA10105-DPB10101 DPA10105-DPB15001 DPA10201-DPB11501 DPA10202-DPB10101 DPA10202-DPB110601 DPA10202-DPB11901 DPA10202-DPB13101 DPA10301-DPB10101 DPA10301-DPB10201 DPA10301-DPB10202 DPA10301-DPB10401 DPA10301-DPB110601 DPA10301-DPB11801 DPA10301-DPB12301 DPA10301-DPB13901 DPA10301-DPB14001 DPA10301-DPB16501 DPA10401-DPB10101 DPA10401-DPB10201 DPA10401-DPB10202 DPA10401-DPB10501
STKWRKLVDFRELN

SEQ ID NO: 5481 - protein, 15 aa, Human immunodeficiency virus 1
  source 1..15: note = HLAs: DRB1_0101 DRB1_0405 DRB1_0408 DRB1_0410 DRB1_0806 DRB1_1001 DRB1_1304 DPA10103-DPB10101 DPA10103-DPB10201 DPA10103-DPB10202 DPA10103-DPB10501 DPA10103-DPB11501 DPA10103-DPB11601 DPA10103-DPB11901 DPA10103-DPB13101 DPA10103-DPB13401 DPA10103-DPB14001 DPA10103-DPB14101 DPA10103-DPB14801 DPA10103-DPB15001 DPA10103-DPB15501 DPA10104-DPB10101 DPA10104-DPB11501 DPA10105-DPB10101 DPA10105-DPB15001 DPA10106-DPB10101 DPA10201-DPB10101 DPA10201-DPB110601 DPA10201-DPB11501 DPA10201-DPB11601 DPA10201-DPB11901 DPA10202-DPB10101 DPA10202-DPB10201 DPA10202-DPB10202 DPA10202-DPB10501 DPA10202-DPB110601 DPA10202-DPB11901 DPA10202-DPB13101 DPA10202-DPB13801 DPA10202-DPB15501 DPA10202-DPB16501 DPA10301-DPB10101 DPA10301-DPB10201 DPA10301-DPB10202 DPA10301-DPB10401 DPA10301-DPB10402 DPA10301-DPB110501 DPA10301-DPB110601 DPA10301-DPB11801 DPA10301-DPB12301 DPA10301-DPB13901 DPA10301-DPB14001 DPA10301-DPB14901 DPA10301-DPB15501 DPA10301-DPB16501 DPA10301-DPB18001 DPA10401-DPB10101 DPA10401-DPB10201; note = HLAs: DPA10401-DPB10202 DPA10401-DPB10501
STKWRKLVDFRELNK

SEQ ID NO: 5482 - protein, 16 aa, Human immunodeficiency virus 1
  source 1..16: note = HLAs: DRB1_0405 DRB1_0410 DRB1_1001 DRB1_1304 DPA10103-DPB10101 DPA10103-DPB10201 DPA10103-DPB10202 DPA10103-DPB10501 DPA10103-DPB11501 DPA10103-DPB11601 DPA10103-DPB11901 DPA10103-DPB13101 DPA10103-DPB13401 DPA10103-DPB14001 DPA10103-DPB14101 DPA10103-DPB14801 DPA10103-DPB15001 DPA10103-DPB15501 DPA10104-DPB10101 DPA10104-DPB11501 DPA10105-DPB10101 DPA10105-DPB15001 DPA10106-DPB10101 DPA10201-DPB10101 DPA10201-DPB110601 DPA10201-DPB11501 DPA10201-DPB11601 DPA10201-DPB11901 DPA10202-DPB10101 DPA10202-DPB10201 DPA10202-DPB10202 DPA10202-DPB10501 DPA10202-DPB110601 DPA10202-DPB11101 DPA10202-DPB11901 DPA10202-DPB13101 DPA10202-DPB13801 DPA10202-DPB15501 DPA10202-DPB16501 DPA10301-DPB10101 DPA10301-DPB10201 DPA10301-DPB10202 DPA10301-DPB10401 DPA10301-DPB110601 DPA10301-DPB11801 DPA10301-DPB12301 DPA10301-DPB13901 DPA10301-DPB14001 DPA10301-DPB15501 DPA10301-DPB16501 DPA10401-DPB10101 DPA10401-DPB10201 DPA10401-DPB10202 DPA10401-DPB10501
STKWRKLVDFRELNKR

SEQ ID NO: 5483 - protein, 17 aa, Human immunodeficiency virus 1
  source 1..17: note = HLAs: DRB1_0405 DRB1_0410 DRB1_1001 DRB1_1304 DPA10103-DPB10101 DPA10103-DPB10201 DPA10103-DPB10202 DPA10103-DPB10501 DPA10103-DPB11501 DPA10103-DPB11601 DPA10103-DPB11901 DPA10103-DPB13101 DPA10103-DPB13401 DPA10103-DPB14001 DPA10103-DPB14101 DPA10103-DPB14801 DPA10103-DPB15001 DPA10104-DPB10101 DPA10104-DPB11501 DPA10105-DPB10101 DPA10105-DPB15001 DPA10106-DPB10101 DPA10201-DPB10101 DPA10201-DPB10501 DPA10201-DPB110601 DPA10201-DPB11501 DPA10201-DPB11601 DPA10201-DPB11901 DPA10201-DPB13401 DPA10202-DPB10101 DPA10202-DPB10201 DPA10202-DPB10202 DPA10202-DPB10501 DPA10202-DPB110601 DPA10202-DPB11901 DPA10202-DPB13101 DPA10202-DPB13801 DPA10202-DPB15501 DPA10202-DPB16501 DPA10301-DPB10101 DPA10301-DPB10201 DPA10301-DPB10202 DPA10301-DPB10401 DPA10301-DPB110601 DPA10301-DPB11801 DPA10301-DPB12301 DPA10301-DPB13901 DPA10301-DPB14001 DPA10301-DPB15501 DPA10301-DPB16501 DPA10401-DPB10101 DPA10401-DPB10201 DPA10401-DPB10202 DPA10401-DPB10501
STKWRKLVDFRELNKRT

SEQ ID NO: 5484 - protein, 18 aa, Human immunodeficiency virus 1
  source 1..18: note = HLAs: DPA10103-DPB10101 DPA10103-DPB11501 DPA10103-DPB11601 DPA10103-DPB11901 DPA10103-DPB13101 DPA10104-DPB10101 DPA10104-DPB11501 DPA10105-DPB10101 DPA10201-DPB11501 DPA10201-DPB11601 DPA10202-DPB10101 DPA10202-DPB110601 DPA10202-DPB11901 DPA10202-DPB13101 DPA10301-DPB10101 DPA10301-DPB10201 DPA10301-DPB10202 DPA10301-DPB10401 DPA10301-DPB110601 DPA10301-DPB11801 DPA10301-DPB12301 DPA10301-DPB13901 DPA10301-DPB14001 DPA10301-DPB16501 DPA10401-DPB10101 DPA10401-DPB10201 DPA10401-DPB10202 DPA10401-DPB10501
STKWRKLVDFRELNKRTQ

SEQ ID NO: 5485 - protein, 19 aa, Human immunodeficiency virus 1
  source 1..19: note = HLAs: DRB1_0405 DRB1_0410 DRB1_0806 DRB1_1001 DRB1_1101 DRB1_1103 DRB1_1104 DRB1_1304 DRB1_1305 DPA10103-DPB10101 DPA10103-DPB10201 DPA10103-DPB10202 DPA10103-DPB10501 DPA10103-DPB11501 DPA10103-DPB11601 DPA10103-DPB11901 DPA10103-DPB13101 DPA10103-DPB13401 DPA10103-DPB14001 DPA10103-DPB14101 DPA10103-DPB14801 DPA10103-DPB15001 DPA10104-DPB10101 DPA10104-DPB11501 DPA10105-DPB10101 DPA10105-DPB15001 DPA10106-DPB10101 DPA10201-DPB10101 DPA10201-DPB110601 DPA10201-DPB11501 DPA10201-DPB11601 DPA10201-DPB11901 DPA10202-DPB10101 DPA10202-DPB10501 DPA10202-DPB110601 DPA10202-DPB11901 DPA10202-DPB13101 DPA10202-DPB13801 DPA10202-DPB16501 DPA10301-DPB10101 DPA10301-DPB10201 DPA10301-DPB10202 DPA10301-DPB10401 DPA10301-DPB110601 DPA10301-DPB11801 DPA10301-DPB12301 DPA10301-DPB13901 DPA10301-DPB14001 DPA10301-DPB15501 DPA10301-DPB16501 DPA10401-DPB10101 DPA10401-DPB10201 DPA10401-DPB10202 DPA10401-DPB10501
STKWRKLVDFRELNKRTQD

SEQ ID NO: 5486 - protein, 20 aa, Human immunodeficiency virus 1
  source 1..20: note = HLAs: DRB1_0405 DRB1_0410 DRB1_0801 DRB1_0804 DRB1_0806 DRB1_1001 DRB1_1101 DRB1_1103 DRB1_1104 DRB1_1304 DRB1_1305 DPA10103-DPB10101 DPA10103-DPB10201 DPA10103-DPB10202 DPA10103-DPB10501 DPA10103-DPB10601 DPA10103-DPB11101 DPA10103-DPB11501 DPA10103-DPB11601 DPA10103-DPB11901 DPA10103-DPB13101 DPA10103-DPB13401 DPA10103-DPB14001 DPA10103-DPB14101 DPA10103-DPB14801 DPA10103-DPB15001 DPA10103-DPB15501 DPA10104-DPB10101 DPA10104-DPB11501 DPA10105-DPB10101 DPA10105-DPB15001 DPA10106-DPB10101 DPA10201-DPB10101 DPA10201-DPB10501 DPA10201-DPB110601 DPA10201-DPB11501 DPA10201-DPB11601 DPA10201-DPB11901 DPA10202-DPB10101 DPA10202-DPB10201 DPA10202-DPB10202 DPA10202-DPB10501 DPA10202-DPB110601 DPA10202-DPB11801 DPA10202-DPB11901 DPA10202-DPB13101 DPA10202-DPB13801 DPA10202-DPB15501 DPA10202-DPB16501 DPA10301-DPB10101 DPA10301-DPB10201 DPA10301-DPB10202 DPA10301-DPB10401 DPA10301-DPB10402 DPA10301-DPB110501 DPA10301-DPB110601 DPA10301-DPB11101 DPA10301-DPB11801 DPA10301-DPB12301; note = HLAs: DPA10301-DPB13901 DPA10301-DPB14001 DPA10301-DPB14901 DPA10301-DPB15501 DPA10301-DPB16501 DPA10301-DPB18001 DPA10401-DPB10101 DPA10401-DPB10201 DPA10401-DPB10202 DPA10401-DPB10501 DQA10102-DQB10501
STKWRKLVDFRELNKRTQDF

SEQ ID NO: 5487 - protein, 21 aa, Human immunodeficiency virus 1
  source 1..21: note = HLAs: DRB1_0405 DRB1_0410 DRB1_0801 DRB1_0806 DRB1_1001 DRB1_1101 DRB1_1103 DRB1_1104 DRB1_1304 DRB1_1305 DPA10103-DPB10101 DPA10103-DPB10201 DPA10103-DPB10202 DPA10103-DPB10501 DPA10103-DPB11501 DPA10103-DPB11601 DPA10103-DPB11901 DPA10103-DPB13101 DPA10103-DPB13401 DPA10103-DPB14001 DPA10103-DPB14101 DPA10103-DPB14801 DPA10103-DPB15001 DPA10104-DPB10101 DPA10104-DPB11501 DPA10105-DPB10101 DPA10105-DPB15001 DPA10106-DPB10101 DPA10201-DPB10101 DPA10201-DPB110601 DPA10201-DPB11501 DPA10201-DPB11601 DPA10201-DPB11901 DPA10202-DPB10101 DPA10202-DPB10501 DPA10202-DPB110601 DPA10202-DPB11901 DPA10202-DPB13101 DPA10202-DPB13801 DPA10202-DPB16501 DPA10301-DPB10101 DPA10301-DPB10201 DPA10301-DPB10202 DPA10301-DPB10401 DPA10301-DPB110601 DPA10301-DPB11801 DPA10301-DPB12301 DPA10301-DPB13901 DPA10301-DPB14001 DPA10301-DPB16501 DPA10401-DPB10101 DPA10401-DPB10201 DPA10401-DPB10202 DPA10401-DPB10501
STKWRKLVDFRELNKRTQDFW

SEQ ID NO: 5488 - protein, 22 aa, Human immunodeficiency virus 1
  source 1..22: note = HLAs: DRB1_0405 DRB1_0410 DRB1_0801 DRB1_0806 DRB1_1001 DRB1_1101 DRB1_1103 DRB1_1104 DRB1_1304 DRB1_1305 DPA10103-DPB10101 DPA10103-DPB10201 DPA10103-DPB10202 DPA10103-DPB10501 DPA10103-DPB11501 DPA10103-DPB11601 DPA10103-DPB11901 DPA10103-DPB13101 DPA10103-DPB13401 DPA10103-DPB14001 DPA10103-DPB14101 DPA10103-DPB14801 DPA10103-DPB15001 DPA10104-DPB10101 DPA10104-DPB11501 DPA10105-DPB10101 DPA10105-DPB15001 DPA10106-DPB10101 DPA10201-DPB10101 DPA10201-DPB10501 DPA10201-DPB110601 DPA10201-DPB11501 DPA10201-DPB11601 DPA10201-DPB11901 DPA10202-DPB10101 DPA10202-DPB10501 DPA10202-DPB110601 DPA10202-DPB11901 DPA10202-DPB13101 DPA10202-DPB13801 DPA10202-DPB16501 DPA10301-DPB10101 DPA10301-DPB10201 DPA10301-DPB10202 DPA10301-DPB10401 DPA10301-DPB110601 DPA10301-DPB11801 DPA10301-DPB12301 DPA10301-DPB13901 DPA10301-DPB14001 DPA10301-DPB16501 DPA10401-DPB10101 DPA10401-DPB10201 DPA10401-DPB10202 DPA10401-DPB10501
STKWRKLVDFRELNKRTQDFWE

SEQ ID NO: 5489 - protein, 23 aa, Human immunodeficiency virus 1
  source 1..23: note = HLAs: DRB1_0405 DRB1_0410 DRB1_0801 DRB1_0806 DRB1_1001 DRB1_1101 DRB1_1103 DRB1_1104 DRB1_1304 DRB1_1305 DPA10103-DPB10101 DPA10103-DPB10201 DPA10103-DPB10202 DPA10103-DPB10501 DPA10103-DPB11501 DPA10103-DPB11601 DPA10103-DPB11901 DPA10103-DPB13101 DPA10103-DPB13401 DPA10103-DPB14001 DPA10103-DPB14101 DPA10103-DPB14801 DPA10103-DPB15001 DPA10104-DPB10101 DPA10104-DPB11501 DPA10105-DPB10101 DPA10105-DPB15001 DPA10106-DPB10101 DPA10201-DPB10101 DPA10201-DPB10501 DPA10201-DPB110601 DPA10201-DPB11501 DPA10201-DPB11601 DPA10201-DPB11901 DPA10202-DPB10101 DPA10202-DPB10501 DPA10202-DPB110601 DPA10202-DPB11901 DPA10202-DPB13101 DPA10202-DPB13801 DPA10202-DPB16501 DPA10301-DPB10101 DPA10301-DPB10201 DPA10301-DPB10202 DPA10301-DPB10401 DPA10301-DPB110601 DPA10301-DPB11801 DPA10301-DPB12301 DPA10301-DPB13901 DPA10301-DPB14001 DPA10301-DPB16501 DPA10401-DPB10101 DPA10401-DPB10201 DPA10401-DPB10202 DPA10401-DPB10501
STKWRKLVDFRELNKRTQDFWEV

SEQ ID NO: 5490 - protein, 24 aa, Human immunodeficiency virus 1
  source 1..24: note = HLAs: DRB1_0405 DRB1_0410 DRB1_0801 DRB1_0806 DRB1_1001 DRB1_1101 DRB1_1103 DRB1_1104 DRB1_1304 DRB1_1305 DPA10103-DPB10101 DPA10103-DPB10201 DPA10103-DPB10202 DPA10103-DPB10501 DPA10103-DPB11501 DPA10103-DPB11601 DPA10103-DPB11901 DPA10103-DPB13101 DPA10103-DPB13401 DPA10103-DPB14001 DPA10103-DPB14101 DPA10103-DPB14801 DPA10103-DPB15001 DPA10104-DPB10101 DPA10104-DPB11501 DPA10105-DPB10101 DPA10105-DPB15001 DPA10106-DPB10101 DPA10201-DPB10101 DPA10201-DPB10501 DPA10201-DPB110601 DPA10201-DPB11501 DPA10201-DPB11601 DPA10201-DPB11901 DPA10202-DPB10101 DPA10202-DPB10501 DPA10202-DPB110601 DPA10202-DPB11901 DPA10202-DPB13101 DPA10202-DPB13801 DPA10202-DPB16501 DPA10301-DPB10101 DPA10301-DPB10201 DPA10301-DPB10202 DPA10301-DPB10401 DPA10301-DPB10402 DPA10301-DPB110501 DPA10301-DPB110601 DPA10301-DPB11801 DPA10301-DPB12301 DPA10301-DPB13901 DPA10301-DPB14001 DPA10301-DPB14901 DPA10301-DPB15501 DPA10301-DPB16501 DPA10301-DPB18001 DPA10401-DPB10101 DPA10401-DPB10201 DPA10401-DPB10202; note = HLAs: DPA10401-DPB10501
STKWRKLVDFRELNKRTQDFWEVQ

SEQ ID NO: 5491 - protein, 25 aa, Human immunodeficiency virus 1
  source 1..25: note = HLAs: DRB1_0405 DRB1_0410 DRB1_0801 DRB1_0806 DRB1_1001 DRB1_1101 DRB1_1103 DRB1_1104 DRB1_1304 DRB1_1305 DPA10103-DPB10101 DPA10103-DPB10201 DPA10103-DPB10202 DPA10103-DPB10501 DPA10103-DPB11501 DPA10103-DPB11601 DPA10103-DPB11901 DPA10103-DPB13101 DPA10103-DPB13401 DPA10103-DPB14001 DPA10103-DPB14101 DPA10103-DPB14801 DPA10103-DPB15001 DPA10104-DPB10101 DPA10104-DPB11501 DPA10105-DPB10101 DPA10105-DPB15001 DPA10106-DPB10101 DPA10201-DPB10101 DPA10201-DPB10501 DPA10201-DPB110601 DPA10201-DPB11501 DPA10201-DPB11601 DPA10201-DPB11901 DPA10202-DPB10101 DPA10202-DPB10202 DPA10202-DPB10501 DPA10202-DPB110601 DPA10202-DPB11901 DPA10202-DPB13101 DPA10202-DPB13801 DPA10202-DPB16501 DPA10301-DPB10101 DPA10301-DPB10201 DPA10301-DPB10202 DPA10301-DPB10401 DPA10301-DPB10402 DPA10301-DPB110501 DPA10301-DPB110601 DPA10301-DPB11801 DPA10301-DPB12301 DPA10301-DPB13901 DPA10301-DPB14001 DPA10301-DPB14901 DPA10301-DPB15501 DPA10301-DPB16501 DPA10301-DPB18001 DPA10401-DPB10101 DPA10401-DPB10201; note = HLAs: DPA10401-DPB10202 DPA10401-DPB10501 DQA10102-DQB10501
STKWRKLVDFRELNKRTQDFWEVQL

SEQ ID NO: 5492 - protein, 13 aa, Human immunodeficiency virus 1
  source 1..13: note = HLAs: DQA10102-DQB10501 DQA10501-DQB10201 DQA10505-DQB10201 DQA10505-DQB10202
SVTVLDVGDAYFS

SEQ ID NO: 5493 - protein, 14 aa, Human immunodeficiency virus 1
  source 1..14: note = HLAs: DQA10102-DQB10501 DQA10102-DQB10609 DQA10201-DQB10301 DQA10501-DQB10201 DQA10505-DQB10201 DQA10505-DQB10202
SVTVLDVGDAYFSV

SEQ ID NO: 5494 - protein, 15 aa, Human immunodeficiency virus 1
  source 1..15: note = HLAs: DRB1_0101 DRB1_0301 DRB1_1001 DQA10102-DQB10501 DQA10102-DQB10503 DQA10102-DQB10604 DQA10102-DQB10609 DQA10103-DQB10501 DQA10103-DQB10609 DQA10201-DQB10301 DQA10501-DQB10201 DQA10501-DQB10203 DQA10501-DQB10301 DQA10501-DQB10319 DQA10503-DQB10301 DQA10505-DQB10201 DQA10505-DQB10202 DQA10505-DQB10301 DQA10505-DQB10309 DQA10505-DQB10319 DQA10508-DQB10301 DQA10509-DQB10301
SVTVLDVGDAYFSVP

SEQ ID NO: 5495 - protein, 16 aa, Human immunodeficiency virus 1
  source 1..16: note = HLAs: DPA10301-DPB10101 DPA10301-DPB10201 DPA10301-DPB10202 DPA10401-DPB10101 DQA10101-DQB10501 DQA10102-DQB10501 DQA10102-DQB10503 DQA10102-DQB10604 DQA10102-DQB10609 DQA10103-DQB10501 DQA10103-DQB10609 DQA10104-DQB10501 DQA10105-DQB10501 DQA10201-DQB10301 DQA10501-DQB10201 DQA10501-DQB10301 DQA10501-DQB10319 DQA10503-DQB10301 DQA10505-DQB10201 DQA10505-DQB10202 DQA10505-DQB10301 DQA10505-DQB10309 DQA10505-DQB10319 DQA10508-DQB10301 DQA10509-DQB10301
SVTVLDVGDAYFSVPL

SEQ ID NO: 5496 - protein, 17 aa, Human immunodeficiency virus 1
  source 1..17: note = HLAs: DPA10301-DPB10101 DQA10101-DQB10501 DQA10102-DQB10501 DQA10102-DQB10503 DQA10102-DQB10604 DQA10102-DQB10609 DQA10103-DQB10501 DQA10103-DQB10609 DQA10104-DQB10501 DQA10105-DQB10501 DQA10201-DQB10301 DQA10501-DQB10201 DQA10505-DQB10201 DQA10505-DQB10202
SVTVLDVGDAYFSVPLD

SEQ ID NO: 5497 - protein, 18 aa, Human immunodeficiency virus 1
  source 1..18: note = HLAs: DQA10102-DQB10501 DQA10102-DQB10503 DQA10102-DQB10609
SVTVLDVGDAYFSVPLDK

SEQ ID NO: 5498 - protein, 13 aa, Human immunodeficiency virus 1
  source 1..13: note = HLAs: DRB1_1114 DRB1_1302
SWTVNDIQKLVGK

SEQ ID NO: 5499 - protein, 14 aa, Human immunodeficiency virus 1
  source 1..14: note = HLAs: DRB1_1114 DRB1_1302
SWTVNDIQKLVGKL

SEQ ID NO: 5500 - protein, 15 aa, Human immunodeficiency virus 1
  source 1..15: note = HLAs: DRB1_0101 DRB1_0102 DRB1_0804 DRB1_0806 DRB1_1001 DRB1_1101 DRB1_1102 DRB1_1103 DRB1_1104 DRB1_1114 DRB1_1301 DRB1_1302 DRB1_1304 DRB1_1305 DRB1_1402 DRB1_1406 DPA10301-DPB10201 DQA10102-DQB10501
SWTVNDIQKLVGKLN

SEQ ID NO: 5501 - protein, 16 aa, Human immunodeficiency virus 1
  source 1..16: note = HLAs: DRB1_0101 DRB1_0102 DRB1_1001 DRB1_1104 DRB1_1114 DRB1_1302 DRB1_1406 DPA10301-DPB10201 DQA10102-DQB10501
SWTVNDIQKLVGKLNW

SEQ ID NO: 5502 - protein, 17 aa, Human immunodeficiency virus 1
  source 1..17: note = HLAs: DRB1_0101 DRB1_0102 DRB1_0804 DRB1_0806 DRB1_1001 DRB1_1101 DRB1_1102 DRB1_1103 DRB1_1104 DRB1_1114 DRB1_1301 DRB1_1302 DRB1_1304 DRB1_1305 DRB1_1406 DQA10102-DQB10501
SWTVNDIQKLVGKLNWA

SEQ ID NO: 5503 - protein, 18 aa, Human immunodeficiency virus 1
  source 1..18: note = HLAs: DRB1_0101
SWTVNDIQKLVGKLNWAS

SEQ ID NO: 5504 - protein, 19 aa, Human immunodeficiency virus 1
  source 1..19: note = HLAs: DRB1_0101 DRB1_0102 DRB1_0804 DRB1_0806 DRB1_1001 DRB1_1103 DRB1_1104 DRB1_1114 DRB1_1302 DRB1_1304 DRB1_1406 DPA10301-DPB10201 DPA10301-DPB10202 DQA10102-DQB10501
SWTVNDIQKLVGKLNWASQ

SEQ ID NO: 5505 - protein, 20 aa, Human immunodeficiency virus 1
  source 1..20: note = HLAs: DRB1_0101 DRB1_0102 DRB1_0801 DRB1_0802 DRB1_0804 DRB1_0806 DRB1_0809 DRB1_0813 DRB1_1001 DRB1_1101 DRB1_1102 DRB1_1103 DRB1_1104 DRB1_1114 DRB1_1301 DRB1_1302 DRB1_1304 DRB1_1305 DRB1_1402 DRB1_1406 DRB1_1501 DRB1_1502 DRB1_1503 DRB1_1601 DRB1_1602 DPA10202-DPB10101 DPA10202-DPB110601 DPA10202-DPB11901 DPA10301-DPB10101 DPA10301-DPB10201 DPA10301-DPB10202 DPA10301-DPB110601 DPA10301-DPB11801 DPA10301-DPB14001 DPA10401-DPB10101 DPA10401-DPB10201 DPA10401-DPB10202 DPA10401-DPB10501 DQA10102-DQB10501 DQA10103-DQB10501
SWTVNDIQKLVGKLNWASQI

SEQ ID NO: 5506 - protein, 21 aa, Human immunodeficiency virus 1
  source 1..21: note = HLAs: DRB1_0101 DRB1_0102 DRB1_0801 DRB1_0804 DRB1_0806 DRB1_0813 DRB1_1001 DRB1_1101 DRB1_1102 DRB1_1103 DRB1_1104 DRB1_1114 DRB1_1301 DRB1_1302 DRB1_1304 DRB1_1305 DRB1_1406 DRB1_1501 DPA10301-DPB10101 DPA10301-DPB10201 DPA10301-DPB10202 DPA10301-DPB11801 DPA10401-DPB10101 DQA10102-DQB10501 DQA10103-DQB10501
SWTVNDIQKLVGKLNWASQIY

SEQ ID NO: 5507 - protein, 22 aa, Human immunodeficiency virus 1
  source 1..22: note = HLAs: DRB1_0101 DRB1_0102 DRB1_0801 DRB1_0802 DRB1_0804 DRB1_0806 DRB1_0809 DRB1_0813 DRB1_1001 DRB1_1101 DRB1_1102 DRB1_1103 DRB1_1104 DRB1_1114 DRB1_1301 DRB1_1302 DRB1_1304 DRB1_1305 DRB1_1406 DRB1_1501 DPA10301-DPB10101 DPA10301-DPB10201 DPA10301-DPB10202 DPA10301-DPB11801 DPA10401-DPB10101 DQA10102-DQB10501 DQA10103-DQB10501
SWTVNDIQKLVGKLNWASQIYP

SEQ ID NO: 5508 - protein, 23 aa, Human immunodeficiency virus 1
  source 1..23: note = HLAs: DRB1_0101 DRB1_0102 DRB1_0404 DRB1_0410 DRB1_0801 DRB1_0802 DRB1_0804 DRB1_0806 DRB1_0809 DRB1_0813 DRB1_1001 DRB1_1101 DRB1_1102 DRB1_1103 DRB1_1104 DRB1_1114 DRB1_1301 DRB1_1302 DRB1_1304 DRB1_1305 DRB1_1406 DRB1_1501 DPA10301-DPB10101 DPA10301-DPB10201 DPA10301-DPB10202 DPA10301-DPB110601 DPA10301-DPB11801 DPA10401-DPB10101 DQA10102-DQB10501 DQA10102-DQB10503 DQA10102-DQB10601 DQA10102-DQB10602 DQA10102-DQB10609 DQA10102-DQB10611 DQA10103-DQB10501 DQA10103-DQB10601 DQA10103-DQB10602 DQA10103-DQB10609 DQA10201-DQB10301
SWTVNDIQKLVGKLNWASQIYPG

SEQ ID NO: 5509 - protein, 24 aa, Human immunodeficiency virus 1
  source 1..24: note = HLAs: DRB1_0101 DRB1_0102 DRB1_0404 DRB1_0410 DRB1_0801 DRB1_0802 DRB1_0804 DRB1_0806 DRB1_0809 DRB1_0813 DRB1_1001 DRB1_1101 DRB1_1102 DRB1_1103 DRB1_1104 DRB1_1114 DRB1_1301 DRB1_1302 DRB1_1304 DRB1_1305 DRB1_1402 DRB1_1406 DRB1_1501 DRB1_1601 DRB1_1602 DPA10103-DPB11501 DPA10104-DPB11501 DPA10202-DPB10101 DPA10301-DPB10101 DPA10301-DPB10201 DPA10301-DPB10202 DPA10301-DPB110601 DPA10301-DPB11801 DPA10301-DPB14001 DPA10401-DPB10101 DPA10401-DPB10201 DPA10401-DPB10202 DQA10101-DQB10601 DQA10102-DQB10501 DQA10102-DQB10503 DQA10102-DQB10601 DQA10102-DQB10602 DQA10102-DQB10609 DQA10102-DQB10610 DQA10102-DQB10611 DQA10103-DQB10501 DQA10103-DQB10601 DQA10103-DQB10602 DQA10103-DQB10609 DQA10201-DQB10301
SWTVNDIQKLVGKLNWASQIYPGI

SEQ ID NO: 5510 - protein, 15 aa, Human immunodeficiency virus 1
  source 1..15: note = HLAs: DRB1_1101 DRB1_1305
SWVPAHKGIGGNEQV

SEQ ID NO: 5511 - protein, 25 aa, Human immunodeficiency virus 1
  source 1..25: note = HLAs: DRB1_0101
SWVPAHKGIGGNEQVDKLVSSGIRK

SEQ ID NO: 5512 - protein, 24 aa, Human immunodeficiency virus 1
  source 1..24: note = HLAs: DRB1_0404 DRB1_0408 DRB1_0410 DRB1_1001 DQA10102-DQB10501
TAFTIPSINNETPGIRYQYNVLPQ

SEQ ID NO: 5513 - protein, 25 aa, Human immunodeficiency virus 1
  source 1..25: note = HLAs: DRB1_0101 DRB1_0401 DRB1_0404 DRB1_0405 DRB1_0408 DRB1_0410 DRB1_0813 DRB1_1001 DRB1_1114 DRB1_1302 DRB1_1406 DRB1_1501 DRB1_1602 DPA10401-DPB10101 DQA10102-DQB10501
TAFTIPSINNETPGIRYQYNVLPQG

SEQ ID NO: 5514 - protein, 13 aa, Human immunodeficiency virus 1
  source 1..13: note = HLAs: DPA10103-DPB10101 DPA10103-DPB10201 DPA10103-DPB10202 DPA10103-DPB11501 DPA10103-DPB14801 DPA10104-DPB10101 DPA10104-DPB11501 DPA10105-DPB10101 DPA10201-DPB11501 DPA10202-DPB10101 DPA10301-DPB10101 DPA10301-DPB10201 DPA10301-DPB10202 DPA10301-DPB10401 DPA10301-DPB110601 DPA10301-DPB11801 DPA10301-DPB12301 DPA10301-DPB13901 DPA10301-DPB14001 DPA10301-DPB16501 DPA10401-DPB10101 DPA10401-DPB10201 DPA10401-DPB10202 DQA10102-DQB10501
TAVQMAVFIHNFK

SEQ ID NO: 5515 - protein, 14 aa, Human immunodeficiency virus 1
  source 1..14: note = HLAs: DRB1_1001 DRB1_1104 DPA10103-DPB10101 DPA10103-DPB10201 DPA10103-DPB10202 DPA10103-DPB10401 DPA10103-DPB10501 DPA10103-DPB112601 DPA10103-DPB11501 DPA10103-DPB11601 DPA10103-DPB11801 DPA10103-DPB11901 DPA10103-DPB12301 DPA10103-DPB13101 DPA10103-DPB13401 DPA10103-DPB13901 DPA10103-DPB14001 DPA10103-DPB14101 DPA10103-DPB14801 DPA10103-DPB15001 DPA10104-DPB10101 DPA10104-DPB11501 DPA10105-DPB10101 DPA10105-DPB10401 DPA10105-DPB11801 DPA10105-DPB15001 DPA10106-DPB10101 DPA10201-DPB10101 DPA10201-DPB10202 DPA10201-DPB110601 DPA10201-DPB11501 DPA10201-DPB11601 DPA10201-DPB11901 DPA10202-DPB10101 DPA10202-DPB10201 DPA10202-DPB10202 DPA10202-DPB10501 DPA10202-DPB110601 DPA10202-DPB11801 DPA10202-DPB11901 DPA10202-DPB13101 DPA10202-DPB13801 DPA10202-DPB16501 DPA10301-DPB10101 DPA10301-DPB10201 DPA10301-DPB10202 DPA10301-DPB10401 DPA10301-DPB10402 DPA10301-DPB110501 DPA10301-DPB110601 DPA10301-DPB11801 DPA10301-DPB12301 DPA10301-DPB13901 DPA10301-DPB14001 DPA10301-DPB14901; note = HLAs: DPA10301-DPB15501 DPA10301-DPB16501 DPA10301-DPB17501 DPA10301-DPB18001 DPA10401-DPB10101 DPA10401-DPB10201 DPA10401-DPB10202 DPA10401-DPB10501 DQA10102-DQB10501 DQA10102-DQB10609 DQA10103-DQB10501
TAVQMAVFIHNFKR

SEQ ID NO: 5516 - protein, 15 aa, Human immunodeficiency virus 1
  source 1..15: note = HLAs: DRB1_0101 DRB1_0102 DRB1_0404 DRB1_0410 DRB1_0701 DRB1_0801 DRB1_0804 DRB1_0806 DRB1_1001 DRB1_1101 DRB1_1102 DRB1_1103 DRB1_1104 DRB1_1202 DRB1_1301 DRB1_1304 DRB1_1305 DRB1_1406 DRB1_1501 DRB1_1503 DRB1_1601 DRB1_1602 DPA10103-DPB10101 DPA10103-DPB10201 DPA10103-DPB10202 DPA10103-DPB10401 DPA10103-DPB10402 DPA10103-DPB10501 DPA10103-DPB110501 DPA10103-DPB11101 DPA10103-DPB112601 DPA10103-DPB11501 DPA10103-DPB11601 DPA10103-DPB11801 DPA10103-DPB11901 DPA10103-DPB12301 DPA10103-DPB13101 DPA10103-DPB13401 DPA10103-DPB13901 DPA10103-DPB14001 DPA10103-DPB14101 DPA10103-DPB14801 DPA10103-DPB14901 DPA10103-DPB15001 DPA10103-DPB15101 DPA10103-DPB15501 DPA10103-DPB15901 DPA10103-DPB18001 DPA10104-DPB10101 DPA10104-DPB11501 DPA10105-DPB10101 DPA10105-DPB10401 DPA10105-DPB11801 DPA10105-DPB15001 DPA10106-DPB10101 DPA10201-DPB10101 DPA10201-DPB10201 DPA10201-DPB10202 DPA10201-DPB10501 DPA10201-DPB110601 DPA10201-DPB11501 DPA10201-DPB11601 DPA10201-DPB11801 DPA10201-DPB11901; note = HLAs: DPA10201-DPB13401 DPA10202-DPB10101 DPA10202-DPB10201 DPA10202-DPB10202 DPA10202-DPB10401 DPA10202-DPB10402 DPA10202-DPB10501 DPA10202-DPB110001 DPA10202-DPB110501 DPA10202-DPB110601 DPA10202-DPB11101 DPA10202-DPB11301 DPA10202-DPB11801 DPA10202-DPB11901 DPA10202-DPB13101 DPA10202-DPB13801 DPA10202-DPB15501 DPA10202-DPB16501 DPA10301-DPB10101 DPA10301-DPB10201 DPA10301-DPB10202 DPA10301-DPB10401 DPA10301-DPB10402 DPA10301-DPB110501 DPA10301-DPB110601 DPA10301-DPB11101 DPA10301-DPB11301 DPA10301-DPB11801 DPA10301-DPB12301 DPA10301-DPB13901 DPA10301-DPB14001 DPA10301-DPB14901 DPA10301-DPB15501 DPA10301-DPB16501 DPA10301-DPB17501 DPA10301-DPB18001 DPA10401-DPB10101 DPA10401-DPB10201 DPA10401-DPB10202 DPA10401-DPB10301 DPA10401-DPB10402 DPA10401-DPB10501 DPA10401-DPB110501 DPA10401-DPB11301 DPA10401-DPB113301 DPA10401-DPB11401 DPA10401-DPB14901 DQA10102-DQB10501 DQA10102-DQB10503 DQA10102-DQB10601 DQA10102-DQB10602 DQA10102-DQB10609 DQA10102-DQB10611 DQA10103-DQB10501; note = HLAs: DQA10103-DQB10601 DQA10103-DQB10602 DQA10103-DQB10609 DQA10505-DQB10402
TAVQMAVFIHNFKRK

SEQ ID NO: 5517 - protein, 16 aa, Human immunodeficiency virus 1
  source 1..16: note = HLAs: DRB1_0101 DRB1_0801 DRB1_0804 DRB1_0806 DRB1_1001 DRB1_1101 DRB1_1102 DRB1_1103 DRB1_1104 DRB1_1301 DRB1_1304 DRB1_1305 DRB1_1406 DRB1_1501 DRB1_1503 DRB1_1601 DRB1_1602 DPA10103-DPB10101 DPA10103-DPB10201 DPA10103-DPB10202 DPA10103-DPB10401 DPA10103-DPB10501 DPA10103-DPB11101 DPA10103-DPB112601 DPA10103-DPB11501 DPA10103-DPB11601 DPA10103-DPB11801 DPA10103-DPB11901 DPA10103-DPB12301 DPA10103-DPB13101 DPA10103-DPB13401 DPA10103-DPB13901 DPA10103-DPB14001 DPA10103-DPB14101 DPA10103-DPB14801 DPA10103-DPB15001 DPA10103-DPB15901 DPA10104-DPB10101 DPA10104-DPB11501 DPA10105-DPB10101 DPA10105-DPB10401 DPA10105-DPB11801 DPA10105-DPB15001 DPA10106-DPB10101 DPA10201-DPB10101 DPA10201-DPB10201 DPA10201-DPB10202 DPA10201-DPB10501 DPA10201-DPB110601 DPA10201-DPB11501 DPA10201-DPB11601 DPA10201-DPB11801 DPA10201-DPB11901 DPA10201-DPB13401 DPA10202-DPB10101 DPA10202-DPB10201 DPA10202-DPB10202 DPA10202-DPB10401 DPA10202-DPB10501 DPA10202-DPB110601 DPA10202-DPB11101 DPA10202-DPB11301; note = HLAs: DPA10202-DPB11801 DPA10202-DPB11901 DPA10202-DPB13101 DPA10202-DPB13801 DPA10202-DPB15501 DPA10202-DPB16501 DPA10301-DPB10101 DPA10301-DPB10201 DPA10301-DPB10202 DPA10301-DPB10401 DPA10301-DPB10402 DPA10301-DPB110501 DPA10301-DPB110601 DPA10301-DPB11101 DPA10301-DPB11801 DPA10301-DPB12301 DPA10301-DPB13901 DPA10301-DPB14001 DPA10301-DPB14901 DPA10301-DPB15501 DPA10301-DPB16501 DPA10301-DPB17501 DPA10301-DPB18001 DPA10401-DPB10101 DPA10401-DPB10201 DPA10401-DPB10202 DPA10401-DPB10301 DPA10401-DPB10402 DPA10401-DPB10501 DPA10401-DPB110501 DPA10401-DPB11301 DPA10401-DPB113301 DPA10401-DPB11401 DPA10401-DPB14901 DQA10102-DQB10501 DQA10102-DQB10503 DQA10102-DQB10601 DQA10102-DQB10602 DQA10102-DQB10609 DQA10102-DQB10611 DQA10103-DQB10501 DQA10103-DQB10601 DQA10103-DQB10609
TAVQMAVFIHNFKRKG

SEQ ID NO: 5518 - protein, 17 aa, Human immunodeficiency virus 1
  source 1..17: note = HLAs: DRB1_0101 DRB1_0801 DRB1_0802 DRB1_0804 DRB1_0806 DRB1_0809 DRB1_1001 DRB1_1101 DRB1_1102 DRB1_1103 DRB1_1104 DRB1_1301 DRB1_1304 DRB1_1305 DRB1_1406 DRB1_1501 DRB1_1503 DRB1_1601 DRB1_1602 DPA10103-DPB10101 DPA10103-DPB10201 DPA10103-DPB10202 DPA10103-DPB10401 DPA10103-DPB10501 DPA10103-DPB11101 DPA10103-DPB112601 DPA10103-DPB11501 DPA10103-DPB11601 DPA10103-DPB11801 DPA10103-DPB11901 DPA10103-DPB12301 DPA10103-DPB13101 DPA10103-DPB13401 DPA10103-DPB13901 DPA10103-DPB14001 DPA10103-DPB14101 DPA10103-DPB14801 DPA10103-DPB15001 DPA10103-DPB15901 DPA10104-DPB10101 DPA10104-DPB11501 DPA10105-DPB10101 DPA10105-DPB10401 DPA10105-DPB11801 DPA10105-DPB15001 DPA10106-DPB10101 DPA10201-DPB10101 DPA10201-DPB10201 DPA10201-DPB10202 DPA10201-DPB10501 DPA10201-DPB110601 DPA10201-DPB11501 DPA10201-DPB11601 DPA10201-DPB11801 DPA10201-DPB11901 DPA10201-DPB13401 DPA10202-DPB10101 DPA10202-DPB10201 DPA10202-DPB10202 DPA10202-DPB10401 DPA10202-DPB10501 DPA10202-DPB110601 DPA10202-DPB11101; note = HLAs: DPA10202-DPB11801 DPA10202-DPB11901 DPA10202-DPB13101 DPA10202-DPB13801 DPA10202-DPB15501 DPA10202-DPB16501 DPA10301-DPB10101 DPA10301-DPB10201 DPA10301-DPB10202 DPA10301-DPB10401 DPA10301-DPB10402 DPA10301-DPB110501 DPA10301-DPB110601 DPA10301-DPB11101 DPA10301-DPB11801 DPA10301-DPB12301 DPA10301-DPB13901 DPA10301-DPB14001 DPA10301-DPB14901 DPA10301-DPB15501 DPA10301-DPB16501 DPA10301-DPB17501 DPA10301-DPB18001 DPA10401-DPB10101 DPA10401-DPB10201 DPA10401-DPB10202 DPA10401-DPB10301 DPA10401-DPB10402 DPA10401-DPB10501 DPA10401-DPB110501 DPA10401-DPB11301 DPA10401-DPB113301 DPA10401-DPB11401 DPA10401-DPB14901 DQA10102-DQB10501 DQA10102-DQB10503 DQA10102-DQB10601 DQA10102-DQB10609 DQA10103-DQB10501 DQA10103-DQB10601 DQA10103-DQB10609
TAVQMAVFIHNFKRKGG

SEQ ID NO: 5519 - protein, 18 aa, Human immunodeficiency virus 1
  source 1..18: note = HLAs: DRB1_0804 DRB1_0806 DRB1_1101 DRB1_1102 DRB1_1103 DRB1_1104 DRB1_1301 DRB1_1304 DRB1_1305 DPA10103-DPB10101 DPA10103-DPB10201 DPA10103-DPB10202 DPA10103-DPB11501 DPA10103-DPB11601 DPA10103-DPB11901 DPA10103-DPB13401 DPA10103-DPB14801 DPA10103-DPB15001 DPA10104-DPB10101 DPA10104-DPB11501 DPA10105-DPB10101 DPA10105-DPB15001 DPA10201-DPB11501 DPA10202-DPB10101 DPA10202-DPB10202 DPA10202-DPB10501 DPA10202-DPB110601 DPA10202-DPB11901 DPA10202-DPB13801 DPA10301-DPB10101 DPA10301-DPB10201 DPA10301-DPB10202 DPA10301-DPB10401 DPA10301-DPB110601 DPA10301-DPB11801 DPA10301-DPB12301 DPA10301-DPB13901 DPA10301-DPB14001 DPA10301-DPB16501 DPA10401-DPB10101 DPA10401-DPB10201 DPA10401-DPB10202 DPA10401-DPB10501 DQA10102-DQB10501
TAVQMAVFIHNFKRKGGI

SEQ ID NO: 5520 - protein, 19 aa, Human immunodeficiency virus 1
  source 1..19: note = HLAs: DRB1_0101 DRB1_0801 DRB1_0802 DRB1_0804 DRB1_0806 DRB1_0809 DRB1_1001 DRB1_1101 DRB1_1102 DRB1_1103 DRB1_1104 DRB1_1301 DRB1_1304 DRB1_1305 DRB1_1406 DRB1_1501 DRB1_1601 DRB1_1602 DPA10103-DPB10101 DPA10103-DPB10201 DPA10103-DPB10202 DPA10103-DPB10501 DPA10103-DPB11501 DPA10103-DPB11601 DPA10103-DPB11801 DPA10103-DPB11901 DPA10103-DPB13101 DPA10103-DPB13401 DPA10103-DPB14001 DPA10103-DPB14101 DPA10103-DPB14801 DPA10103-DPB15001 DPA10104-DPB10101 DPA10104-DPB11501 DPA10105-DPB10101 DPA10105-DPB11801 DPA10105-DPB15001 DPA10106-DPB10101 DPA10201-DPB10101 DPA10201-DPB110601 DPA10201-DPB11501 DPA10201-DPB11601 DPA10201-DPB11901 DPA10202-DPB10101 DPA10202-DPB10201 DPA10202-DPB10202 DPA10202-DPB10501 DPA10202-DPB110601 DPA10202-DPB11801 DPA10202-DPB11901 DPA10202-DPB13101 DPA10202-DPB13801 DPA10202-DPB16501 DPA10301-DPB10101 DPA10301-DPB10201 DPA10301-DPB10202 DPA10301-DPB10401 DPA10301-DPB10402 DPA10301-DPB110501 DPA10301-DPB110601 DPA10301-DPB11801 DPA10301-DPB12301 DPA10301-DPB13901; note = HLAs: DPA10301-DPB14001 DPA10301-DPB14901 DPA10301-DPB15501 DPA10301-DPB16501 DPA10301-DPB17501 DPA10301-DPB18001 DPA10401-DPB10101 DPA10401-DPB10201 DPA10401-DPB10202 DPA10401-DPB10501 DQA10102-DQB10501 DQA10102-DQB10609 DQA10103-DQB10501
TAVQMAVFIHNFKRKGGIG

SEQ ID NO: 5521 - protein, 20 aa, Human immunodeficiency virus 1
  source 1..20: note = HLAs: DRB1_0101 DRB1_0801 DRB1_0802 DRB1_0804 DRB1_0806 DRB1_0809 DRB1_0813 DRB1_1001 DRB1_1101 DRB1_1102 DRB1_1103 DRB1_1104 DRB1_1114 DRB1_1301 DRB1_1302 DRB1_1303 DRB1_1304 DRB1_1305 DRB1_1402 DRB1_1406 DRB1_1501 DRB1_1503 DRB1_1601 DRB1_1602 DPA10103-DPB10101 DPA10103-DPB10201 DPA10103-DPB10202 DPA10103-DPB10501 DPA10103-DPB11501 DPA10103-DPB11601 DPA10103-DPB11801 DPA10103-DPB11901 DPA10103-DPB13101 DPA10103-DPB13401 DPA10103-DPB14001 DPA10103-DPB14101 DPA10103-DPB14801 DPA10103-DPB15001 DPA10104-DPB10101 DPA10104-DPB11501 DPA10105-DPB10101 DPA10105-DPB11801 DPA10105-DPB15001 DPA10106-DPB10101 DPA10201-DPB10101 DPA10201-DPB10202 DPA10201-DPB10501 DPA10201-DPB110601 DPA10201-DPB11501 DPA10201-DPB11601 DPA10201-DPB11901 DPA10202-DPB10101 DPA10202-DPB10201 DPA10202-DPB10202 DPA10202-DPB10501 DPA10202-DPB110601 DPA10202-DPB11801 DPA10202-DPB11901 DPA10202-DPB13101 DPA10202-DPB13801 DPA10202-DPB15501 DPA10202-DPB16501 DPA10301-DPB10101 DPA10301-DPB10201 DPA10301-DPB10202; note = HLAs: DPA10301-DPB10401 DPA10301-DPB10402 DPA10301-DPB110501 DPA10301-DPB110601 DPA10301-DPB11101 DPA10301-DPB11801 DPA10301-DPB12301 DPA10301-DPB13901 DPA10301-DPB14001 DPA10301-DPB14901 DPA10301-DPB15501 DPA10301-DPB16501 DPA10301-DPB17501 DPA10301-DPB18001 DPA10401-DPB10101 DPA10401-DPB10201 DPA10401-DPB10202 DPA10401-DPB10402 DPA10401-DPB10501 DPA10401-DPB110501 DPA10401-DPB14901 DQA10102-DQB10501 DQA10103-DQB10501 DQA10103-DQB10609
TAVQMAVFIHNFKRKGGIGG

SEQ ID NO: 5522 - protein, 21 aa, Human immunodeficiency virus 1
  source 1..21: note = HLAs: DRB1_0101 DRB1_0801 DRB1_0802 DRB1_0804 DRB1_0806 DRB1_0809 DRB1_1001 DRB1_1101 DRB1_1102 DRB1_1103 DRB1_1104 DRB1_1301 DRB1_1304 DRB1_1305 DRB1_1406 DRB1_1501 DRB1_1601 DPA10103-DPB10101 DPA10103-DPB10201 DPA10103-DPB10202 DPA10103-DPB10501 DPA10103-DPB11501 DPA10103-DPB11601 DPA10103-DPB11801 DPA10103-DPB11901 DPA10103-DPB13401 DPA10103-DPB14001 DPA10103-DPB14101 DPA10103-DPB14801 DPA10103-DPB15001 DPA10104-DPB10101 DPA10104-DPB11501 DPA10105-DPB10101 DPA10105-DPB11801 DPA10105-DPB15001 DPA10201-DPB11501 DPA10202-DPB10101 DPA10202-DPB10201 DPA10202-DPB10202 DPA10202-DPB10501 DPA10202-DPB110601 DPA10202-DPB11801 DPA10202-DPB11901 DPA10202-DPB13101 DPA10202-DPB13801 DPA10301-DPB10101 DPA10301-DPB10201 DPA10301-DPB10202 DPA10301-DPB10401 DPA10301-DPB110601 DPA10301-DPB11801 DPA10301-DPB12301 DPA10301-DPB13901 DPA10301-DPB14001 DPA10301-DPB16501 DPA10401-DPB10101 DPA10401-DPB10201 DPA10401-DPB10202 DPA10401-DPB10501 DQA10102-DQB10501 DQA10103-DQB10501
TAVQMAVFIHNFKRKGGIGGY

SEQ ID NO: 5523 - protein, 22 aa, Human immunodeficiency virus 1
  source 1..22: note = HLAs: DRB1_0101 DRB1_0801 DRB1_0802 DRB1_0804 DRB1_0806 DRB1_0809 DRB1_1001 DRB1_1101 DRB1_1102 DRB1_1103 DRB1_1104 DRB1_1301 DRB1_1304 DRB1_1305 DRB1_1406 DRB1_1501 DRB1_1601 DPA10103-DPB10101 DPA10103-DPB10201 DPA10103-DPB10202 DPA10103-DPB10501 DPA10103-DPB11501 DPA10103-DPB11601 DPA10103-DPB11801 DPA10103-DPB11901 DPA10103-DPB13401 DPA10103-DPB14001 DPA10103-DPB14101 DPA10103-DPB14801 DPA10103-DPB15001 DPA10104-DPB10101 DPA10104-DPB11501 DPA10105-DPB10101 DPA10105-DPB11801 DPA10105-DPB15001 DPA10201-DPB11501 DPA10202-DPB10101 DPA10202-DPB10201 DPA10202-DPB10202 DPA10202-DPB10501 DPA10202-DPB110601 DPA10202-DPB11801 DPA10202-DPB11901 DPA10202-DPB13101 DPA10202-DPB13801 DPA10301-DPB10101 DPA10301-DPB10201 DPA10301-DPB10202 DPA10301-DPB10401 DPA10301-DPB110601 DPA10301-DPB11801 DPA10301-DPB12301 DPA10301-DPB13901 DPA10301-DPB14001 DPA10301-DPB16501 DPA10401-DPB10101 DPA10401-DPB10201 DPA10401-DPB10202 DPA10401-DPB10501 DQA10102-DQB10501 DQA10103-DQB10501
TAVQMAVFIHNFKRKGGIGGYS

SEQ ID NO: 5524 - protein, 23 aa, Human immunodeficiency virus 1
  source 1..23: note = HLAs: DRB1_0101 DRB1_0801 DRB1_0802 DRB1_0804 DRB1_0806 DRB1_0809 DRB1_1001 DRB1_1101 DRB1_1102 DRB1_1103 DRB1_1104 DRB1_1301 DRB1_1304 DRB1_1305 DRB1_1406 DRB1_1501 DRB1_1601 DPA10103-DPB10101 DPA10103-DPB10201 DPA10103-DPB10202 DPA10103-DPB10501 DPA10103-DPB11501 DPA10103-DPB11601 DPA10103-DPB11801 DPA10103-DPB11901 DPA10103-DPB13401 DPA10103-DPB14001 DPA10103-DPB14101 DPA10103-DPB14801 DPA10103-DPB15001 DPA10104-DPB10101 DPA10104-DPB11501 DPA10105-DPB10101 DPA10105-DPB11801 DPA10105-DPB15001 DPA10201-DPB11501 DPA10202-DPB10101 DPA10202-DPB10201 DPA10202-DPB10202 DPA10202-DPB10501 DPA10202-DPB110601 DPA10202-DPB11801 DPA10202-DPB11901 DPA10202-DPB13101 DPA10202-DPB13801 DPA10301-DPB10101 DPA10301-DPB10201 DPA10301-DPB10202 DPA10301-DPB10401 DPA10301-DPB110601 DPA10301-DPB11801 DPA10301-DPB12301 DPA10301-DPB13901 DPA10301-DPB14001 DPA10301-DPB16501 DPA10401-DPB10101 DPA10401-DPB10201 DPA10401-DPB10202 DPA10401-DPB10501 DQA10102-DQB10501 DQA10103-DQB10501
TAVQMAVFIHNFKRKGGIGGYSA

SEQ ID NO: 5525 - protein, 24 aa, Human immunodeficiency virus 1
  source 1..24: note = HLAs: DRB1_0101 DRB1_0801 DRB1_0802 DRB1_0804 DRB1_0806 DRB1_0809 DRB1_1001 DRB1_1101 DRB1_1102 DRB1_1103 DRB1_1104 DRB1_1301 DRB1_1304 DRB1_1305 DRB1_1406 DRB1_1501 DRB1_1601 DPA10103-DPB10101 DPA10103-DPB10201 DPA10103-DPB10202 DPA10103-DPB10501 DPA10103-DPB11501 DPA10103-DPB11601 DPA10103-DPB11801 DPA10103-DPB11901 DPA10103-DPB13401 DPA10103-DPB14001 DPA10103-DPB14101 DPA10103-DPB14801 DPA10103-DPB15001 DPA10104-DPB10101 DPA10104-DPB11501 DPA10105-DPB10101 DPA10105-DPB11801 DPA10105-DPB15001 DPA10201-DPB11501 DPA10202-DPB10101 DPA10202-DPB10201 DPA10202-DPB10202 DPA10202-DPB10501 DPA10202-DPB110601 DPA10202-DPB11801 DPA10202-DPB11901 DPA10202-DPB13101 DPA10202-DPB13801 DPA10301-DPB10101 DPA10301-DPB10201 DPA10301-DPB10202 DPA10301-DPB10401 DPA10301-DPB110601 DPA10301-DPB11801 DPA10301-DPB12301 DPA10301-DPB13901 DPA10301-DPB14001 DPA10301-DPB16501 DPA10401-DPB10101 DPA10401-DPB10201 DPA10401-DPB10202 DPA10401-DPB10501 DQA10102-DQB10501 DQA10103-DQB10501
TAVQMAVFIHNFKRKGGIGGYSAG

SEQ ID NO: 5526 - protein, 25 aa, Human immunodeficiency virus 1
  source 1..25: note = HLAs: DRB1_0101 DRB1_0801 DRB1_0802 DRB1_0804 DRB1_0806 DRB1_0809 DRB1_1001 DRB1_1101 DRB1_1102 DRB1_1103 DRB1_1104 DRB1_1301 DRB1_1304 DRB1_1305 DRB1_1406 DRB1_1501 DRB1_1601 DPA10103-DPB10101 DPA10103-DPB10201 DPA10103-DPB10202 DPA10103-DPB10501 DPA10103-DPB11501 DPA10103-DPB11601 DPA10103-DPB11801 DPA10103-DPB11901 DPA10103-DPB13401 DPA10103-DPB14001 DPA10103-DPB14101 DPA10103-DPB14801 DPA10103-DPB15001 DPA10104-DPB10101 DPA10104-DPB11501 DPA10105-DPB10101 DPA10105-DPB11801 DPA10105-DPB15001 DPA10201-DPB11501 DPA10202-DPB10101 DPA10202-DPB10201 DPA10202-DPB10202 DPA10202-DPB10501 DPA10202-DPB110601 DPA10202-DPB11801 DPA10202-DPB11901 DPA10202-DPB13101 DPA10202-DPB13801 DPA10301-DPB10101 DPA10301-DPB10201 DPA10301-DPB10202 DPA10301-DPB10401 DPA10301-DPB110601 DPA10301-DPB11801 DPA10301-DPB12301 DPA10301-DPB13901 DPA10301-DPB14001 DPA10301-DPB16501 DPA10401-DPB10101 DPA10401-DPB10201 DPA10401-DPB10202 DPA10401-DPB10501 DQA10102-DQB10501 DQA10103-DQB10501
TAVQMAVFIHNFKRKGGIGGYSAGE

SEQ ID NO: 5527 - protein, 13 aa, Human immunodeficiency virus 1
  source 1..13: note = HLAs: DQA10102-DQB10611 DQA10201-DQB10301 DQA10401-DQB10301 DQA10401-DQB10319 DQA10501-DQB10301 DQA10501-DQB10319 DQA10503-DQB10301 DQA10505-DQB10301 DQA10505-DQB10309 DQA10505-DQB10319 DQA10508-DQB10301 DQA10509-DQB10301
TDSQYALGIIQAQ

SEQ ID NO: 5528 - protein, 14 aa, Human immunodeficiency virus 1
  source 1..14: note = HLAs: DRB1_1001 DQA10102-DQB10501 DQA10102-DQB10503 DQA10102-DQB10601 DQA10102-DQB10602 DQA10102-DQB10609 DQA10102-DQB10611 DQA10103-DQB10601 DQA10103-DQB10602 DQA10201-DQB10301 DQA10201-DQB10303 DQA10301-DQB10301 DQA10301-DQB10304 DQA10302-DQB10301 DQA10302-DQB10304 DQA10303-DQB10301 DQA10303-DQB10304 DQA10401-DQB10301 DQA10401-DQB10319 DQA10501-DQB10301 DQA10501-DQB10319 DQA10503-DQB10301 DQA10505-DQB10301 DQA10505-DQB10302 DQA10505-DQB10309 DQA10505-DQB10319 DQA10506-DQB10303 DQA10508-DQB10301 DQA10509-DQB10301 DQA10601-DQB10301
TDSQYALGIIQAQP

SEQ ID NO: 5529 - protein, 15 aa, Human immunodeficiency virus 1
  source 1..15: note = HLAs: DRB1_0101 DRB1_0401 DRB1_0405 DRB1_0408 DRB1_0410 DRB1_0901 DRB1_1001 DPA10301-DPB10101 DPA10401-DPB10101 DQA10101-DQB10601 DQA10102-DQB10501 DQA10102-DQB10503 DQA10102-DQB10601 DQA10102-DQB10602 DQA10102-DQB10609 DQA10102-DQB10610 DQA10102-DQB10611 DQA10103-DQB10501 DQA10103-DQB10601 DQA10103-DQB10602 DQA10103-DQB10609 DQA10201-DQB10301 DQA10201-DQB10302 DQA10201-DQB10303 DQA10301-DQB10301 DQA10301-DQB10303 DQA10301-DQB10304 DQA10302-DQB10301 DQA10302-DQB10303 DQA10302-DQB10304 DQA10303-DQB10301 DQA10303-DQB10303 DQA10303-DQB10304 DQA10401-DQB10301 DQA10401-DQB10319 DQA10401-DQB10402 DQA10402-DQB10402 DQA10501-DQB10201 DQA10501-DQB10203 DQA10501-DQB10301 DQA10501-DQB10319 DQA10503-DQB10301 DQA10505-DQB10201 DQA10505-DQB10202 DQA10505-DQB10301 DQA10505-DQB10302 DQA10505-DQB10309 DQA10505-DQB10319 DQA10505-DQB10402 DQA10506-DQB10303 DQA10508-DQB10301 DQA10509-DQB10301 DQA10601-DQB10301
TDSQYALGIIQAQPD

SEQ ID NO: 5530 - protein, 16 aa, Human immunodeficiency virus 1
  source 1..16: note = HLAs: DRB1_0101 DRB1_0405 DRB1_0408 DRB1_0410 DRB1_1001 DPA10301-DPB10101 DPA10401-DPB10101 DQA10101-DQB10601 DQA10102-DQB10501 DQA10102-DQB10503 DQA10102-DQB10601 DQA10102-DQB10602 DQA10102-DQB10604 DQA10102-DQB10609 DQA10102-DQB10610 DQA10102-DQB10611 DQA10103-DQB10501 DQA10103-DQB10601 DQA10103-DQB10602 DQA10103-DQB10609 DQA10201-DQB10301 DQA10201-DQB10302 DQA10201-DQB10303 DQA10301-DQB10301 DQA10301-DQB10302 DQA10301-DQB10303 DQA10301-DQB10304 DQA10301-DQB10305 DQA10302-DQB10301 DQA10302-DQB10302 DQA10302-DQB10303 DQA10302-DQB10304 DQA10303-DQB10301 DQA10303-DQB10302 DQA10303-DQB10303 DQA10303-DQB10304 DQA10401-DQB10301 DQA10401-DQB10319 DQA10401-DQB10402 DQA10402-DQB10402 DQA10501-DQB10201 DQA10501-DQB10203 DQA10501-DQB10301 DQA10501-DQB10319 DQA10503-DQB10301 DQA10505-DQB10201 DQA10505-DQB10202 DQA10505-DQB10301 DQA10505-DQB10302 DQA10505-DQB10309 DQA10505-DQB10319 DQA10505-DQB10402 DQA10506-DQB10303 DQA10508-DQB10301 DQA10509-DQB10301 DQA10601-DQB10301
TDSQYALGIIQAQPDK

SEQ ID NO: 5531 - protein, 17 aa, Human immunodeficiency virus 1
  source 1..17: note = HLAs: DRB1_0101 DRB1_0401 DRB1_0405 DRB1_0408 DRB1_0410 DRB1_1001 DPA10301-DPB10101 DPA10401-DPB10101 DQA10101-DQB10601 DQA10102-DQB10501 DQA10102-DQB10503 DQA10102-DQB10601 DQA10102-DQB10602 DQA10102-DQB10609 DQA10102-DQB10610 DQA10102-DQB10611 DQA10103-DQB10501 DQA10103-DQB10601 DQA10103-DQB10602 DQA10103-DQB10609 DQA10201-DQB10301 DQA10201-DQB10302 DQA10201-DQB10303 DQA10301-DQB10301 DQA10301-DQB10304 DQA10302-DQB10301 DQA10302-DQB10304 DQA10303-DQB10301 DQA10303-DQB10304 DQA10401-DQB10301 DQA10401-DQB10319 DQA10501-DQB10301 DQA10501-DQB10319 DQA10503-DQB10301 DQA10505-DQB10301 DQA10505-DQB10302 DQA10505-DQB10309 DQA10505-DQB10319 DQA10505-DQB10402 DQA10506-DQB10303 DQA10508-DQB10301 DQA10509-DQB10301 DQA10601-DQB10301
TDSQYALGIIQAQPDKS

SEQ ID NO: 5532 - protein, 18 aa, Human immunodeficiency virus 1
  source 1..18: note = HLAs: DRB1_1001 DQA10102-DQB10501 DQA10102-DQB10503 DQA10102-DQB10601 DQA10102-DQB10602 DQA10102-DQB10609 DQA10102-DQB10611 DQA10103-DQB10601 DQA10201-DQB10301 DQA10301-DQB10301 DQA10301-DQB10304 DQA10302-DQB10301 DQA10302-DQB10304 DQA10303-DQB10301 DQA10303-DQB10304 DQA10401-DQB10301 DQA10401-DQB10319 DQA10501-DQB10301 DQA10501-DQB10319 DQA10503-DQB10301 DQA10505-DQB10301 DQA10505-DQB10309 DQA10505-DQB10319 DQA10508-DQB10301 DQA10509-DQB10301 DQA10601-DQB10301
TDSQYALGIIQAQPDKSE

SEQ ID NO: 5533 - protein, 19 aa, Human immunodeficiency virus 1
  source 1..19: note = HLAs: DRB1_0101 DRB1_0405 DRB1_0408 DRB1_0410 DRB1_1001 DPA10301-DPB10101 DPA10401-DPB10101 DQA10101-DQB10601 DQA10102-DQB10501 DQA10102-DQB10503 DQA10102-DQB10601 DQA10102-DQB10602 DQA10102-DQB10609 DQA10102-DQB10610 DQA10102-DQB10611 DQA10103-DQB10501 DQA10103-DQB10601 DQA10103-DQB10602 DQA10103-DQB10609 DQA10201-DQB10301 DQA10201-DQB10302 DQA10201-DQB10303 DQA10301-DQB10301 DQA10301-DQB10304 DQA10302-DQB10301 DQA10302-DQB10304 DQA10303-DQB10301 DQA10303-DQB10304 DQA10401-DQB10301 DQA10401-DQB10319 DQA10501-DQB10301 DQA10501-DQB10319 DQA10503-DQB10301 DQA10505-DQB10301 DQA10505-DQB10302 DQA10505-DQB10309 DQA10505-DQB10319 DQA10506-DQB10303 DQA10508-DQB10301 DQA10509-DQB10301 DQA10601-DQB10301
TDSQYALGIIQAQPDKSES

SEQ ID NO: 5534 - protein, 20 aa, Human immunodeficiency virus 1
  source 1..20: note = HLAs: DRB1_0101 DRB1_0102 DRB1_0401 DRB1_0404 DRB1_0405 DRB1_0408 DRB1_0410 DRB1_0813 DRB1_0901 DRB1_1001 DPA10103-DPB11501 DPA10103-DPB15001 DPA10104-DPB11501 DPA10105-DPB15001 DPA10202-DPB10101 DPA10301-DPB10101 DPA10301-DPB10201 DPA10301-DPB10202 DPA10301-DPB110601 DPA10301-DPB11801 DPA10301-DPB16501 DPA10401-DPB10101 DPA10401-DPB10501 DQA10101-DQB10601 DQA10102-DQB10501 DQA10102-DQB10503 DQA10102-DQB10601 DQA10102-DQB10602 DQA10102-DQB10609 DQA10102-DQB10610 DQA10102-DQB10611 DQA10103-DQB10501 DQA10103-DQB10503 DQA10103-DQB10601 DQA10103-DQB10602 DQA10103-DQB10609 DQA10201-DQB10301 DQA10201-DQB10303 DQA10301-DQB10301 DQA10301-DQB10304 DQA10302-DQB10301 DQA10302-DQB10304 DQA10303-DQB10301 DQA10303-DQB10304 DQA10401-DQB10301 DQA10401-DQB10319 DQA10501-DQB10301 DQA10501-DQB10319 DQA10503-DQB10301 DQA10505-DQB10301 DQA10505-DQB10302 DQA10505-DQB10309 DQA10505-DQB10319 DQA10505-DQB10402 DQA10506-DQB10303 DQA10508-DQB10301 DQA10509-DQB10301 DQA10601-DQB10301
TDSQYALGIIQAQPDKSESE

SEQ ID NO: 5535 - protein, 21 aa, Human immunodeficiency virus 1
  source 1..21: note = HLAs: DRB1_0101 DRB1_0401 DRB1_0404 DRB1_0405 DRB1_0408 DRB1_0410 DRB1_1001 DPA10301-DPB10101 DPA10401-DPB10101 DQA10102-DQB10501 DQA10102-DQB10503 DQA10102-DQB10601 DQA10102-DQB10602 DQA10102-DQB10609 DQA10102-DQB10611 DQA10103-DQB10501 DQA10103-DQB10601 DQA10103-DQB10609 DQA10201-DQB10301 DQA10201-DQB10303 DQA10301-DQB10301 DQA10302-DQB10301 DQA10303-DQB10301 DQA10401-DQB10301 DQA10401-DQB10319 DQA10501-DQB10301 DQA10501-DQB10319 DQA10503-DQB10301 DQA10505-DQB10301 DQA10505-DQB10309 DQA10505-DQB10319 DQA10506-DQB10303 DQA10508-DQB10301 DQA10509-DQB10301 DQA10601-DQB10301
TDSQYALGIIQAQPDKSESEL

SEQ ID NO: 5536 - protein, 22 aa, Human immunodeficiency virus 1
  source 1..22: note = HLAs: DRB1_0101 DRB1_0401 DRB1_0404 DRB1_0405 DRB1_0408 DRB1_0410 DRB1_1001 DPA10301-DPB10101 DPA10401-DPB10101 DQA10102-DQB10501 DQA10102-DQB10503 DQA10102-DQB10601 DQA10102-DQB10602 DQA10102-DQB10609 DQA10102-DQB10611 DQA10103-DQB10501 DQA10103-DQB10601 DQA10103-DQB10609 DQA10201-DQB10301 DQA10201-DQB10303 DQA10301-DQB10301 DQA10302-DQB10301 DQA10303-DQB10301 DQA10401-DQB10301 DQA10401-DQB10319 DQA10501-DQB10301 DQA10501-DQB10319 DQA10503-DQB10301 DQA10505-DQB10301 DQA10505-DQB10309 DQA10505-DQB10319 DQA10506-DQB10303 DQA10508-DQB10301 DQA10509-DQB10301 DQA10601-DQB10301
TDSQYALGIIQAQPDKSESELV

SEQ ID NO: 5537 - protein, 15 aa, Human immunodeficiency virus 1
  source 1..15: note = HLAs: DRB1_0405 DRB1_0408 DRB1_0410 DRB1_1001 DRB1_1114 DRB1_1302
TDTLLVQNANPDCKT

SEQ ID NO: 5538 - protein, 13 aa, Human immunodeficiency virus 1
  source 1..13: note = HLAs: DPA10301-DPB10201 DPA10301-DPB10202
THLEGKIILVAVH

SEQ ID NO: 5539 - protein, 14 aa, Human immunodeficiency virus 1
  source 1..14: note = HLAs: DRB1_1001 DPA10103-DPB10201 DPA10103-DPB10202 DPA10103-DPB11501 DPA10103-DPB14801 DPA10104-DPB11501 DPA10301-DPB10101 DPA10301-DPB10201 DPA10301-DPB10202 DPA10301-DPB10401 DPA10301-DPB110601 DPA10301-DPB11801 DPA10301-DPB12301 DPA10301-DPB13901 DPA10301-DPB14001 DPA10301-DPB16501 DPA10401-DPB10101 DPA10401-DPB10201 DPA10401-DPB10202 DQA10102-DQB10501
THLEGKIILVAVHV

SEQ ID NO: 5540 - protein, 15 aa, Human immunodeficiency virus 1
  source 1..15: note = HLAs: DRB1_0101 DRB1_0102 DRB1_0404 DRB1_0405 DRB1_0408 DRB1_0410 DRB1_0701 DRB1_0802 DRB1_0804 DRB1_0806 DRB1_0809 DRB1_0813 DRB1_1001 DRB1_1102 DRB1_1104 DRB1_1301 DRB1_1304 DRB1_1404 DRB1_1406 DRB1_1501 DPA10103-DPB10101 DPA10103-DPB10201 DPA10103-DPB10202 DPA10103-DPB11501 DPA10103-DPB11801 DPA10103-DPB11901 DPA10103-DPB14801 DPA10103-DPB15001 DPA10104-DPB10101 DPA10104-DPB11501 DPA10105-DPB10101 DPA10105-DPB11801 DPA10105-DPB15001 DPA10201-DPB110601 DPA10201-DPB11501 DPA10201-DPB11901 DPA10202-DPB10101 DPA10202-DPB110601 DPA10202-DPB11901 DPA10301-DPB10101 DPA10301-DPB10201 DPA10301-DPB10202 DPA10301-DPB10401 DPA10301-DPB10402 DPA10301-DPB110501 DPA10301-DPB110601 DPA10301-DPB11801 DPA10301-DPB12301 DPA10301-DPB13901 DPA10301-DPB14001 DPA10301-DPB14901 DPA10301-DPB15501 DPA10301-DPB16501 DPA10301-DPB17501 DPA10301-DPB18001 DPA10401-DPB10101 DPA10401-DPB10201 DPA10401-DPB10202 DPA10401-DPB10301 DPA10401-DPB10501 DPA10401-DPB11401 DQA10102-DQB10501 DQA10102-DQB10503; note = HLAs: DQA10102-DQB10601 DQA10102-DQB10602 DQA10102-DQB10609 DQA10102-DQB10611 DQA10103-DQB10501 DQA10103-DQB10601 DQA10103-DQB10602 DQA10103-DQB10609 DQA10201-DQB10301
THLEGKIILVAVHVA

SEQ ID NO: 5541 - protein, 16 aa, Human immunodeficiency virus 1
  source 1..16: note = HLAs: DRB1_0101 DRB1_0404 DRB1_0408 DRB1_0802 DRB1_0804 DRB1_0809 DRB1_0813 DRB1_1001 DRB1_1406 DRB1_1501 DPA10103-DPB10101 DPA10103-DPB10201 DPA10103-DPB10202 DPA10103-DPB11501 DPA10103-DPB11901 DPA10103-DPB14801 DPA10103-DPB15001 DPA10104-DPB10101 DPA10104-DPB11501 DPA10105-DPB10101 DPA10105-DPB15001 DPA10202-DPB10101 DPA10202-DPB110601 DPA10202-DPB11901 DPA10301-DPB10101 DPA10301-DPB10201 DPA10301-DPB10202 DPA10301-DPB10401 DPA10301-DPB10402 DPA10301-DPB110501 DPA10301-DPB110601 DPA10301-DPB11801 DPA10301-DPB12301 DPA10301-DPB13901 DPA10301-DPB14001 DPA10301-DPB14901 DPA10301-DPB15501 DPA10301-DPB16501 DPA10301-DPB17501 DPA10301-DPB18001 DPA10401-DPB10101 DPA10401-DPB10201 DPA10401-DPB10202 DPA10401-DPB10301 DPA10401-DPB10501 DPA10401-DPB11401 DQA10102-DQB10501 DQA10102-DQB10503 DQA10102-DQB10601 DQA10102-DQB10602 DQA10102-DQB10609 DQA10102-DQB10611 DQA10103-DQB10501 DQA10103-DQB10601 DQA10103-DQB10602 DQA10103-DQB10609 DQA10201-DQB10301
THLEGKIILVAVHVAS

SEQ ID NO: 5542 - protein, 17 aa, Human immunodeficiency virus 1
  source 1..17: note = HLAs: DRB1_0101 DRB1_0102 DRB1_0401 DRB1_0404 DRB1_0405 DRB1_0408 DRB1_0410 DRB1_0701 DRB1_0801 DRB1_0802 DRB1_0804 DRB1_0806 DRB1_0809 DRB1_0813 DRB1_0901 DRB1_1001 DRB1_1101 DRB1_1104 DRB1_1305 DRB1_1402 DRB1_1406 DRB1_1501 DRB1_1602 DPA10103-DPB10101 DPA10103-DPB10201 DPA10103-DPB10202 DPA10103-DPB11501 DPA10103-DPB11901 DPA10103-DPB14801 DPA10103-DPB15001 DPA10104-DPB10101 DPA10104-DPB11501 DPA10105-DPB10101 DPA10105-DPB15001 DPA10201-DPB11501 DPA10202-DPB10101 DPA10202-DPB110601 DPA10202-DPB11901 DPA10301-DPB10101 DPA10301-DPB10201 DPA10301-DPB10202 DPA10301-DPB10401 DPA10301-DPB10402 DPA10301-DPB110501 DPA10301-DPB110601 DPA10301-DPB11801 DPA10301-DPB12301 DPA10301-DPB13901 DPA10301-DPB14001 DPA10301-DPB14901 DPA10301-DPB15501 DPA10301-DPB16501 DPA10301-DPB17501 DPA10301-DPB18001 DPA10401-DPB10101 DPA10401-DPB10201 DPA10401-DPB10202 DPA10401-DPB10301 DPA10401-DPB10501 DPA10401-DPB11401 DQA10102-DQB10501 DQA10102-DQB10503 DQA10102-DQB10601 DQA10102-DQB10602 DQA10102-DQB10609; note = HLAs: DQA10102-DQB10611 DQA10103-DQB10501 DQA10103-DQB10601 DQA10103-DQB10602 DQA10103-DQB10609 DQA10201-DQB10301 DQA10201-DQB10303 DQA10506-DQB10303
THLEGKIILVAVHVASG

SEQ ID NO: 5543 - protein, 18 aa, Human immunodeficiency virus 1
  source 1..18: note = HLAs: DRB1_0404 DRB1_0408 DRB1_0813 DRB1_1001 DPA10103-DPB11501 DPA10104-DPB11501 DPA10301-DPB10101 DPA10301-DPB10201 DPA10301-DPB10202 DPA10301-DPB110601 DPA10301-DPB11801 DPA10301-DPB14001 DPA10401-DPB10101 DPA10401-DPB10202 DQA10102-DQB10501 DQA10102-DQB10503 DQA10102-DQB10601 DQA10102-DQB10602 DQA10102-DQB10609 DQA10102-DQB10611 DQA10103-DQB10501 DQA10103-DQB10601
THLEGKIILVAVHVASGY

SEQ ID NO: 5544 - protein, 15 aa, Human immunodeficiency virus 1
  source 1..15: note = HLAs: DRB1_1406
TIPSINNETPGIRYQ

SEQ ID NO: 5545 - protein, 20 aa, Human immunodeficiency virus 1
  source 1..20: note = HLAs: DQA10102-DQB10501
TIPSINNETPGIRYQYNVLP

SEQ ID NO: 5546 - protein, 21 aa, Human immunodeficiency virus 1
  source 1..21: note = HLAs: DRB1_0404 DRB1_0408 DRB1_0410 DRB1_1001 DQA10102-DQB10501
TIPSINNETPGIRYQYNVLPQ

SEQ ID NO: 5547 - protein, 22 aa, Human immunodeficiency virus 1
  source 1..22: note = HLAs: DRB1_0101 DRB1_0401 DRB1_0404 DRB1_0405 DRB1_0408 DRB1_0410 DRB1_1001 DRB1_1114 DRB1_1302 DRB1_1406 DQA10102-DQB10501
TIPSINNETPGIRYQYNVLPQG

SEQ ID NO: 5548 - protein, 23 aa, Human immunodeficiency virus 1
  source 1..23: note = HLAs: DRB1_0101 DRB1_0401 DRB1_0404 DRB1_0405 DRB1_0408 DRB1_0410 DRB1_0813 DRB1_1001 DRB1_1114 DRB1_1302 DRB1_1406 DRB1_1501 DRB1_1602 DPA10301-DPB10101 DPA10401-DPB10101 DQA10102-DQB10501 DQA10103-DQB10501
TIPSINNETPGIRYQYNVLPQGW

SEQ ID NO: 5549 - protein, 24 aa, Human immunodeficiency virus 1
  source 1..24: note = HLAs: DRB1_0101 DRB1_0102 DRB1_0401 DRB1_0404 DRB1_0405 DRB1_0408 DRB1_0410 DRB1_0802 DRB1_0809 DRB1_0813 DRB1_1001 DRB1_1102 DRB1_1114 DRB1_1301 DRB1_1302 DRB1_1304 DRB1_1402 DRB1_1406 DRB1_1501 DRB1_1502 DRB1_1602 DPA10301-DPB10101 DPA10301-DPB10201 DPA10301-DPB10202 DPA10301-DPB110601 DPA10301-DPB11801 DPA10401-DPB10101 DQA10102-DQB10501 DQA10102-DQB10503 DQA10103-DQB10501
TIPSINNETPGIRYQYNVLPQGWK

SEQ ID NO: 5550 - protein, 25 aa, Human immunodeficiency virus 1
  source 1..25: note = HLAs: DRB1_0101 DRB1_0102 DRB1_0401 DRB1_0404 DRB1_0405 DRB1_0408 DRB1_0410 DRB1_0801 DRB1_0802 DRB1_0806 DRB1_0809 DRB1_0813 DRB1_1001 DRB1_1101 DRB1_1102 DRB1_1104 DRB1_1114 DRB1_1301 DRB1_1302 DRB1_1304 DRB1_1305 DRB1_1402 DRB1_1406 DRB1_1501 DRB1_1502 DRB1_1601 DRB1_1602 DPA10301-DPB10101 DPA10301-DPB10201 DPA10301-DPB10202 DPA10301-DPB110601 DPA10301-DPB11801 DPA10401-DPB10101 DQA10102-DQB10501 DQA10102-DQB10503 DQA10103-DQB10501
TIPSINNETPGIRYQYNVLPQGWKG

SEQ ID NO: 5551 - protein, 13 aa, Human immunodeficiency virus 1
  source 1..13: note = HLAs: DPA10103-DPB11501 DPA10104-DPB11501 DPA10301-DPB10101 DPA10401-DPB10101
TKWRKLVDFRELN

SEQ ID NO: 5552 - protein, 14 aa, Human immunodeficiency virus 1
  source 1..14: note = HLAs: DRB1_0405 DPA10103-DPB10101 DPA10103-DPB10201 DPA10103-DPB10202 DPA10103-DPB11501 DPA10103-DPB11601 DPA10103-DPB11901 DPA10103-DPB13101 DPA10103-DPB13401 DPA10103-DPB14801 DPA10103-DPB15001 DPA10104-DPB10101 DPA10104-DPB11501 DPA10105-DPB10101 DPA10105-DPB15001 DPA10106-DPB10101 DPA10201-DPB10101 DPA10201-DPB110601 DPA10201-DPB11501 DPA10201-DPB11601 DPA10201-DPB11901 DPA10202-DPB10101 DPA10202-DPB110601 DPA10202-DPB11901 DPA10202-DPB13101 DPA10202-DPB16501 DPA10301-DPB10101 DPA10301-DPB10201 DPA10301-DPB10202 DPA10301-DPB10401 DPA10301-DPB110601 DPA10301-DPB11801 DPA10301-DPB12301 DPA10301-DPB13901 DPA10301-DPB14001 DPA10301-DPB16501 DPA10401-DPB10101 DPA10401-DPB10201 DPA10401-DPB10202 DPA10401-DPB10501
TKWRKLVDFRELNK

SEQ ID NO: 5553 - protein, 15 aa, Human immunodeficiency virus 1
  source 1..15: note = HLAs: DRB1_0101 DRB1_0405 DRB1_0408 DRB1_0410 DRB1_0806 DRB1_1001 DRB1_1102 DRB1_1103 DRB1_1104 DRB1_1301 DRB1_1304 DPA10103-DPB10101 DPA10103-DPB10201 DPA10103-DPB10202 DPA10103-DPB10401 DPA10103-DPB10501 DPA10103-DPB112601 DPA10103-DPB11501 DPA10103-DPB11601 DPA10103-DPB11801 DPA10103-DPB11901 DPA10103-DPB12301 DPA10103-DPB13101 DPA10103-DPB13401 DPA10103-DPB13901 DPA10103-DPB14001 DPA10103-DPB14101 DPA10103-DPB14801 DPA10103-DPB15001 DPA10103-DPB15501 DPA10103-DPB15901 DPA10104-DPB10101 DPA10104-DPB11501 DPA10105-DPB10101 DPA10105-DPB10401 DPA10105-DPB11801 DPA10105-DPB15001 DPA10106-DPB10101 DPA10201-DPB10101 DPA10201-DPB10501 DPA10201-DPB110601 DPA10201-DPB11501 DPA10201-DPB11601 DPA10201-DPB11901 DPA10201-DPB13401 DPA10202-DPB10101 DPA10202-DPB10201 DPA10202-DPB10202 DPA10202-DPB10501 DPA10202-DPB110601 DPA10202-DPB11801 DPA10202-DPB11901 DPA10202-DPB13101 DPA10202-DPB13801 DPA10202-DPB15501 DPA10202-DPB16501 DPA10301-DPB10101 DPA10301-DPB10201 DPA10301-DPB10202; note = HLAs: DPA10301-DPB10401 DPA10301-DPB10402 DPA10301-DPB110501 DPA10301-DPB110601 DPA10301-DPB11801 DPA10301-DPB12301 DPA10301-DPB13901 DPA10301-DPB14001 DPA10301-DPB14901 DPA10301-DPB15501 DPA10301-DPB16501 DPA10301-DPB18001 DPA10401-DPB10101 DPA10401-DPB10201 DPA10401-DPB10202 DPA10401-DPB10501
TKWRKLVDFRELNKR

SEQ ID NO: 5554 - protein, 16 aa, Human immunodeficiency virus 1
  source 1..16: note = HLAs: DRB1_0405 DRB1_0410 DRB1_1001 DRB1_1304 DPA10103-DPB10101 DPA10103-DPB10201 DPA10103-DPB10202 DPA10103-DPB10501 DPA10103-DPB11501 DPA10103-DPB11601 DPA10103-DPB11901 DPA10103-DPB13101 DPA10103-DPB13401 DPA10103-DPB14001 DPA10103-DPB14101 DPA10103-DPB14801 DPA10103-DPB15001 DPA10104-DPB10101 DPA10104-DPB11501 DPA10105-DPB10101 DPA10105-DPB15001 DPA10106-DPB10101 DPA10201-DPB10101 DPA10201-DPB110601 DPA10201-DPB11501 DPA10201-DPB11601 DPA10201-DPB11901 DPA10202-DPB10101 DPA10202-DPB10201 DPA10202-DPB10202 DPA10202-DPB10501 DPA10202-DPB110601 DPA10202-DPB11901 DPA10202-DPB13101 DPA10202-DPB13801 DPA10202-DPB15501 DPA10202-DPB16501 DPA10301-DPB10101 DPA10301-DPB10201 DPA10301-DPB10202 DPA10301-DPB10401 DPA10301-DPB110601 DPA10301-DPB11801 DPA10301-DPB12301 DPA10301-DPB13901 DPA10301-DPB14001 DPA10301-DPB15501 DPA10301-DPB16501 DPA10401-DPB10101 DPA10401-DPB10201 DPA10401-DPB10202 DPA10401-DPB10501
TKWRKLVDFRELNKRT

SEQ ID NO: 5555 - protein, 17 aa, Human immunodeficiency virus 1
  source 1..17: note = HLAs: DRB1_0405 DRB1_0410 DRB1_0801 DRB1_0806 DRB1_1001 DRB1_1101 DRB1_1103 DRB1_1104 DRB1_1304 DRB1_1305 DPA10103-DPB10101 DPA10103-DPB10201 DPA10103-DPB10202 DPA10103-DPB10501 DPA10103-DPB11501 DPA10103-DPB11601 DPA10103-DPB11901 DPA10103-DPB13101 DPA10103-DPB13401 DPA10103-DPB14001 DPA10103-DPB14101 DPA10103-DPB14801 DPA10103-DPB15001 DPA10104-DPB10101 DPA10104-DPB11501 DPA10105-DPB10101 DPA10105-DPB15001 DPA10106-DPB10101 DPA10201-DPB10101 DPA10201-DPB10501 DPA10201-DPB110601 DPA10201-DPB11501 DPA10201-DPB11601 DPA10201-DPB11901 DPA10202-DPB10101 DPA10202-DPB10201 DPA10202-DPB10202 DPA10202-DPB10501 DPA10202-DPB110601 DPA10202-DPB11901 DPA10202-DPB13101 DPA10202-DPB13801 DPA10202-DPB16501 DPA10301-DPB10101 DPA10301-DPB10201 DPA10301-DPB10202 DPA10301-DPB10401 DPA10301-DPB110601 DPA10301-DPB11801 DPA10301-DPB12301 DPA10301-DPB13901 DPA10301-DPB14001 DPA10301-DPB16501 DPA10401-DPB10101 DPA10401-DPB10201 DPA10401-DPB10202 DPA10401-DPB10501
TKWRKLVDFRELNKRTQ

SEQ ID NO: 5556 - protein, 18 aa, Human immunodeficiency virus 1
  source 1..18: note = HLAs: DRB1_1101 DRB1_1305 DPA10103-DPB10101 DPA10103-DPB11501 DPA10103-DPB11601 DPA10103-DPB11901 DPA10103-DPB13101 DPA10104-DPB10101 DPA10104-DPB11501 DPA10105-DPB10101 DPA10201-DPB11501 DPA10201-DPB11601 DPA10202-DPB10101 DPA10202-DPB110601 DPA10202-DPB11901 DPA10202-DPB13101 DPA10301-DPB10101 DPA10301-DPB10201 DPA10301-DPB10202 DPA10301-DPB110601 DPA10301-DPB11801 DPA10301-DPB14001 DPA10301-DPB16501 DPA10401-DPB10101 DPA10401-DPB10201 DPA10401-DPB10202 DPA10401-DPB10501
TKWRKLVDFRELNKRTQD

SEQ ID NO: 5557 - protein, 19 aa, Human immunodeficiency virus 1
  source 1..19: note = HLAs: DRB1_0801 DRB1_0806 DRB1_1001 DRB1_1101 DRB1_1103 DRB1_1104 DRB1_1304 DRB1_1305 DPA10103-DPB10101 DPA10103-DPB10201 DPA10103-DPB10202 DPA10103-DPB10501 DPA10103-DPB11501 DPA10103-DPB11601 DPA10103-DPB11901 DPA10103-DPB13101 DPA10103-DPB13401 DPA10103-DPB14101 DPA10103-DPB14801 DPA10103-DPB15001 DPA10104-DPB10101 DPA10104-DPB11501 DPA10105-DPB10101 DPA10105-DPB15001 DPA10106-DPB10101 DPA10201-DPB10101 DPA10201-DPB110601 DPA10201-DPB11501 DPA10201-DPB11601 DPA10201-DPB11901 DPA10202-DPB10101 DPA10202-DPB10501 DPA10202-DPB110601 DPA10202-DPB11901 DPA10202-DPB13101 DPA10202-DPB13801 DPA10202-DPB16501 DPA10301-DPB10101 DPA10301-DPB10201 DPA10301-DPB10202 DPA10301-DPB10401 DPA10301-DPB110601 DPA10301-DPB11801 DPA10301-DPB12301 DPA10301-DPB13901 DPA10301-DPB14001 DPA10301-DPB16501 DPA10401-DPB10101 DPA10401-DPB10201 DPA10401-DPB10202 DPA10401-DPB10501
TKWRKLVDFRELNKRTQDF

SEQ ID NO: 5558 - protein, 20 aa, Human immunodeficiency virus 1
  source 1..20: note = HLAs: DRB1_0405 DRB1_0410 DRB1_0801 DRB1_0802 DRB1_0804 DRB1_0806 DRB1_0809 DRB1_1001 DRB1_1101 DRB1_1102 DRB1_1103 DRB1_1104 DRB1_1301 DRB1_1304 DRB1_1305 DPA10103-DPB10101 DPA10103-DPB10201 DPA10103-DPB10202 DPA10103-DPB10501 DPA10103-DPB11501 DPA10103-DPB11601 DPA10103-DPB11901 DPA10103-DPB13101 DPA10103-DPB13401 DPA10103-DPB14001 DPA10103-DPB14101 DPA10103-DPB14801 DPA10103-DPB15001 DPA10103-DPB15501 DPA10104-DPB10101 DPA10104-DPB11501 DPA10105-DPB10101 DPA10105-DPB15001 DPA10106-DPB10101 DPA10201-DPB10101 DPA10201-DPB10501 DPA10201-DPB110601 DPA10201-DPB11501 DPA10201-DPB11601 DPA10201-DPB11901 DPA10202-DPB10101 DPA10202-DPB10201 DPA10202-DPB10202 DPA10202-DPB10501 DPA10202-DPB110601 DPA10202-DPB11901 DPA10202-DPB13101 DPA10202-DPB13801 DPA10202-DPB15501 DPA10202-DPB16501 DPA10301-DPB10101 DPA10301-DPB10201 DPA10301-DPB10202 DPA10301-DPB10401 DPA10301-DPB10402 DPA10301-DPB110501 DPA10301-DPB110601 DPA10301-DPB11101 DPA10301-DPB11801 DPA10301-DPB12301 DPA10301-DPB13901; note = HLAs: DPA10301-DPB14001 DPA10301-DPB14901 DPA10301-DPB15501 DPA10301-DPB16501 DPA10301-DPB18001 DPA10401-DPB10101 DPA10401-DPB10201 DPA10401-DPB10202 DPA10401-DPB10501 DQA10102-DQB10501
TKWRKLVDFRELNKRTQDFW

SEQ ID NO: 5559 - protein, 21 aa, Human immunodeficiency virus 1
  source 1..21: note = HLAs: DRB1_0801 DRB1_0806 DRB1_1001 DRB1_1101 DRB1_1103 DRB1_1104 DRB1_1304 DRB1_1305 DPA10103-DPB10101 DPA10103-DPB10201 DPA10103-DPB10202 DPA10103-DPB10501 DPA10103-DPB11501 DPA10103-DPB11601 DPA10103-DPB11901 DPA10103-DPB13101 DPA10103-DPB13401 DPA10103-DPB14001 DPA10103-DPB14101 DPA10103-DPB14801 DPA10103-DPB15001 DPA10104-DPB10101 DPA10104-DPB11501 DPA10105-DPB10101 DPA10105-DPB15001 DPA10201-DPB110601 DPA10201-DPB11501 DPA10201-DPB11601 DPA10201-DPB11901 DPA10202-DPB10101 DPA10202-DPB10501 DPA10202-DPB110601 DPA10202-DPB11901 DPA10202-DPB13101 DPA10202-DPB13801 DPA10202-DPB16501 DPA10301-DPB10101 DPA10301-DPB10201 DPA10301-DPB10202 DPA10301-DPB10401 DPA10301-DPB110601 DPA10301-DPB11801 DPA10301-DPB12301 DPA10301-DPB13901 DPA10301-DPB14001 DPA10301-DPB16501 DPA10401-DPB10101 DPA10401-DPB10201 DPA10401-DPB10202 DPA10401-DPB10501
TKWRKLVDFRELNKRTQDFWE

SEQ ID NO: 5560 - protein, 22 aa, Human immunodeficiency virus 1
  source 1..22: note = HLAs: DRB1_0410 DRB1_0801 DRB1_0806 DRB1_1001 DRB1_1101 DRB1_1103 DRB1_1104 DRB1_1304 DRB1_1305 DPA10103-DPB10101 DPA10103-DPB10201 DPA10103-DPB10202 DPA10103-DPB10501 DPA10103-DPB11501 DPA10103-DPB11601 DPA10103-DPB11901 DPA10103-DPB13101 DPA10103-DPB13401 DPA10103-DPB14001 DPA10103-DPB14101 DPA10103-DPB14801 DPA10103-DPB15001 DPA10104-DPB10101 DPA10104-DPB11501 DPA10105-DPB10101 DPA10105-DPB15001 DPA10106-DPB10101 DPA10201-DPB10101 DPA10201-DPB110601 DPA10201-DPB11501 DPA10201-DPB11601 DPA10201-DPB11901 DPA10202-DPB10101 DPA10202-DPB10501 DPA10202-DPB110601 DPA10202-DPB11901 DPA10202-DPB13101 DPA10202-DPB13801 DPA10202-DPB16501 DPA10301-DPB10101 DPA10301-DPB10201 DPA10301-DPB10202 DPA10301-DPB10401 DPA10301-DPB110601 DPA10301-DPB11801 DPA10301-DPB12301 DPA10301-DPB13901 DPA10301-DPB14001 DPA10301-DPB16501 DPA10401-DPB10101 DPA10401-DPB10201 DPA10401-DPB10202 DPA10401-DPB10501
TKWRKLVDFRELNKRTQDFWEV

SEQ ID NO: 5561 - protein, 23 aa, Human immunodeficiency virus 1
  source 1..23: note = HLAs: DRB1_0410 DRB1_0801 DRB1_0806 DRB1_1001 DRB1_1101 DRB1_1103 DRB1_1104 DRB1_1304 DRB1_1305 DPA10103-DPB10101 DPA10103-DPB10201 DPA10103-DPB10202 DPA10103-DPB10501 DPA10103-DPB11501 DPA10103-DPB11601 DPA10103-DPB11901 DPA10103-DPB13101 DPA10103-DPB13401 DPA10103-DPB14001 DPA10103-DPB14101 DPA10103-DPB14801 DPA10103-DPB15001 DPA10104-DPB10101 DPA10104-DPB11501 DPA10105-DPB10101 DPA10105-DPB15001 DPA10106-DPB10101 DPA10201-DPB10101 DPA10201-DPB110601 DPA10201-DPB11501 DPA10201-DPB11601 DPA10201-DPB11901 DPA10202-DPB10101 DPA10202-DPB10501 DPA10202-DPB110601 DPA10202-DPB11901 DPA10202-DPB13101 DPA10202-DPB13801 DPA10202-DPB16501 DPA10301-DPB10101 DPA10301-DPB10201 DPA10301-DPB10202 DPA10301-DPB10401 DPA10301-DPB110601 DPA10301-DPB11801 DPA10301-DPB12301 DPA10301-DPB13901 DPA10301-DPB14001 DPA10301-DPB16501 DPA10401-DPB10101 DPA10401-DPB10201 DPA10401-DPB10202 DPA10401-DPB10501
TKWRKLVDFRELNKRTQDFWEVQ

SEQ ID NO: 5562 - protein, 24 aa, Human immunodeficiency virus 1
  source 1..24: note = HLAs: DRB1_0410 DRB1_0801 DRB1_0806 DRB1_1001 DRB1_1101 DRB1_1103 DRB1_1104 DRB1_1304 DRB1_1305 DPA10103-DPB10101 DPA10103-DPB10201 DPA10103-DPB10202 DPA10103-DPB10501 DPA10103-DPB11501 DPA10103-DPB11601 DPA10103-DPB11901 DPA10103-DPB13101 DPA10103-DPB13401 DPA10103-DPB14001 DPA10103-DPB14101 DPA10103-DPB14801 DPA10103-DPB15001 DPA10104-DPB10101 DPA10104-DPB11501 DPA10105-DPB10101 DPA10105-DPB15001 DPA10106-DPB10101 DPA10201-DPB10101 DPA10201-DPB10501 DPA10201-DPB110601 DPA10201-DPB11501 DPA10201-DPB11601 DPA10201-DPB11901 DPA10202-DPB10101 DPA10202-DPB10202 DPA10202-DPB10501 DPA10202-DPB110601 DPA10202-DPB11901 DPA10202-DPB13101 DPA10202-DPB13801 DPA10202-DPB16501 DPA10301-DPB10101 DPA10301-DPB10201 DPA10301-DPB10202 DPA10301-DPB10401 DPA10301-DPB10402 DPA10301-DPB110501 DPA10301-DPB110601 DPA10301-DPB11801 DPA10301-DPB12301 DPA10301-DPB13901 DPA10301-DPB14001 DPA10301-DPB14901 DPA10301-DPB15501 DPA10301-DPB16501 DPA10301-DPB18001 DPA10401-DPB10101 DPA10401-DPB10201 DPA10401-DPB10202; note = HLAs: DPA10401-DPB10501 DQA10102-DQB10501
TKWRKLVDFRELNKRTQDFWEVQL

SEQ ID NO: 5563 - protein, 25 aa, Human immunodeficiency virus 1
  source 1..25: note = HLAs: DRB1_0410 DRB1_0801 DRB1_0806 DRB1_1001 DRB1_1101 DRB1_1103 DRB1_1104 DRB1_1304 DRB1_1305 DPA10103-DPB10101 DPA10103-DPB10201 DPA10103-DPB10202 DPA10103-DPB10501 DPA10103-DPB11501 DPA10103-DPB11601 DPA10103-DPB11901 DPA10103-DPB13101 DPA10103-DPB13401 DPA10103-DPB14001 DPA10103-DPB14101 DPA10103-DPB14801 DPA10103-DPB15001 DPA10104-DPB10101 DPA10104-DPB11501 DPA10105-DPB10101 DPA10105-DPB15001 DPA10106-DPB10101 DPA10201-DPB10101 DPA10201-DPB10501 DPA10201-DPB110601 DPA10201-DPB11501 DPA10201-DPB11601 DPA10201-DPB11901 DPA10202-DPB10101 DPA10202-DPB10202 DPA10202-DPB10501 DPA10202-DPB110601 DPA10202-DPB11901 DPA10202-DPB13101 DPA10202-DPB13801 DPA10202-DPB16501 DPA10301-DPB10101 DPA10301-DPB10201 DPA10301-DPB10202 DPA10301-DPB10401 DPA10301-DPB10402 DPA10301-DPB110501 DPA10301-DPB110601 DPA10301-DPB11801 DPA10301-DPB12301 DPA10301-DPB13901 DPA10301-DPB14001 DPA10301-DPB14901 DPA10301-DPB15501 DPA10301-DPB16501 DPA10301-DPB18001 DPA10401-DPB10101 DPA10401-DPB10201 DPA10401-DPB10202; note = HLAs: DPA10401-DPB10501 DQA10102-DQB10501
TKWRKLVDFRELNKRTQDFWEVQLG

SEQ ID NO: 5564 - protein, 15 aa, Human immunodeficiency virus 1
  source 1..15: note = HLAs: DRB1_1001 DQA10201-DQB10301
TLEEMMTACQGVGGP

SEQ ID NO: 5565 - protein, 15 aa, Human immunodeficiency virus 1
  source 1..15: note = HLAs: DRB1_0405 DRB1_0410 DRB1_1114 DRB1_1302
TLLVQNANPDCKTIL

SEQ ID NO: 5566 - protein, 14 aa, Human immunodeficiency virus 1
  source 1..14: note = HLAs: DRB1_1001 DPA10301-DPB10101 DQA10102-DQB10501 DQA10102-DQB10602 DQA10102-DQB10609 DQA10102-DQB10610 DQA10102-DQB10611
TLNAWVKVVEEKAF

SEQ ID NO: 5567 - protein, 15 aa, Human immunodeficiency virus 1
  source 1..15: note = HLAs: DRB1_0101 DRB1_0806 DRB1_1001 DRB1_1103 DRB1_1104 DRB1_1304 DPA10103-DPB11501 DPA10104-DPB11501 DPA10301-DPB10101 DPA10301-DPB11801 DPA10301-DPB14001 DPA10401-DPB10101 DQA10102-DQB10501 DQA10102-DQB10601 DQA10102-DQB10602 DQA10102-DQB10609 DQA10102-DQB10610 DQA10102-DQB10611 DQA10103-DQB10609
TLNAWVKVVEEKAFS

SEQ ID NO: 5568 - protein, 16 aa, Human immunodeficiency virus 1
  source 1..16: note = HLAs: DRB1_1001 DRB1_1304 DPA10103-DPB11501 DPA10104-DPB11501 DPA10301-DPB10101 DPA10301-DPB110601 DPA10301-DPB11801 DPA10401-DPB10101 DQA10102-DQB10501 DQA10102-DQB10601 DQA10102-DQB10602 DQA10102-DQB10609 DQA10102-DQB10610 DQA10102-DQB10611 DQA10103-DQB10609
TLNAWVKVVEEKAFSP

SEQ ID NO: 5569 - protein, 17 aa, Human immunodeficiency virus 1
  source 1..17: note = HLAs: DRB1_1001 DRB1_1304 DPA10103-DPB11501 DPA10104-DPB11501 DPA10301-DPB10101 DPA10301-DPB11801 DPA10401-DPB10101 DQA10102-DQB10501 DQA10102-DQB10602 DQA10102-DQB10609 DQA10102-DQB10610 DQA10102-DQB10611 DQA10103-DQB10609
TLNAWVKVVEEKAFSPE

SEQ ID NO: 5570 - protein, 18 aa, Human immunodeficiency virus 1
  source 1..18: note = HLAs: DQA10102-DQB10609
TLNAWVKVVEEKAFSPEV

SEQ ID NO: 5571 - protein, 19 aa, Human immunodeficiency virus 1
  source 1..19: note = HLAs: DRB1_1001 DPA10103-DPB11501 DPA10104-DPB11501 DPA10202-DPB10101 DPA10301-DPB10101 DPA10301-DPB10201 DPA10301-DPB10202 DPA10301-DPB110601 DPA10301-DPB11801 DPA10301-DPB14001 DPA10301-DPB16501 DPA10401-DPB10101 DQA10102-DQB10501 DQA10102-DQB10602 DQA10102-DQB10609 DQA10102-DQB10610 DQA10102-DQB10611 DQA10103-DQB10609
TLNAWVKVVEEKAFSPEVI

SEQ ID NO: 5572 - protein, 20 aa, Human immunodeficiency virus 1
  source 1..20: note = HLAs: DRB1_0101 DRB1_1001 DRB1_1304 DPA10103-DPB10101 DPA10103-DPB11501 DPA10103-DPB13101 DPA10103-DPB15001 DPA10104-DPB10101 DPA10104-DPB11501 DPA10105-DPB10101 DPA10105-DPB15001 DPA10202-DPB10101 DPA10202-DPB110601 DPA10202-DPB11901 DPA10301-DPB10101 DPA10301-DPB10201 DPA10301-DPB10202 DPA10301-DPB110601 DPA10301-DPB11801 DPA10301-DPB14001 DPA10301-DPB16501 DPA10401-DPB10101 DPA10401-DPB10501 DQA10102-DQB10501 DQA10102-DQB10503 DQA10102-DQB10602 DQA10102-DQB10609 DQA10102-DQB10610 DQA10102-DQB10611 DQA10103-DQB10501 DQA10103-DQB10609 DQA10505-DQB10402
TLNAWVKVVEEKAFSPEVIP

SEQ ID NO: 5573 - protein, 21 aa, Human immunodeficiency virus 1
  source 1..21: note = HLAs: DRB1_1001 DPA10103-DPB11501 DPA10104-DPB11501 DPA10301-DPB10101 DPA10301-DPB10201 DPA10301-DPB10202 DPA10301-DPB110601 DPA10301-DPB11801 DPA10301-DPB14001 DPA10301-DPB16501 DPA10401-DPB10101 DQA10102-DQB10501 DQA10102-DQB10609 DQA10103-DQB10609
TLNAWVKVVEEKAFSPEVIPM

SEQ ID NO: 5574 - protein, 22 aa, Human immunodeficiency virus 1
  source 1..22: note = HLAs: DRB1_1001 DRB1_1304 DPA10103-DPB10101 DPA10103-DPB11501 DPA10103-DPB15001 DPA10104-DPB10101 DPA10104-DPB11501 DPA10105-DPB10101 DPA10105-DPB15001 DPA10202-DPB10101 DPA10301-DPB10101 DPA10301-DPB10201 DPA10301-DPB10202 DPA10301-DPB10401 DPA10301-DPB110601 DPA10301-DPB11801 DPA10301-DPB12301 DPA10301-DPB13901 DPA10301-DPB14001 DPA10301-DPB16501 DPA10401-DPB10101 DPA10401-DPB10202 DPA10401-DPB10501 DQA10102-DQB10501 DQA10102-DQB10503 DQA10102-DQB10609 DQA10103-DQB10501 DQA10103-DQB10609
TLNAWVKVVEEKAFSPEVIPMF

SEQ ID NO: 5575 - protein, 14 aa, Human immunodeficiency virus 1
  source 1..14: note = HLAs: DRB1_0701 DPA10301-DPB10101 DPA10401-DPB10101 DQA10102-DQB10501 DQA10102-DQB10609 DQA10103-DQB10609 DQA10201-DQB10303
TLNFPISPIETVPV

SEQ ID NO: 5576 - protein, 15 aa, Human immunodeficiency virus 1
  source 1..15: note = HLAs: DRB1_0101 DRB1_0102 DRB1_0401 DRB1_0404 DRB1_0405 DRB1_0408 DRB1_0410 DRB1_0701 DRB1_0802 DRB1_0803 DRB1_0809 DRB1_0813 DRB1_0901 DRB1_1001 DRB1_1102 DRB1_1114 DRB1_1201 DRB1_1301 DRB1_1302 DRB1_1304 DRB1_1401 DRB1_1402 DRB1_1404 DRB1_1406 DRB1_1454 DRB1_1501 DRB1_1502 DRB1_1602 DPA10103-DPB11501 DPA10104-DPB11501 DPA10202-DPB10101 DPA10301-DPB10101 DPA10301-DPB10201 DPA10301-DPB10202 DPA10301-DPB10401 DPA10301-DPB11801 DPA10301-DPB12301 DPA10301-DPB13901 DPA10301-DPB14001 DPA10301-DPB16501 DPA10401-DPB10101 DPA10401-DPB10201 DQA10102-DQB10501 DQA10102-DQB10601 DQA10102-DQB10609 DQA10103-DQB10501 DQA10103-DQB10601 DQA10103-DQB10609 DQA10201-DQB10301 DQA10201-DQB10303 DQA10505-DQB10402 DQA10506-DQB10303
TLNFPISPIETVPVK

SEQ ID NO: 5577 - protein, 16 aa, Human immunodeficiency virus 1
  source 1..16: note = HLAs: DRB1_0101 DRB1_0102 DRB1_0401 DRB1_0404 DRB1_0405 DRB1_0408 DRB1_0410 DRB1_0701 DRB1_0813 DRB1_0901 DRB1_1001 DRB1_1114 DRB1_1302 DRB1_1404 DRB1_1406 DRB1_1501 DRB1_1502 DRB1_1602 DPA10103-DPB11501 DPA10104-DPB11501 DPA10202-DPB10101 DPA10301-DPB10101 DPA10301-DPB10201 DPA10301-DPB10202 DPA10301-DPB10401 DPA10301-DPB11801 DPA10301-DPB12301 DPA10301-DPB13901 DPA10301-DPB16501 DPA10401-DPB10101 DQA10102-DQB10501 DQA10102-DQB10503 DQA10102-DQB10601 DQA10102-DQB10609 DQA10103-DQB10501 DQA10103-DQB10601 DQA10103-DQB10604 DQA10103-DQB10609 DQA10201-DQB10301 DQA10201-DQB10303 DQA10505-DQB10302 DQA10505-DQB10402 DQA10506-DQB10303
TLNFPISPIETVPVKL

SEQ ID NO: 5578 - protein, 17 aa, Human immunodeficiency virus 1
  source 1..17: note = HLAs: DRB1_0101 DRB1_0102 DRB1_0401 DRB1_0404 DRB1_0405 DRB1_0408 DRB1_0410 DRB1_0701 DRB1_0802 DRB1_0804 DRB1_0806 DRB1_0809 DRB1_0813 DRB1_0901 DRB1_1001 DRB1_1102 DRB1_1114 DRB1_1201 DRB1_1301 DRB1_1302 DRB1_1304 DRB1_1401 DRB1_1402 DRB1_1404 DRB1_1406 DRB1_1454 DRB1_1501 DRB1_1502 DRB1_1503 DRB1_1602 DPA10103-DPB10101 DPA10103-DPB11501 DPA10104-DPB10101 DPA10104-DPB11501 DPA10105-DPB10101 DPA10202-DPB10101 DPA10202-DPB110601 DPA10202-DPB11901 DPA10202-DPB13101 DPA10301-DPB10101 DPA10301-DPB10201 DPA10301-DPB10202 DPA10301-DPB10401 DPA10301-DPB110601 DPA10301-DPB11801 DPA10301-DPB12301 DPA10301-DPB13901 DPA10301-DPB14001 DPA10301-DPB16501 DPA10401-DPB10101 DPA10401-DPB10202 DQA10102-DQB10501 DQA10102-DQB10601 DQA10102-DQB10609 DQA10103-DQB10501 DQA10103-DQB10601 DQA10103-DQB10609 DQA10201-DQB10301 DQA10201-DQB10303 DQA10505-DQB10402 DQA10506-DQB10303
TLNFPISPIETVPVKLK

SEQ ID NO: 5579 - protein, 18 aa, Human immunodeficiency virus 1
  source 1..18: note = HLAs: DRB1_0101 DRB1_0102 DRB1_0404 DRB1_0701 DRB1_0813 DRB1_1001 DRB1_1114 DRB1_1302 DPA10202-DPB10101 DPA10301-DPB10101 DPA10401-DPB10101 DQA10102-DQB10501 DQA10102-DQB10601 DQA10102-DQB10609 DQA10103-DQB10601 DQA10103-DQB10609
TLNFPISPIETVPVKLKP

SEQ ID NO: 5580 - protein, 19 aa, Human immunodeficiency virus 1
  source 1..19: note = HLAs: DRB1_0101 DRB1_0102 DRB1_0401 DRB1_0404 DRB1_0405 DRB1_0408 DRB1_0410 DRB1_0701 DRB1_0802 DRB1_0804 DRB1_0809 DRB1_0813 DRB1_0901 DRB1_1001 DRB1_1102 DRB1_1114 DRB1_1201 DRB1_1301 DRB1_1302 DRB1_1304 DRB1_1401 DRB1_1402 DRB1_1404 DRB1_1406 DRB1_1454 DRB1_1501 DRB1_1502 DRB1_1602 DPA10103-DPB10101 DPA10103-DPB11501 DPA10104-DPB10101 DPA10104-DPB11501 DPA10105-DPB10101 DPA10202-DPB10101 DPA10202-DPB13101 DPA10301-DPB10101 DPA10301-DPB10201 DPA10301-DPB10202 DPA10301-DPB10401 DPA10301-DPB110601 DPA10301-DPB11801 DPA10301-DPB12301 DPA10301-DPB13901 DPA10301-DPB14001 DPA10301-DPB16501 DPA10401-DPB10101 DQA10102-DQB10501 DQA10102-DQB10601 DQA10102-DQB10609 DQA10103-DQB10501 DQA10103-DQB10601 DQA10103-DQB10609 DQA10201-DQB10301 DQA10201-DQB10303 DQA10505-DQB10402 DQA10506-DQB10303
TLNFPISPIETVPVKLKPG

SEQ ID NO: 5581 - protein, 20 aa, Human immunodeficiency virus 1
  source 1..20: note = HLAs: DRB1_0101 DRB1_0102 DRB1_0401 DRB1_0404 DRB1_0405 DRB1_0408 DRB1_0410 DRB1_0701 DRB1_0801 DRB1_0802 DRB1_0803 DRB1_0804 DRB1_0806 DRB1_0809 DRB1_0813 DRB1_0901 DRB1_1001 DRB1_1102 DRB1_1103 DRB1_1104 DRB1_1114 DRB1_1201 DRB1_1301 DRB1_1302 DRB1_1304 DRB1_1401 DRB1_1402 DRB1_1404 DRB1_1406 DRB1_1454 DRB1_1501 DRB1_1502 DRB1_1503 DRB1_1601 DRB1_1602 DPA10103-DPB10101 DPA10103-DPB11501 DPA10103-DPB15001 DPA10104-DPB10101 DPA10104-DPB11501 DPA10105-DPB10101 DPA10105-DPB15001 DPA10106-DPB10101 DPA10201-DPB10101 DPA10201-DPB11501 DPA10202-DPB10101 DPA10202-DPB10202 DPA10202-DPB10501 DPA10202-DPB110601 DPA10202-DPB11801 DPA10202-DPB11901 DPA10202-DPB13101 DPA10202-DPB13801 DPA10202-DPB16501 DPA10301-DPB10101 DPA10301-DPB10201 DPA10301-DPB10202 DPA10301-DPB10401 DPA10301-DPB10402 DPA10301-DPB110501 DPA10301-DPB110601 DPA10301-DPB11801 DPA10301-DPB12301 DPA10301-DPB13901 DPA10301-DPB14001 DPA10301-DPB14901 DPA10301-DPB16501 DPA10301-DPB17501 DPA10301-DPB18001 DPA10401-DPB10101; note = HLAs: DPA10401-DPB10201 DPA10401-DPB10202 DPA10401-DPB10501 DQA10102-DQB10501 DQA10102-DQB10503 DQA10102-DQB10601 DQA10102-DQB10609 DQA10103-DQB10501 DQA10103-DQB10601 DQA10103-DQB10602 DQA10103-DQB10604 DQA10103-DQB10608 DQA10103-DQB10609 DQA10201-DQB10301 DQA10201-DQB10303 DQA10505-DQB10402 DQA10506-DQB10303
TLNFPISPIETVPVKLKPGM

SEQ ID NO: 5582 - protein, 21 aa, Human immunodeficiency virus 1
  source 1..21: note = HLAs: DRB1_0101 DRB1_0102 DRB1_0401 DRB1_0404 DRB1_0405 DRB1_0408 DRB1_0410 DRB1_0701 DRB1_0802 DRB1_0803 DRB1_0804 DRB1_0806 DRB1_0809 DRB1_0813 DRB1_0901 DRB1_1001 DRB1_1102 DRB1_1103 DRB1_1114 DRB1_1201 DRB1_1301 DRB1_1302 DRB1_1304 DRB1_1401 DRB1_1402 DRB1_1404 DRB1_1406 DRB1_1454 DRB1_1501 DRB1_1502 DRB1_1602 DPA10103-DPB11501 DPA10104-DPB11501 DPA10202-DPB10101 DPA10301-DPB10101 DPA10301-DPB10201 DPA10301-DPB10202 DPA10301-DPB10401 DPA10301-DPB11801 DPA10301-DPB12301 DPA10301-DPB13901 DPA10301-DPB14001 DPA10301-DPB16501 DPA10401-DPB10101 DQA10102-DQB10501 DQA10102-DQB10601 DQA10102-DQB10609 DQA10103-DQB10501 DQA10103-DQB10601 DQA10103-DQB10609 DQA10505-DQB10402
TLNFPISPIETVPVKLKPGMD

SEQ ID NO: 5583 - protein, 22 aa, Human immunodeficiency virus 1
  source 1..22: note = HLAs: DRB1_0101 DRB1_0102 DRB1_0401 DRB1_0404 DRB1_0405 DRB1_0408 DRB1_0410 DRB1_0701 DRB1_0802 DRB1_0803 DRB1_0804 DRB1_0806 DRB1_0809 DRB1_0813 DRB1_0901 DRB1_1001 DRB1_1102 DRB1_1103 DRB1_1104 DRB1_1114 DRB1_1201 DRB1_1301 DRB1_1302 DRB1_1304 DRB1_1401 DRB1_1402 DRB1_1404 DRB1_1406 DRB1_1454 DRB1_1501 DRB1_1502 DRB1_1602 DPA10103-DPB11501 DPA10104-DPB11501 DPA10202-DPB10101 DPA10301-DPB10101 DPA10301-DPB10201 DPA10301-DPB10202 DPA10301-DPB10401 DPA10301-DPB11801 DPA10301-DPB12301 DPA10301-DPB13901 DPA10301-DPB14001 DPA10301-DPB16501 DPA10401-DPB10101 DQA10102-DQB10501 DQA10102-DQB10601 DQA10102-DQB10609 DQA10103-DQB10501 DQA10103-DQB10601 DQA10103-DQB10609 DQA10505-DQB10402
TLNFPISPIETVPVKLKPGMDG

SEQ ID NO: 5584 - protein, 23 aa, Human immunodeficiency virus 1
  source 1..23: note = HLAs: DRB1_0101 DRB1_0102 DRB1_0401 DRB1_0404 DRB1_0405 DRB1_0408 DRB1_0410 DRB1_0701 DRB1_0801 DRB1_0802 DRB1_0803 DRB1_0804 DRB1_0806 DRB1_0809 DRB1_0813 DRB1_0901 DRB1_1001 DRB1_1102 DRB1_1103 DRB1_1104 DRB1_1114 DRB1_1201 DRB1_1301 DRB1_1302 DRB1_1304 DRB1_1401 DRB1_1402 DRB1_1404 DRB1_1406 DRB1_1454 DRB1_1501 DRB1_1502 DRB1_1602 DPA10103-DPB11501 DPA10104-DPB11501 DPA10202-DPB10101 DPA10301-DPB10101 DPA10301-DPB10201 DPA10301-DPB10202 DPA10301-DPB10401 DPA10301-DPB110601 DPA10301-DPB11801 DPA10301-DPB12301 DPA10301-DPB13901 DPA10301-DPB14001 DPA10301-DPB16501 DPA10401-DPB10101 DQA10102-DQB10501 DQA10102-DQB10601 DQA10102-DQB10609 DQA10103-DQB10501 DQA10103-DQB10601 DQA10103-DQB10609 DQA10505-DQB10402
TLNFPISPIETVPVKLKPGMDGP

SEQ ID NO: 5585 - protein, 24 aa, Human immunodeficiency virus 1
  source 1..24: note = HLAs: DRB1_0101 DRB1_0102 DRB1_0401 DRB1_0404 DRB1_0405 DRB1_0408 DRB1_0410 DRB1_0701 DRB1_0801 DRB1_0802 DRB1_0803 DRB1_0804 DRB1_0806 DRB1_0809 DRB1_0813 DRB1_0901 DRB1_1001 DRB1_1102 DRB1_1103 DRB1_1104 DRB1_1114 DRB1_1201 DRB1_1301 DRB1_1302 DRB1_1304 DRB1_1401 DRB1_1402 DRB1_1404 DRB1_1406 DRB1_1454 DRB1_1501 DRB1_1502 DRB1_1602 DPA10103-DPB11501 DPA10104-DPB11501 DPA10202-DPB10101 DPA10301-DPB10101 DPA10301-DPB10201 DPA10301-DPB10202 DPA10301-DPB10401 DPA10301-DPB110601 DPA10301-DPB11801 DPA10301-DPB12301 DPA10301-DPB13901 DPA10301-DPB14001 DPA10301-DPB16501 DPA10401-DPB10101 DQA10102-DQB10501 DQA10102-DQB10601 DQA10102-DQB10609 DQA10103-DQB10501 DQA10103-DQB10601 DQA10103-DQB10609 DQA10505-DQB10402
TLNFPISPIETVPVKLKPGMDGPK

SEQ ID NO: 5586 - protein, 25 aa, Human immunodeficiency virus 1
  source 1..25: note = HLAs: DRB1_0101 DRB1_0102 DRB1_0401 DRB1_0404 DRB1_0405 DRB1_0408 DRB1_0410 DRB1_0701 DRB1_0801 DRB1_0802 DRB1_0803 DRB1_0804 DRB1_0806 DRB1_0809 DRB1_0813 DRB1_0901 DRB1_1001 DRB1_1102 DRB1_1103 DRB1_1104 DRB1_1114 DRB1_1201 DRB1_1301 DRB1_1302 DRB1_1304 DRB1_1401 DRB1_1402 DRB1_1404 DRB1_1406 DRB1_1454 DRB1_1501 DRB1_1502 DRB1_1602 DPA10103-DPB11501 DPA10104-DPB11501 DPA10202-DPB10101 DPA10301-DPB10101 DPA10301-DPB10201 DPA10301-DPB10202 DPA10301-DPB10401 DPA10301-DPB110601 DPA10301-DPB11801 DPA10301-DPB12301 DPA10301-DPB13901 DPA10301-DPB14001 DPA10301-DPB16501 DPA10401-DPB10101 DQA10102-DQB10501 DQA10102-DQB10601 DQA10102-DQB10609 DQA10103-DQB10501 DQA10103-DQB10601 DQA10103-DQB10609 DQA10505-DQB10402
TLNFPISPIETVPVKLKPGMDGPKV

SEQ ID NO: 5587 - protein, 14 aa, Human immunodeficiency virus 1
  source 1..14: note = HLAs: DQA10103-DQB10601 DQA10201-DQB10301
TMLNTVGGHQAAMQ

SEQ ID NO: 5588 - protein, 15 aa, Human immunodeficiency virus 1
  source 1..15: note = HLAs: DRB1_0101 DRB1_0102 DRB1_0901 DRB1_1001 DQA10102-DQB10501 DQA10102-DQB10601 DQA10103-DQB10601 DQA10201-DQB10301 DQA10201-DQB10303 DQA10301-DQB10301 DQA10302-DQB10301 DQA10303-DQB10301 DQA10501-DQB10301 DQA10501-DQB10319 DQA10503-DQB10301 DQA10505-DQB10301 DQA10505-DQB10309 DQA10505-DQB10319 DQA10505-DQB10402 DQA10506-DQB10303 DQA10508-DQB10301 DQA10509-DQB10301
TMLNTVGGHQAAMQM

SEQ ID NO: 5589 - protein, 16 aa, Human immunodeficiency virus 1
  source 1..16: note = HLAs: DRB1_0101 DQA10102-DQB10501 DQA10102-DQB10601 DQA10102-DQB10602 DQA10102-DQB10609 DQA10103-DQB10601 DQA10103-DQB10609 DQA10201-DQB10301 DQA10201-DQB10303 DQA10301-DQB10301 DQA10302-DQB10301 DQA10303-DQB10301 DQA10501-DQB10301 DQA10501-DQB10319 DQA10503-DQB10301 DQA10505-DQB10301 DQA10505-DQB10309 DQA10505-DQB10319 DQA10505-DQB10402 DQA10506-DQB10303 DQA10508-DQB10301 DQA10509-DQB10301
TMLNTVGGHQAAMQML

SEQ ID NO: 5590 - protein, 17 aa, Human immunodeficiency virus 1
  source 1..17: note = HLAs: DRB1_0101 DRB1_1001 DQA10102-DQB10501 DQA10102-DQB10601 DQA10102-DQB10602 DQA10102-DQB10609 DQA10103-DQB10601 DQA10103-DQB10602 DQA10103-DQB10609 DQA10201-DQB10301 DQA10201-DQB10303 DQA10501-DQB10301 DQA10501-DQB10319 DQA10503-DQB10301 DQA10505-DQB10301 DQA10505-DQB10309 DQA10505-DQB10319 DQA10505-DQB10402 DQA10506-DQB10303 DQA10508-DQB10301 DQA10509-DQB10301
TMLNTVGGHQAAMQMLK

SEQ ID NO: 5591 - protein, 18 aa, Human immunodeficiency virus 1
  source 1..18: note = HLAs: DQA10102-DQB10601 DQA10103-DQB10601
TMLNTVGGHQAAMQMLKD

SEQ ID NO: 5592 - protein, 19 aa, Human immunodeficiency virus 1
  source 1..19: note = HLAs: DQA10102-DQB10501 DQA10102-DQB10601 DQA10102-DQB10602 DQA10102-DQB10609 DQA10102-DQB10611 DQA10103-DQB10601 DQA10103-DQB10609 DQA10201-DQB10301 DQA10201-DQB10303
TMLNTVGGHQAAMQMLKDT

SEQ ID NO: 5593 - protein, 20 aa, Human immunodeficiency virus 1
  source 1..20: note = HLAs: DRB1_0101 DRB1_1001 DPA10301-DPB10101 DPA10401-DPB10101 DQA10102-DQB10501 DQA10102-DQB10503 DQA10102-DQB10601 DQA10102-DQB10602 DQA10102-DQB10609 DQA10102-DQB10610 DQA10102-DQB10611 DQA10103-DQB10501 DQA10103-DQB10601 DQA10103-DQB10602 DQA10103-DQB10609 DQA10201-DQB10301 DQA10201-DQB10303 DQA10505-DQB10402 DQA10506-DQB10303
TMLNTVGGHQAAMQMLKDTI

SEQ ID NO: 5594 - protein, 21 aa, Human immunodeficiency virus 1
  source 1..21: note = HLAs: DRB1_0101 DRB1_1001 DPA10401-DPB10101 DQA10102-DQB10501 DQA10102-DQB10601 DQA10102-DQB10609 DQA10103-DQB10601 DQA10103-DQB10609 DQA10201-DQB10301
TMLNTVGGHQAAMQMLKDTIN

SEQ ID NO: 5595 - protein, 20 aa, Human immunodeficiency virus 1
  source 1..20: note = HLAs: DRB1_1001 DPA10103-DPB10101 DPA10103-DPB10201 DPA10103-DPB10202 DPA10103-DPB10401 DPA10103-DPB112601 DPA10103-DPB11501 DPA10103-DPB11601 DPA10103-DPB11901 DPA10103-DPB12301 DPA10103-DPB13101 DPA10103-DPB13401 DPA10103-DPB13901 DPA10103-DPB14001 DPA10103-DPB14801 DPA10103-DPB15001 DPA10104-DPB10101 DPA10104-DPB11501 DPA10105-DPB10101 DPA10105-DPB10401 DPA10105-DPB15001 DPA10106-DPB10101 DPA10201-DPB10101 DPA10201-DPB11501 DPA10202-DPB10101 DPA10202-DPB10202 DPA10202-DPB110601 DPA10202-DPB11901 DPA10202-DPB13101 DPA10202-DPB16501 DPA10301-DPB10101 DPA10301-DPB10201 DPA10301-DPB10202 DPA10301-DPB10401 DPA10301-DPB10402 DPA10301-DPB110501 DPA10301-DPB110601 DPA10301-DPB11801 DPA10301-DPB12301 DPA10301-DPB13901 DPA10301-DPB14001 DPA10301-DPB14901 DPA10301-DPB16501 DPA10301-DPB17501 DPA10301-DPB18001 DPA10401-DPB10101 DPA10401-DPB10201 DPA10401-DPB10202 DPA10401-DPB10501 DQA10102-DQB10501
TPDKKHQKEPPFLWMGYELH

SEQ ID NO: 5596 - protein, 21 aa, Human immunodeficiency virus 1
  source 1..21: note = HLAs: DRB1_1001 DPA10103-DPB10101 DPA10103-DPB10201 DPA10103-DPB10202 DPA10103-DPB10401 DPA10103-DPB112601 DPA10103-DPB11501 DPA10103-DPB11601 DPA10103-DPB11901 DPA10103-DPB12301 DPA10103-DPB13101 DPA10103-DPB13401 DPA10103-DPB13901 DPA10103-DPB14001 DPA10103-DPB14101 DPA10103-DPB14801 DPA10103-DPB15001 DPA10104-DPB10101 DPA10104-DPB11501 DPA10105-DPB10101 DPA10105-DPB10401 DPA10105-DPB15001 DPA10106-DPB10101 DPA10201-DPB10101 DPA10201-DPB11501 DPA10202-DPB10101 DPA10202-DPB13101 DPA10301-DPB10101 DPA10301-DPB10201 DPA10301-DPB10202 DPA10301-DPB10401 DPA10301-DPB10402 DPA10301-DPB110501 DPA10301-DPB110601 DPA10301-DPB11801 DPA10301-DPB12301 DPA10301-DPB13901 DPA10301-DPB14001 DPA10301-DPB14901 DPA10301-DPB16501 DPA10301-DPB18001 DPA10401-DPB10101 DPA10401-DPB10201 DPA10401-DPB10202 DPA10401-DPB10501 DQA10102-DQB10501
TPDKKHQKEPPFLWMGYELHP

SEQ ID NO: 5597 - protein, 22 aa, Human immunodeficiency virus 1
  source 1..22: note = HLAs: DRB1_1001 DPA10103-DPB10101 DPA10103-DPB10201 DPA10103-DPB10202 DPA10103-DPB10401 DPA10103-DPB112601 DPA10103-DPB11501 DPA10103-DPB11601 DPA10103-DPB11901 DPA10103-DPB12301 DPA10103-DPB13101 DPA10103-DPB13401 DPA10103-DPB13901 DPA10103-DPB14001 DPA10103-DPB14101 DPA10103-DPB14801 DPA10103-DPB15001 DPA10103-DPB15901 DPA10104-DPB10101 DPA10104-DPB11501 DPA10105-DPB10101 DPA10105-DPB10401 DPA10105-DPB15001 DPA10106-DPB10101 DPA10201-DPB10101 DPA10201-DPB11501 DPA10201-DPB11601 DPA10202-DPB10101 DPA10202-DPB10202 DPA10202-DPB110601 DPA10202-DPB11901 DPA10202-DPB13101 DPA10202-DPB16501 DPA10301-DPB10101 DPA10301-DPB10201 DPA10301-DPB10202 DPA10301-DPB10401 DPA10301-DPB10402 DPA10301-DPB110501 DPA10301-DPB110601 DPA10301-DPB11801 DPA10301-DPB12301 DPA10301-DPB13901 DPA10301-DPB14001 DPA10301-DPB14901 DPA10301-DPB15501 DPA10301-DPB16501 DPA10301-DPB17501 DPA10301-DPB18001 DPA10401-DPB10101 DPA10401-DPB10201 DPA10401-DPB10202 DPA10401-DPB10501 DQA10101-DQB10501 DQA10102-DQB10501; note = HLAs: DQA10102-DQB10502 DQA10104-DQB10501 DQA10105-DQB10501
TPDKKHQKEPPFLWMGYELHPD

SEQ ID NO: 5598 - protein, 23 aa, Human immunodeficiency virus 1
  source 1..23: note = HLAs: DRB1_1001 DPA10103-DPB10101 DPA10103-DPB10201 DPA10103-DPB10202 DPA10103-DPB10401 DPA10103-DPB112601 DPA10103-DPB11501 DPA10103-DPB11601 DPA10103-DPB11801 DPA10103-DPB11901 DPA10103-DPB12301 DPA10103-DPB13101 DPA10103-DPB13401 DPA10103-DPB13901 DPA10103-DPB14001 DPA10103-DPB14101 DPA10103-DPB14801 DPA10103-DPB15001 DPA10103-DPB15901 DPA10104-DPB10101 DPA10104-DPB11501 DPA10105-DPB10101 DPA10105-DPB10401 DPA10105-DPB11801 DPA10105-DPB15001 DPA10106-DPB10101 DPA10201-DPB10101 DPA10201-DPB10202 DPA10201-DPB110601 DPA10201-DPB11501 DPA10201-DPB11601 DPA10201-DPB11901 DPA10202-DPB10101 DPA10202-DPB10201 DPA10202-DPB10202 DPA10202-DPB10401 DPA10202-DPB110601 DPA10202-DPB11901 DPA10202-DPB13101 DPA10202-DPB16501 DPA10301-DPB10101 DPA10301-DPB10201 DPA10301-DPB10202 DPA10301-DPB10401 DPA10301-DPB10402 DPA10301-DPB110501 DPA10301-DPB110601 DPA10301-DPB11801 DPA10301-DPB12301 DPA10301-DPB13901 DPA10301-DPB14001 DPA10301-DPB14901 DPA10301-DPB15501 DPA10301-DPB16501 DPA10301-DPB17501; note = HLAs: DPA10301-DPB18001 DPA10401-DPB10101 DPA10401-DPB10201 DPA10401-DPB10202 DPA10401-DPB10402 DPA10401-DPB10501 DPA10401-DPB110501 DPA10401-DPB14901 DQA10101-DQB10501 DQA10102-DQB10501 DQA10102-DQB10502 DQA10102-DQB10503 DQA10103-DQB10501 DQA10104-DQB10501 DQA10105-DQB10501
TPDKKHQKEPPFLWMGYELHPDK

SEQ ID NO: 5599 - protein, 24 aa, Human immunodeficiency virus 1
  source 1..24: note = HLAs: DRB1_0101 DRB1_1001 DPA10103-DPB10101 DPA10103-DPB10201 DPA10103-DPB10202 DPA10103-DPB10401 DPA10103-DPB10501 DPA10103-DPB112601 DPA10103-DPB11501 DPA10103-DPB11601 DPA10103-DPB11801 DPA10103-DPB11901 DPA10103-DPB12301 DPA10103-DPB13101 DPA10103-DPB13401 DPA10103-DPB13901 DPA10103-DPB14001 DPA10103-DPB14101 DPA10103-DPB14801 DPA10103-DPB15001 DPA10103-DPB15901 DPA10104-DPB10101 DPA10104-DPB11501 DPA10105-DPB10101 DPA10105-DPB10401 DPA10105-DPB11801 DPA10105-DPB15001 DPA10106-DPB10101 DPA10201-DPB10101 DPA10201-DPB10202 DPA10201-DPB110601 DPA10201-DPB11501 DPA10201-DPB11601 DPA10201-DPB11901 DPA10201-DPB13401 DPA10202-DPB10101 DPA10202-DPB10201 DPA10202-DPB10202 DPA10202-DPB10401 DPA10202-DPB110601 DPA10202-DPB11901 DPA10202-DPB13101 DPA10202-DPB16501 DPA10301-DPB10101 DPA10301-DPB10201 DPA10301-DPB10202 DPA10301-DPB10401 DPA10301-DPB10402 DPA10301-DPB110501 DPA10301-DPB110601 DPA10301-DPB11301 DPA10301-DPB11801 DPA10301-DPB12301 DPA10301-DPB13901 DPA10301-DPB14001; note = HLAs: DPA10301-DPB14901 DPA10301-DPB15501 DPA10301-DPB16501 DPA10301-DPB17501 DPA10301-DPB18001 DPA10401-DPB10101 DPA10401-DPB10201 DPA10401-DPB10202 DPA10401-DPB10402 DPA10401-DPB10501 DPA10401-DPB110501 DPA10401-DPB14901 DQA10101-DQB10501 DQA10102-DQB10501 DQA10102-DQB10502 DQA10102-DQB10503 DQA10103-DQB10501 DQA10104-DQB10501 DQA10105-DQB10501
TPDKKHQKEPPFLWMGYELHPDKW

SEQ ID NO: 5600 - protein, 25 aa, Human immunodeficiency virus 1
  source 1..25: note = HLAs: DRB1_0101 DRB1_0405 DRB1_1001 DRB1_1501 DPA10103-DPB10101 DPA10103-DPB10201 DPA10103-DPB10202 DPA10103-DPB10401 DPA10103-DPB10501 DPA10103-DPB112601 DPA10103-DPB11501 DPA10103-DPB11601 DPA10103-DPB11801 DPA10103-DPB11901 DPA10103-DPB12301 DPA10103-DPB13101 DPA10103-DPB13401 DPA10103-DPB13901 DPA10103-DPB14001 DPA10103-DPB14101 DPA10103-DPB14801 DPA10103-DPB15001 DPA10103-DPB15901 DPA10104-DPB10101 DPA10104-DPB11501 DPA10105-DPB10101 DPA10105-DPB10401 DPA10105-DPB11801 DPA10105-DPB15001 DPA10106-DPB10101 DPA10201-DPB10101 DPA10201-DPB10202 DPA10201-DPB110601 DPA10201-DPB11501 DPA10201-DPB11601 DPA10201-DPB11901 DPA10201-DPB13401 DPA10202-DPB10101 DPA10202-DPB10201 DPA10202-DPB10202 DPA10202-DPB10401 DPA10202-DPB10501 DPA10202-DPB110601 DPA10202-DPB11901 DPA10202-DPB13101 DPA10202-DPB13801 DPA10202-DPB15501 DPA10202-DPB16501 DPA10301-DPB10101 DPA10301-DPB10201 DPA10301-DPB10202 DPA10301-DPB10401 DPA10301-DPB10402 DPA10301-DPB110501 DPA10301-DPB110601 DPA10301-DPB11301; note = HLAs: DPA10301-DPB11801 DPA10301-DPB12301 DPA10301-DPB13901 DPA10301-DPB14001 DPA10301-DPB14901 DPA10301-DPB15501 DPA10301-DPB16501 DPA10301-DPB17501 DPA10301-DPB18001 DPA10401-DPB10101 DPA10401-DPB10201 DPA10401-DPB10202 DPA10401-DPB10402 DPA10401-DPB10501 DPA10401-DPB110501 DPA10401-DPB14901 DQA10101-DQB10501 DQA10102-DQB10501 DQA10102-DQB10502 DQA10102-DQB10503 DQA10103-DQB10501 DQA10104-DQB10501 DQA10105-DQB10501
TPDKKHQKEPPFLWMGYELHPDKWT

SEQ ID NO: 5601 - protein, 13 aa, Human immunodeficiency virus 1
  source 1..13: note = HLAs: DRB1_0401 DRB1_0404 DRB1_0408
TPGIRYQYNVLPQ

SEQ ID NO: 5602 - protein, 14 aa, Human immunodeficiency virus 1
  source 1..14: note = HLAs: DRB1_0101 DRB1_0102 DRB1_0401 DRB1_0404 DRB1_0405 DRB1_0408 DRB1_0410 DRB1_0813 DRB1_1001 DRB1_1114 DRB1_1302 DRB1_1501 DRB1_1602 DQA10102-DQB10501
TPGIRYQYNVLPQG

SEQ ID NO: 5603 - protein, 15 aa, Human immunodeficiency virus 1
  source 1..15: note = HLAs: DRB1_0101 DRB1_0102 DRB1_0401 DRB1_0402 DRB1_0404 DRB1_0405 DRB1_0408 DRB1_0410 DRB1_0801 DRB1_0802 DRB1_0804 DRB1_0806 DRB1_0809 DRB1_0813 DRB1_1001 DRB1_1101 DRB1_1102 DRB1_1103 DRB1_1104 DRB1_1114 DRB1_1301 DRB1_1302 DRB1_1304 DRB1_1305 DRB1_1402 DRB1_1406 DRB1_1501 DRB1_1502 DRB1_1503 DRB1_1601 DRB1_1602 DPA10103-DPB11501 DPA10104-DPB11501 DPA10301-DPB10101 DPA10301-DPB10201 DPA10301-DPB10202 DPA10301-DPB110601 DPA10301-DPB11801 DPA10401-DPB10101 DQA10102-DQB10501 DQA10102-DQB10503 DQA10103-DQB10501
TPGIRYQYNVLPQGW

SEQ ID NO: 5604 - protein, 16 aa, Human immunodeficiency virus 1
  source 1..16: note = HLAs: DRB1_0101 DRB1_0102 DRB1_0401 DRB1_0402 DRB1_0404 DRB1_0405 DRB1_0408 DRB1_0410 DRB1_0801 DRB1_0802 DRB1_0804 DRB1_0809 DRB1_0813 DRB1_1001 DRB1_1101 DRB1_1102 DRB1_1114 DRB1_1301 DRB1_1302 DRB1_1305 DRB1_1402 DRB1_1406 DRB1_1501 DRB1_1502 DRB1_1601 DRB1_1602 DPA10103-DPB15001 DPA10105-DPB15001 DPA10301-DPB10101 DPA10301-DPB10201 DPA10301-DPB10202 DPA10301-DPB110601 DPA10401-DPB10101 DPA10401-DPB10201 DPA10401-DPB10501 DQA10102-DQB10501 DQA10102-DQB10503 DQA10103-DQB10501
TPGIRYQYNVLPQGWK

SEQ ID NO: 5605 - protein, 17 aa, Human immunodeficiency virus 1
  source 1..17: note = HLAs: DRB1_0101 DRB1_0102 DRB1_0401 DRB1_0404 DRB1_0405 DRB1_0408 DRB1_0410 DRB1_0801 DRB1_0802 DRB1_0804 DRB1_0806 DRB1_0809 DRB1_0813 DRB1_1001 DRB1_1101 DRB1_1102 DRB1_1104 DRB1_1114 DRB1_1301 DRB1_1302 DRB1_1304 DRB1_1305 DRB1_1402 DRB1_1406 DRB1_1501 DRB1_1502 DRB1_1601 DRB1_1602 DPA10301-DPB10101 DPA10301-DPB10201 DPA10301-DPB10202 DPA10301-DPB110601 DPA10401-DPB10101 DQA10102-DQB10501 DQA10102-DQB10503 DQA10103-DQB10501
TPGIRYQYNVLPQGWKG

SEQ ID NO: 5606 - protein, 18 aa, Human immunodeficiency virus 1
  source 1..18: note = HLAs: DRB1_0401 DRB1_0404 DRB1_0408 DRB1_1001 DQA10102-DQB10501
TPGIRYQYNVLPQGWKGS

SEQ ID NO: 5607 - protein, 19 aa, Human immunodeficiency virus 1
  source 1..19: note = HLAs: DRB1_0101 DRB1_0401 DRB1_0404 DRB1_0405 DRB1_0408 DRB1_0410 DRB1_0802 DRB1_0809 DRB1_0813 DRB1_1001 DRB1_1101 DRB1_1114 DRB1_1302 DRB1_1305 DRB1_1406 DRB1_1501 DRB1_1602 DPA10301-DPB10101 DPA10301-DPB10201 DPA10301-DPB10202 DPA10301-DPB110601 DPA10401-DPB10101 DQA10102-DQB10501 DQA10102-DQB10503 DQA10103-DQB10501
TPGIRYQYNVLPQGWKGSP

SEQ ID NO: 5608 - protein, 20 aa, Human immunodeficiency virus 1
  source 1..20: note = HLAs: DRB1_0101 DRB1_0102 DRB1_0401 DRB1_0404 DRB1_0405 DRB1_0408 DRB1_0410 DRB1_0801 DRB1_0802 DRB1_0804 DRB1_0806 DRB1_0809 DRB1_0813 DRB1_1001 DRB1_1101 DRB1_1102 DRB1_1104 DRB1_1114 DRB1_1301 DRB1_1302 DRB1_1304 DRB1_1305 DRB1_1402 DRB1_1403 DRB1_1406 DRB1_1501 DRB1_1502 DRB1_1503 DRB1_1601 DRB1_1602 DPA10103-DPB10101 DPA10103-DPB11501 DPA10103-DPB15001 DPA10104-DPB10101 DPA10104-DPB11501 DPA10105-DPB10101 DPA10105-DPB15001 DPA10202-DPB10101 DPA10202-DPB110601 DPA10202-DPB11901 DPA10202-DPB13101 DPA10301-DPB10101 DPA10301-DPB10201 DPA10301-DPB10202 DPA10301-DPB110601 DPA10301-DPB11801 DPA10301-DPB16501 DPA10401-DPB10101 DPA10401-DPB10201 DPA10401-DPB10202 DPA10401-DPB10501 DQA10102-DQB10501 DQA10102-DQB10503 DQA10103-DQB10501
TPGIRYQYNVLPQGWKGSPA

SEQ ID NO: 5609 - protein, 21 aa, Human immunodeficiency virus 1
  source 1..21: note = HLAs: DRB1_0101 DRB1_0401 DRB1_0404 DRB1_0405 DRB1_0408 DRB1_0410 DRB1_0802 DRB1_0809 DRB1_0813 DRB1_1001 DRB1_1101 DRB1_1114 DRB1_1302 DRB1_1305 DRB1_1406 DRB1_1501 DRB1_1602 DPA10301-DPB10101 DPA10301-DPB110601 DPA10401-DPB10101 DQA10102-DQB10501 DQA10103-DQB10501
TPGIRYQYNVLPQGWKGSPAI

SEQ ID NO: 5610 - protein, 22 aa, Human immunodeficiency virus 1
  source 1..22: note = HLAs: DRB1_0101 DRB1_0401 DRB1_0404 DRB1_0405 DRB1_0408 DRB1_0410 DRB1_0801 DRB1_0802 DRB1_0809 DRB1_0813 DRB1_1001 DRB1_1101 DRB1_1114 DRB1_1302 DRB1_1305 DRB1_1406 DRB1_1501 DRB1_1602 DPA10301-DPB10101 DPA10301-DPB110601 DPA10401-DPB10101 DQA10102-DQB10501 DQA10103-DQB10501
TPGIRYQYNVLPQGWKGSPAIF

SEQ ID NO: 5611 - protein, 23 aa, Human immunodeficiency virus 1
  source 1..23: note = HLAs: DRB1_0101 DRB1_0401 DRB1_0404 DRB1_0405 DRB1_0408 DRB1_0410 DRB1_0801 DRB1_0802 DRB1_0806 DRB1_0809 DRB1_0813 DRB1_1001 DRB1_1101 DRB1_1102 DRB1_1114 DRB1_1301 DRB1_1302 DRB1_1304 DRB1_1305 DRB1_1402 DRB1_1406 DRB1_1501 DRB1_1602 DPA10301-DPB10101 DPA10301-DPB110601 DPA10301-DPB11801 DPA10401-DPB10101 DQA10102-DQB10501 DQA10102-DQB10503 DQA10103-DQB10501 DQA10505-DQB10402
TPGIRYQYNVLPQGWKGSPAIFQ

SEQ ID NO: 5612 - protein, 14 aa, Human immunodeficiency virus 1
  source 1..14: note = HLAs: DRB1_0404
TPQDLNTMLNTVGG

SEQ ID NO: 5613 - protein, 15 aa, Human immunodeficiency virus 1
  source 1..15: note = HLAs: DRB1_0101 DRB1_0404 DRB1_0408 DRB1_0410 DRB1_1001
TPQDLNTMLNTVGGH

SEQ ID NO: 5614 - protein, 16 aa, Human immunodeficiency virus 1
  source 1..16: note = HLAs: DRB1_0404 DRB1_0408 DRB1_1001 DQA10102-DQB10501
TPQDLNTMLNTVGGHQ

SEQ ID NO: 5615 - protein, 17 aa, Human immunodeficiency virus 1
  source 1..17: note = HLAs: DRB1_0404 DRB1_0408 DRB1_1001 DQA10102-DQB10501
TPQDLNTMLNTVGGHQA

SEQ ID NO: 5616 - protein, 19 aa, Human immunodeficiency virus 1
  source 1..19: note = HLAs: DRB1_0101 DRB1_0404 DRB1_1001 DQA10102-DQB10501 DQA10103-DQB10601
TPQDLNTMLNTVGGHQAAM

SEQ ID NO: 5617 - protein, 20 aa, Human immunodeficiency virus 1
  source 1..20: note = HLAs: DRB1_0101 DRB1_0404 DRB1_0408 DRB1_0410 DRB1_1001 DQA10102-DQB10501 DQA10102-DQB10601 DQA10103-DQB10501 DQA10103-DQB10601 DQA10103-DQB10602 DQA10103-DQB10609 DQA10201-DQB10301 DQA10201-DQB10303 DQA10505-DQB10402 DQA10506-DQB10303
TPQDLNTMLNTVGGHQAAMQ

SEQ ID NO: 5618 - protein, 21 aa, Human immunodeficiency virus 1
  source 1..21: note = HLAs: DRB1_0101 DRB1_0404 DRB1_1001 DQA10102-DQB10501 DQA10102-DQB10601 DQA10103-DQB10601 DQA10201-DQB10301
TPQDLNTMLNTVGGHQAAMQM

SEQ ID NO: 5619 - protein, 22 aa, Human immunodeficiency virus 1
  source 1..22: note = HLAs: DRB1_0101 DRB1_0404 DRB1_1001 DQA10102-DQB10501 DQA10102-DQB10601 DQA10103-DQB10601 DQA10103-DQB10609 DQA10201-DQB10301 DQA10201-DQB10303
TPQDLNTMLNTVGGHQAAMQML

SEQ ID NO: 5620 - protein, 23 aa, Human immunodeficiency virus 1
  source 1..23: note = HLAs: DRB1_0101 DRB1_0404 DRB1_0408 DRB1_1001 DQA10102-DQB10501 DQA10102-DQB10601 DQA10103-DQB10601 DQA10103-DQB10609 DQA10201-DQB10301 DQA10201-DQB10303
TPQDLNTMLNTVGGHQAAMQMLK

SEQ ID NO: 5621 - protein, 13 aa, Human immunodeficiency virus 1
  source 1..13: note = HLAs: DRB1_1103 DRB1_1104
TPVFAIKKKDSTK

SEQ ID NO: 5622 - protein, 14 aa, Human immunodeficiency virus 1
  source 1..14: note = HLAs: DRB1_0804 DRB1_0806 DRB1_1101 DRB1_1102 DRB1_1103 DRB1_1104 DRB1_1301 DRB1_1304 DRB1_1305
TPVFAIKKKDSTKW

SEQ ID NO: 5623 - protein, 15 aa, Human immunodeficiency virus 1
  source 1..15: note = HLAs: DRB1_0801 DRB1_0802 DRB1_0804 DRB1_0806 DRB1_0809 DRB1_1101 DRB1_1102 DRB1_1103 DRB1_1104 DRB1_1301 DRB1_1304 DRB1_1305 DRB1_1406
TPVFAIKKKDSTKWR

SEQ ID NO: 5624 - protein, 16 aa, Human immunodeficiency virus 1
  source 1..16: note = HLAs: DRB1_0804 DRB1_0806 DRB1_1101 DRB1_1102 DRB1_1103 DRB1_1104 DRB1_1301 DRB1_1304 DRB1_1305 DRB1_1406
TPVFAIKKKDSTKWRK

SEQ ID NO: 5625 - protein, 17 aa, Human immunodeficiency virus 1
  source 1..17: note = HLAs: DRB1_0804 DRB1_0806 DRB1_1101 DRB1_1102 DRB1_1103 DRB1_1104 DRB1_1301 DRB1_1304 DRB1_1305 DRB1_1406
TPVFAIKKKDSTKWRKL

SEQ ID NO: 5626 - protein, 18 aa, Human immunodeficiency virus 1
  source 1..18: note = HLAs: DRB1_1103 DRB1_1104
TPVFAIKKKDSTKWRKLV

SEQ ID NO: 5627 - protein, 19 aa, Human immunodeficiency virus 1
  source 1..19: note = HLAs: DRB1_0804 DRB1_0806 DRB1_1101 DRB1_1102 DRB1_1103 DRB1_1104 DRB1_1301 DRB1_1304 DRB1_1305 DRB1_1406
TPVFAIKKKDSTKWRKLVD

SEQ ID NO: 5628 - protein, 20 aa, Human immunodeficiency virus 1
  source 1..20: note = HLAs: DRB1_0801 DRB1_0804 DRB1_0806 DRB1_1101 DRB1_1102 DRB1_1103 DRB1_1104 DRB1_1301 DRB1_1304 DRB1_1305 DRB1_1406 DPA10202-DPB110601 DPA10202-DPB11901 DPA10202-DPB13101 DPA10301-DPB110601
TPVFAIKKKDSTKWRKLVDF

SEQ ID NO: 5629 - protein, 21 aa, Human immunodeficiency virus 1
  source 1..21: note = HLAs: DRB1_0804 DRB1_0806 DRB1_1101 DRB1_1102 DRB1_1103 DRB1_1104 DRB1_1301 DRB1_1304 DRB1_1305 DRB1_1406
TPVFAIKKKDSTKWRKLVDFR

SEQ ID NO: 5630 - protein, 22 aa, Human immunodeficiency virus 1
  source 1..22: note = HLAs: DRB1_0801 DRB1_0804 DRB1_0806 DRB1_1101 DRB1_1102 DRB1_1103 DRB1_1104 DRB1_1301 DRB1_1304 DRB1_1305 DRB1_1406 DPA10202-DPB13101
TPVFAIKKKDSTKWRKLVDFRE

SEQ ID NO: 5631 - protein, 23 aa, Human immunodeficiency virus 1
  source 1..23: note = HLAs: DRB1_0410 DRB1_0801 DRB1_0804 DRB1_0806 DRB1_1101 DRB1_1102 DRB1_1103 DRB1_1104 DRB1_1301 DRB1_1304 DRB1_1305 DRB1_1406 DPA10103-DPB10101 DPA10103-DPB10201 DPA10103-DPB10202 DPA10103-DPB11501 DPA10103-DPB11601 DPA10103-DPB11901 DPA10103-DPB13101 DPA10103-DPB13401 DPA10103-DPB14101 DPA10103-DPB14801 DPA10103-DPB15001 DPA10104-DPB10101 DPA10104-DPB11501 DPA10105-DPB10101 DPA10105-DPB15001 DPA10201-DPB110601 DPA10201-DPB11601 DPA10201-DPB11901 DPA10202-DPB10101 DPA10202-DPB10501 DPA10202-DPB110601 DPA10202-DPB11901 DPA10202-DPB13101 DPA10202-DPB13801 DPA10202-DPB16501 DPA10301-DPB10101 DPA10301-DPB10201 DPA10301-DPB10202 DPA10301-DPB10401 DPA10301-DPB110601 DPA10301-DPB11801 DPA10301-DPB12301 DPA10301-DPB13901 DPA10301-DPB14001 DPA10301-DPB16501 DPA10401-DPB10101 DPA10401-DPB10201 DPA10401-DPB10202 DPA10401-DPB10501
TPVFAIKKKDSTKWRKLVDFREL

SEQ ID NO: 5632 - protein, 24 aa, Human immunodeficiency virus 1
  source 1..24: note = HLAs: DRB1_0405 DRB1_0410 DRB1_0801 DRB1_0804 DRB1_0806 DRB1_1001 DRB1_1101 DRB1_1102 DRB1_1103 DRB1_1104 DRB1_1301 DRB1_1304 DRB1_1305 DRB1_1406 DPA10103-DPB10101 DPA10103-DPB10201 DPA10103-DPB10202 DPA10103-DPB10501 DPA10103-DPB11501 DPA10103-DPB11601 DPA10103-DPB11901 DPA10103-DPB13101 DPA10103-DPB13401 DPA10103-DPB14001 DPA10103-DPB14101 DPA10103-DPB14801 DPA10103-DPB15001 DPA10104-DPB10101 DPA10104-DPB11501 DPA10105-DPB10101 DPA10105-DPB15001 DPA10201-DPB110601 DPA10201-DPB11501 DPA10201-DPB11601 DPA10201-DPB11901 DPA10202-DPB10101 DPA10202-DPB10501 DPA10202-DPB110601 DPA10202-DPB11901 DPA10202-DPB13101 DPA10202-DPB13801 DPA10202-DPB16501 DPA10301-DPB10101 DPA10301-DPB10201 DPA10301-DPB10202 DPA10301-DPB10401 DPA10301-DPB110601 DPA10301-DPB11801 DPA10301-DPB12301 DPA10301-DPB13901 DPA10301-DPB14001 DPA10301-DPB16501 DPA10401-DPB10101 DPA10401-DPB10201 DPA10401-DPB10202 DPA10401-DPB10501
TPVFAIKKKDSTKWRKLVDFRELN

SEQ ID NO: 5633 - protein, 25 aa, Human immunodeficiency virus 1
  source 1..25: note = HLAs: DRB1_0405 DRB1_0410 DRB1_0801 DRB1_0804 DRB1_0806 DRB1_1001 DRB1_1101 DRB1_1102 DRB1_1103 DRB1_1104 DRB1_1301 DRB1_1304 DRB1_1305 DRB1_1406 DPA10103-DPB10101 DPA10103-DPB10201 DPA10103-DPB10202 DPA10103-DPB10501 DPA10103-DPB11501 DPA10103-DPB11601 DPA10103-DPB11901 DPA10103-DPB13101 DPA10103-DPB13401 DPA10103-DPB14001 DPA10103-DPB14101 DPA10103-DPB14801 DPA10103-DPB15001 DPA10104-DPB10101 DPA10104-DPB11501 DPA10105-DPB10101 DPA10105-DPB15001 DPA10106-DPB10101 DPA10201-DPB10101 DPA10201-DPB110601 DPA10201-DPB11501 DPA10201-DPB11601 DPA10201-DPB11901 DPA10202-DPB10101 DPA10202-DPB10202 DPA10202-DPB10501 DPA10202-DPB110601 DPA10202-DPB11901 DPA10202-DPB13101 DPA10202-DPB13801 DPA10202-DPB16501 DPA10301-DPB10101 DPA10301-DPB10201 DPA10301-DPB10202 DPA10301-DPB10401 DPA10301-DPB10402 DPA10301-DPB110501 DPA10301-DPB110601 DPA10301-DPB11801 DPA10301-DPB12301 DPA10301-DPB13901 DPA10301-DPB14001 DPA10301-DPB14901 DPA10301-DPB15501 DPA10301-DPB16501 DPA10301-DPB18001 DPA10401-DPB10101; note = HLAs: DPA10401-DPB10201 DPA10401-DPB10202 DPA10401-DPB10501
TPVFAIKKKDSTKWRKLVDFRELNK

SEQ ID NO: 5634 - protein, 14 aa, Human immunodeficiency virus 1
  source 1..14: note = HLAs: DRB1_1001 DPA10301-DPB10101
TQDFWEVQLGIPHP

SEQ ID NO: 5635 - protein, 15 aa, Human immunodeficiency virus 1
  source 1..15: note = HLAs: DRB1_0101 DRB1_0102 DRB1_0901 DRB1_1001 DPA10103-DPB11501 DPA10104-DPB11501 DPA10202-DPB10101 DPA10301-DPB10101 DPA10301-DPB10201 DPA10301-DPB10202 DPA10301-DPB10401 DPA10301-DPB11801 DPA10301-DPB12301 DPA10301-DPB13901 DPA10301-DPB14001 DPA10301-DPB16501 DPA10401-DPB10101 DQA10102-DQB10501 DQA10102-DQB10503 DQA10102-DQB10601 DQA10103-DQB10501 DQA10103-DQB10601 DQA10201-DQB10301 DQA10201-DQB10303 DQA10301-DQB10301 DQA10302-DQB10301 DQA10303-DQB10301 DQA10401-DQB10301 DQA10401-DQB10319 DQA10501-DQB10301 DQA10501-DQB10319 DQA10503-DQB10301 DQA10505-DQB10301 DQA10505-DQB10309 DQA10505-DQB10319 DQA10505-DQB10402 DQA10506-DQB10303 DQA10508-DQB10301 DQA10509-DQB10301 DQA10601-DQB10301
TQDFWEVQLGIPHPA

SEQ ID NO: 5636 - protein, 16 aa, Human immunodeficiency virus 1
  source 1..16: note = HLAs: DRB1_0101 DRB1_0102 DRB1_0901 DRB1_1001 DPA10301-DPB10101 DPA10301-DPB10201 DPA10301-DPB10202 DPA10301-DPB10401 DPA10301-DPB11801 DPA10301-DPB12301 DPA10301-DPB13901 DPA10301-DPB16501 DPA10401-DPB10101 DQA10101-DQB10601 DQA10102-DQB10501 DQA10102-DQB10503 DQA10102-DQB10601 DQA10103-DQB10501 DQA10103-DQB10601 DQA10201-DQB10301 DQA10201-DQB10303 DQA10301-DQB10301 DQA10301-DQB10304 DQA10302-DQB10301 DQA10302-DQB10304 DQA10303-DQB10301 DQA10303-DQB10304 DQA10401-DQB10301 DQA10401-DQB10319 DQA10501-DQB10301 DQA10501-DQB10319 DQA10503-DQB10301 DQA10505-DQB10301 DQA10505-DQB10309 DQA10505-DQB10319 DQA10505-DQB10402 DQA10506-DQB10303 DQA10508-DQB10301 DQA10509-DQB10301 DQA10601-DQB10301
TQDFWEVQLGIPHPAG

SEQ ID NO: 5637 - protein, 17 aa, Human immunodeficiency virus 1
  source 1..17: note = HLAs: DRB1_0101 DRB1_0102 DRB1_0901 DRB1_1001 DPA10103-DPB11501 DPA10104-DPB11501 DPA10301-DPB10101 DPA10301-DPB10201 DPA10301-DPB10202 DPA10301-DPB11801 DPA10401-DPB10101 DQA10101-DQB10601 DQA10102-DQB10501 DQA10102-DQB10503 DQA10102-DQB10601 DQA10103-DQB10501 DQA10103-DQB10601 DQA10103-DQB10602 DQA10201-DQB10301 DQA10201-DQB10303 DQA10301-DQB10301 DQA10302-DQB10301 DQA10303-DQB10301 DQA10401-DQB10301 DQA10401-DQB10319 DQA10501-DQB10301 DQA10501-DQB10319 DQA10503-DQB10301 DQA10505-DQB10301 DQA10505-DQB10309 DQA10505-DQB10319 DQA10505-DQB10402 DQA10506-DQB10303 DQA10508-DQB10301 DQA10509-DQB10301 DQA10601-DQB10301
TQDFWEVQLGIPHPAGL

SEQ ID NO: 5638 - protein, 18 aa, Human immunodeficiency virus 1
  source 1..18: note = HLAs: DRB1_0101 DRB1_1001 DQA10102-DQB10501 DQA10102-DQB10503 DQA10102-DQB10601 DQA10103-DQB10601 DQA10201-DQB10301 DQA10201-DQB10303 DQA10301-DQB10301 DQA10302-DQB10301 DQA10303-DQB10301 DQA10401-DQB10301 DQA10401-DQB10319 DQA10501-DQB10301 DQA10501-DQB10319 DQA10503-DQB10301 DQA10505-DQB10301 DQA10505-DQB10309 DQA10505-DQB10319 DQA10505-DQB10402 DQA10506-DQB10303 DQA10508-DQB10301 DQA10509-DQB10301 DQA10601-DQB10301
TQDFWEVQLGIPHPAGLK

SEQ ID NO: 5639 - protein, 19 aa, Human immunodeficiency virus 1
  source 1..19: note = HLAs: DRB1_0101 DRB1_0102 DRB1_0901 DRB1_1001 DPA10301-DPB10101 DPA10401-DPB10101 DQA10101-DQB10601 DQA10102-DQB10501 DQA10102-DQB10503 DQA10102-DQB10601 DQA10103-DQB10501 DQA10103-DQB10601 DQA10103-DQB10602 DQA10201-DQB10301 DQA10201-DQB10303 DQA10301-DQB10301 DQA10302-DQB10301 DQA10303-DQB10301 DQA10401-DQB10301 DQA10401-DQB10319 DQA10501-DQB10301 DQA10501-DQB10319 DQA10503-DQB10301 DQA10505-DQB10301 DQA10505-DQB10309 DQA10505-DQB10319 DQA10505-DQB10402 DQA10506-DQB10303 DQA10508-DQB10301 DQA10509-DQB10301 DQA10601-DQB10301
TQDFWEVQLGIPHPAGLKK

SEQ ID NO: 5640 - protein, 20 aa, Human immunodeficiency virus 1
  source 1..20: note = HLAs: DRB1_0101 DRB1_0102 DRB1_0901 DRB1_1001 DPA10103-DPB10101 DPA10103-DPB11501 DPA10103-DPB15001 DPA10104-DPB10101 DPA10104-DPB11501 DPA10105-DPB10101 DPA10105-DPB15001 DPA10202-DPB10101 DPA10301-DPB10101 DPA10301-DPB10201 DPA10301-DPB10202 DPA10301-DPB10401 DPA10301-DPB110601 DPA10301-DPB11801 DPA10301-DPB12301 DPA10301-DPB13901 DPA10301-DPB16501 DPA10401-DPB10101 DQA10101-DQB10601 DQA10102-DQB10501 DQA10102-DQB10503 DQA10102-DQB10601 DQA10102-DQB10602 DQA10102-DQB10611 DQA10103-DQB10501 DQA10103-DQB10503 DQA10103-DQB10601 DQA10103-DQB10602 DQA10103-DQB10609 DQA10201-DQB10301 DQA10201-DQB10303 DQA10301-DQB10301 DQA10302-DQB10301 DQA10303-DQB10301 DQA10401-DQB10301 DQA10401-DQB10319 DQA10501-DQB10301 DQA10501-DQB10319 DQA10503-DQB10301 DQA10505-DQB10301 DQA10505-DQB10309 DQA10505-DQB10319 DQA10505-DQB10402 DQA10506-DQB10303 DQA10508-DQB10301 DQA10509-DQB10301 DQA10601-DQB10301
TQDFWEVQLGIPHPAGLKKK

SEQ ID NO: 5641 - protein, 21 aa, Human immunodeficiency virus 1
  source 1..21: note = HLAs: DRB1_0101 DRB1_0102 DRB1_0901 DRB1_1001 DPA10301-DPB10101 DPA10401-DPB10101 DQA10102-DQB10501 DQA10102-DQB10503 DQA10102-DQB10601 DQA10103-DQB10501 DQA10103-DQB10601 DQA10201-DQB10301 DQA10201-DQB10303 DQA10301-DQB10301 DQA10302-DQB10301 DQA10303-DQB10301 DQA10401-DQB10301 DQA10401-DQB10319 DQA10501-DQB10301 DQA10501-DQB10319 DQA10503-DQB10301 DQA10505-DQB10301 DQA10505-DQB10309 DQA10505-DQB10319 DQA10505-DQB10402 DQA10506-DQB10303 DQA10508-DQB10301 DQA10509-DQB10301 DQA10601-DQB10301
TQDFWEVQLGIPHPAGLKKKK

SEQ ID NO: 5642 - protein, 22 aa, Human immunodeficiency virus 1
  source 1..22: note = HLAs: DRB1_0101 DRB1_0102 DRB1_0901 DRB1_1001 DPA10301-DPB10101 DPA10401-DPB10101 DQA10102-DQB10501 DQA10102-DQB10503 DQA10102-DQB10601 DQA10103-DQB10501 DQA10103-DQB10601 DQA10201-DQB10301 DQA10201-DQB10303 DQA10301-DQB10301 DQA10302-DQB10301 DQA10303-DQB10301 DQA10401-DQB10301 DQA10401-DQB10319 DQA10501-DQB10301 DQA10501-DQB10319 DQA10503-DQB10301 DQA10505-DQB10301 DQA10505-DQB10309 DQA10505-DQB10319 DQA10505-DQB10402 DQA10506-DQB10303 DQA10508-DQB10301 DQA10509-DQB10301 DQA10601-DQB10301
TQDFWEVQLGIPHPAGLKKKKS

SEQ ID NO: 5643 - protein, 23 aa, Human immunodeficiency virus 1
  source 1..23: note = HLAs: DRB1_0101 DRB1_0102 DRB1_0901 DRB1_1001 DPA10301-DPB10101 DPA10401-DPB10101 DQA10102-DQB10501 DQA10102-DQB10503 DQA10102-DQB10601 DQA10103-DQB10501 DQA10103-DQB10601 DQA10201-DQB10301 DQA10201-DQB10303 DQA10301-DQB10301 DQA10302-DQB10301 DQA10303-DQB10301 DQA10401-DQB10301 DQA10401-DQB10319 DQA10501-DQB10301 DQA10501-DQB10319 DQA10503-DQB10301 DQA10505-DQB10301 DQA10505-DQB10309 DQA10505-DQB10319 DQA10505-DQB10402 DQA10506-DQB10303 DQA10508-DQB10301 DQA10509-DQB10301 DQA10601-DQB10301
TQDFWEVQLGIPHPAGLKKKKSV

SEQ ID NO: 5644 - protein, 24 aa, Human immunodeficiency virus 1
  source 1..24: note = HLAs: DRB1_0101 DRB1_0102 DRB1_0901 DRB1_1001 DPA10301-DPB10101 DPA10401-DPB10101 DQA10102-DQB10501 DQA10102-DQB10503 DQA10102-DQB10601 DQA10103-DQB10501 DQA10103-DQB10601 DQA10201-DQB10301 DQA10201-DQB10303 DQA10301-DQB10301 DQA10302-DQB10301 DQA10303-DQB10301 DQA10401-DQB10301 DQA10401-DQB10319 DQA10501-DQB10301 DQA10501-DQB10319 DQA10503-DQB10301 DQA10505-DQB10301 DQA10505-DQB10309 DQA10505-DQB10319 DQA10505-DQB10402 DQA10506-DQB10303 DQA10508-DQB10301 DQA10509-DQB10301 DQA10601-DQB10301
TQDFWEVQLGIPHPAGLKKKKSVT

SEQ ID NO: 5645 - protein, 25 aa, Human immunodeficiency virus 1
  source 1..25: note = HLAs: DRB1_0101 DRB1_0102 DRB1_0901 DRB1_1001 DRB1_1102 DRB1_1103 DRB1_1104 DRB1_1301 DRB1_1304 DPA10301-DPB10101 DPA10401-DPB10101 DQA10102-DQB10501 DQA10102-DQB10503 DQA10102-DQB10601 DQA10103-DQB10501 DQA10103-DQB10601 DQA10201-DQB10301 DQA10201-DQB10303 DQA10301-DQB10301 DQA10302-DQB10301 DQA10303-DQB10301 DQA10401-DQB10301 DQA10401-DQB10319 DQA10501-DQB10301 DQA10501-DQB10319 DQA10503-DQB10301 DQA10505-DQB10301 DQA10505-DQB10309 DQA10505-DQB10319 DQA10505-DQB10402 DQA10506-DQB10303 DQA10508-DQB10301 DQA10509-DQB10301 DQA10601-DQB10301
TQDFWEVQLGIPHPAGLKKKKSVTV

SEQ ID NO: 5646 - protein, 14 aa, Human immunodeficiency virus 1
  source 1..14: note = HLAs: DRB1_0701 DQA10102-DQB10501
TQIGCTLNFPISPI

SEQ ID NO: 5647 - protein, 15 aa, Human immunodeficiency virus 1
  source 1..15: note = HLAs: DRB1_0101 DRB1_0410 DRB1_0701 DRB1_0901 DRB1_1001 DRB1_1114 DRB1_1302 DRB1_1304 DRB1_1406 DRB1_1501 DRB1_1502 DRB1_1602 DPA10301-DPB10101 DPA10301-DPB10201 DQA10102-DQB10501 DQA10103-DQB10501
TQIGCTLNFPISPIE

SEQ ID NO: 5648 - protein, 16 aa, Human immunodeficiency virus 1
  source 1..16: note = HLAs: DRB1_0701 DPA10301-DPB10101 DQA10102-DQB10501 DQA10102-DQB10503 DQA10102-DQB10609 DQA10103-DQB10501
TQIGCTLNFPISPIET

SEQ ID NO: 5649 - protein, 17 aa, Human immunodeficiency virus 1
  source 1..17: note = HLAs: DRB1_0701 DRB1_1001 DPA10301-DPB10101 DPA10301-DPB10201 DPA10301-DPB10202 DPA10301-DPB14001 DPA10401-DPB10101 DQA10102-DQB10501 DQA10102-DQB10609 DQA10103-DQB10501 DQA10103-DQB10609
TQIGCTLNFPISPIETV

SEQ ID NO: 5650 - protein, 18 aa, Human immunodeficiency virus 1
  source 1..18: note = HLAs: DPA10301-DPB10101 DQA10102-DQB10501
TQIGCTLNFPISPIETVP

SEQ ID NO: 5651 - protein, 19 aa, Human immunodeficiency virus 1
  source 1..19: note = HLAs: DRB1_0101 DRB1_0701 DRB1_0901 DRB1_1001 DRB1_1114 DRB1_1302 DPA10103-DPB11501 DPA10104-DPB11501 DPA10202-DPB10101 DPA10301-DPB10101 DPA10301-DPB10201 DPA10301-DPB10202 DPA10301-DPB10401 DPA10301-DPB110601 DPA10301-DPB11801 DPA10301-DPB12301 DPA10301-DPB13901 DPA10301-DPB14001 DPA10301-DPB16501 DPA10401-DPB10101 DQA10102-DQB10501 DQA10102-DQB10503 DQA10102-DQB10609 DQA10103-DQB10501 DQA10103-DQB10609
TQIGCTLNFPISPIETVPV

SEQ ID NO: 5652 - protein, 20 aa, Human immunodeficiency virus 1
  source 1..20: note = HLAs: DRB1_0101 DRB1_0102 DRB1_0401 DRB1_0404 DRB1_0405 DRB1_0408 DRB1_0410 DRB1_0701 DRB1_0803 DRB1_0813 DRB1_0901 DRB1_1001 DRB1_1102 DRB1_1114 DRB1_1301 DRB1_1302 DRB1_1304 DRB1_1401 DRB1_1404 DRB1_1406 DRB1_1454 DRB1_1501 DRB1_1502 DRB1_1602 DPA10103-DPB10101 DPA10103-DPB11501 DPA10103-DPB13101 DPA10104-DPB10101 DPA10104-DPB11501 DPA10105-DPB10101 DPA10106-DPB10101 DPA10201-DPB10101 DPA10202-DPB10101 DPA10202-DPB110601 DPA10202-DPB11901 DPA10202-DPB13101 DPA10202-DPB15501 DPA10202-DPB16501 DPA10301-DPB10101 DPA10301-DPB10201 DPA10301-DPB10202 DPA10301-DPB10401 DPA10301-DPB10402 DPA10301-DPB110501 DPA10301-DPB110601 DPA10301-DPB11801 DPA10301-DPB12301 DPA10301-DPB13901 DPA10301-DPB14001 DPA10301-DPB14901 DPA10301-DPB15501 DPA10301-DPB16501 DPA10301-DPB17501 DPA10301-DPB18001 DPA10401-DPB10101 DPA10401-DPB10201 DPA10401-DPB10202 DQA10102-DQB10501 DQA10102-DQB10503 DQA10102-DQB10601 DQA10102-DQB10609 DQA10103-DQB10501 DQA10103-DQB10601 DQA10103-DQB10604 DQA10103-DQB10608; note = HLAs: DQA10103-DQB10609 DQA10201-DQB10301 DQA10201-DQB10303 DQA10505-DQB10402 DQA10506-DQB10303
TQIGCTLNFPISPIETVPVK

SEQ ID NO: 5653 - protein, 21 aa, Human immunodeficiency virus 1
  source 1..21: note = HLAs: DRB1_0101 DRB1_0102 DRB1_0401 DRB1_0404 DRB1_0405 DRB1_0408 DRB1_0410 DRB1_0701 DRB1_0803 DRB1_0813 DRB1_0901 DRB1_1001 DRB1_1114 DRB1_1302 DRB1_1304 DRB1_1401 DRB1_1404 DRB1_1406 DRB1_1454 DRB1_1501 DRB1_1502 DRB1_1602 DPA10103-DPB10101 DPA10103-DPB11501 DPA10104-DPB10101 DPA10104-DPB11501 DPA10105-DPB10101 DPA10202-DPB10101 DPA10301-DPB10101 DPA10301-DPB10201 DPA10301-DPB10202 DPA10301-DPB10401 DPA10301-DPB110601 DPA10301-DPB11801 DPA10301-DPB12301 DPA10301-DPB13901 DPA10301-DPB14001 DPA10301-DPB16501 DPA10401-DPB10101 DPA10401-DPB10201 DQA10102-DQB10501 DQA10102-DQB10503 DQA10102-DQB10609 DQA10103-DQB10501 DQA10103-DQB10601 DQA10103-DQB10609
TQIGCTLNFPISPIETVPVKL

SEQ ID NO: 5654 - protein, 22 aa, Human immunodeficiency virus 1
  source 1..22: note = HLAs: DRB1_0101 DRB1_0102 DRB1_0401 DRB1_0404 DRB1_0405 DRB1_0408 DRB1_0410 DRB1_0701 DRB1_0801 DRB1_0802 DRB1_0803 DRB1_0804 DRB1_0806 DRB1_0809 DRB1_0813 DRB1_0901 DRB1_1001 DRB1_1102 DRB1_1114 DRB1_1201 DRB1_1301 DRB1_1302 DRB1_1304 DRB1_1312 DRB1_1401 DRB1_1402 DRB1_1404 DRB1_1406 DRB1_1454 DRB1_1501 DRB1_1502 DRB1_1503 DRB1_1602 DPA10103-DPB10101 DPA10103-DPB11501 DPA10104-DPB10101 DPA10104-DPB11501 DPA10105-DPB10101 DPA10202-DPB10101 DPA10202-DPB110601 DPA10202-DPB11901 DPA10202-DPB13101 DPA10301-DPB10101 DPA10301-DPB10201 DPA10301-DPB10202 DPA10301-DPB10401 DPA10301-DPB110601 DPA10301-DPB11801 DPA10301-DPB12301 DPA10301-DPB13901 DPA10301-DPB14001 DPA10301-DPB16501 DPA10401-DPB10101 DPA10401-DPB10201 DPA10401-DPB10202 DQA10102-DQB10501 DQA10102-DQB10503 DQA10102-DQB10601 DQA10102-DQB10609 DQA10103-DQB10501 DQA10103-DQB10601 DQA10103-DQB10604 DQA10103-DQB10609 DQA10505-DQB10402
TQIGCTLNFPISPIETVPVKLK

SEQ ID NO: 5655 - protein, 23 aa, Human immunodeficiency virus 1
  source 1..23: note = HLAs: DRB1_0101 DRB1_0102 DRB1_0401 DRB1_0404 DRB1_0405 DRB1_0408 DRB1_0410 DRB1_0701 DRB1_0801 DRB1_0802 DRB1_0803 DRB1_0804 DRB1_0806 DRB1_0809 DRB1_0813 DRB1_0901 DRB1_1001 DRB1_1102 DRB1_1114 DRB1_1201 DRB1_1301 DRB1_1302 DRB1_1304 DRB1_1312 DRB1_1401 DRB1_1402 DRB1_1404 DRB1_1406 DRB1_1454 DRB1_1501 DRB1_1502 DRB1_1503 DRB1_1602 DPA10103-DPB10101 DPA10103-DPB11501 DPA10104-DPB10101 DPA10104-DPB11501 DPA10105-DPB10101 DPA10202-DPB10101 DPA10202-DPB110601 DPA10202-DPB11901 DPA10202-DPB13101 DPA10301-DPB10101 DPA10301-DPB10201 DPA10301-DPB10202 DPA10301-DPB10401 DPA10301-DPB110601 DPA10301-DPB11801 DPA10301-DPB12301 DPA10301-DPB13901 DPA10301-DPB14001 DPA10301-DPB16501 DPA10401-DPB10101 DPA10401-DPB10201 DPA10401-DPB10202 DQA10102-DQB10501 DQA10102-DQB10503 DQA10102-DQB10601 DQA10102-DQB10609 DQA10103-DQB10501 DQA10103-DQB10601 DQA10103-DQB10604 DQA10103-DQB10609 DQA10505-DQB10402
TQIGCTLNFPISPIETVPVKLKP

SEQ ID NO: 5656 - protein, 24 aa, Human immunodeficiency virus 1
  source 1..24: note = HLAs: DRB1_0101 DRB1_0102 DRB1_0401 DRB1_0404 DRB1_0405 DRB1_0408 DRB1_0410 DRB1_0701 DRB1_0801 DRB1_0802 DRB1_0803 DRB1_0804 DRB1_0806 DRB1_0809 DRB1_0813 DRB1_0901 DRB1_1001 DRB1_1102 DRB1_1103 DRB1_1114 DRB1_1201 DRB1_1301 DRB1_1302 DRB1_1304 DRB1_1312 DRB1_1401 DRB1_1402 DRB1_1404 DRB1_1406 DRB1_1454 DRB1_1501 DRB1_1502 DRB1_1503 DRB1_1602 DPA10103-DPB10101 DPA10103-DPB11501 DPA10104-DPB10101 DPA10104-DPB11501 DPA10105-DPB10101 DPA10202-DPB10101 DPA10202-DPB110601 DPA10202-DPB11901 DPA10202-DPB13101 DPA10301-DPB10101 DPA10301-DPB10201 DPA10301-DPB10202 DPA10301-DPB10401 DPA10301-DPB110601 DPA10301-DPB11801 DPA10301-DPB12301 DPA10301-DPB13901 DPA10301-DPB14001 DPA10301-DPB16501 DPA10401-DPB10101 DPA10401-DPB10201 DPA10401-DPB10202 DQA10102-DQB10501 DQA10102-DQB10503 DQA10102-DQB10601 DQA10102-DQB10609 DQA10103-DQB10501 DQA10103-DQB10601 DQA10103-DQB10604 DQA10103-DQB10609 DQA10201-DQB10303 DQA10505-DQB10402
TQIGCTLNFPISPIETVPVKLKPG

SEQ ID NO: 5657 - protein, 25 aa, Human immunodeficiency virus 1
  source 1..25: note = HLAs: DRB1_0101 DRB1_0102 DRB1_0401 DRB1_0404 DRB1_0405 DRB1_0408 DRB1_0410 DRB1_0701 DRB1_0801 DRB1_0802 DRB1_0803 DRB1_0804 DRB1_0806 DRB1_0809 DRB1_0813 DRB1_0901 DRB1_1001 DRB1_1102 DRB1_1103 DRB1_1104 DRB1_1114 DRB1_1201 DRB1_1301 DRB1_1302 DRB1_1304 DRB1_1312 DRB1_1401 DRB1_1402 DRB1_1404 DRB1_1406 DRB1_1454 DRB1_1501 DRB1_1502 DRB1_1503 DRB1_1601 DRB1_1602 DPA10103-DPB10101 DPA10103-DPB11501 DPA10103-DPB15001 DPA10104-DPB10101 DPA10104-DPB11501 DPA10105-DPB10101 DPA10105-DPB15001 DPA10202-DPB10101 DPA10202-DPB110601 DPA10202-DPB11901 DPA10202-DPB13101 DPA10202-DPB16501 DPA10301-DPB10101 DPA10301-DPB10201 DPA10301-DPB10202 DPA10301-DPB10401 DPA10301-DPB110601 DPA10301-DPB11801 DPA10301-DPB12301 DPA10301-DPB13901 DPA10301-DPB14001 DPA10301-DPB16501 DPA10401-DPB10101 DPA10401-DPB10201 DPA10401-DPB10202 DPA10401-DPB10501 DQA10102-DQB10501 DQA10102-DQB10503 DQA10102-DQB10601 DQA10102-DQB10609 DQA10103-DQB10501 DQA10103-DQB10601 DQA10103-DQB10604 DQA10103-DQB10609 DQA10201-DQB10303; note = HLAs: DQA10505-DQB10402
TQIGCTLNFPISPIETVPVKLKPGM

SEQ ID NO: 5658 - protein, 21 aa, Human immunodeficiency virus 1
  source 1..21: note = HLAs: DPA10103-DPB10101 DPA10103-DPB10201 DPA10103-DPB10202 DPA10103-DPB10401 DPA10103-DPB112601 DPA10103-DPB11501 DPA10103-DPB11601 DPA10103-DPB12301 DPA10103-DPB13101 DPA10103-DPB13401 DPA10103-DPB13901 DPA10103-DPB14801 DPA10104-DPB10101 DPA10104-DPB11501 DPA10105-DPB10101 DPA10105-DPB10401 DPA10106-DPB10101 DPA10201-DPB10101 DPA10202-DPB10101 DPA10301-DPB10101 DPA10301-DPB10201 DPA10301-DPB10202 DPA10301-DPB10401 DPA10301-DPB10402 DPA10301-DPB110501 DPA10301-DPB110601 DPA10301-DPB11801 DPA10301-DPB12301 DPA10301-DPB13901 DPA10301-DPB14001 DPA10301-DPB14901 DPA10301-DPB16501 DPA10301-DPB18001 DPA10401-DPB10101 DPA10401-DPB10201 DPA10401-DPB10202
TTPDKKHQKEPPFLWMGYELH

SEQ ID NO: 5659 - protein, 22 aa, Human immunodeficiency virus 1
  source 1..22: note = HLAs: DRB1_1001 DPA10103-DPB10101 DPA10103-DPB10201 DPA10103-DPB10202 DPA10103-DPB10401 DPA10103-DPB112601 DPA10103-DPB11501 DPA10103-DPB11601 DPA10103-DPB11901 DPA10103-DPB12301 DPA10103-DPB13101 DPA10103-DPB13401 DPA10103-DPB13901 DPA10103-DPB14001 DPA10103-DPB14101 DPA10103-DPB14801 DPA10103-DPB15001 DPA10104-DPB10101 DPA10104-DPB11501 DPA10105-DPB10101 DPA10105-DPB10401 DPA10105-DPB15001 DPA10106-DPB10101 DPA10201-DPB10101 DPA10201-DPB11501 DPA10202-DPB10101 DPA10202-DPB13101 DPA10301-DPB10101 DPA10301-DPB10201 DPA10301-DPB10202 DPA10301-DPB10401 DPA10301-DPB10402 DPA10301-DPB110501 DPA10301-DPB110601 DPA10301-DPB11801 DPA10301-DPB12301 DPA10301-DPB13901 DPA10301-DPB14001 DPA10301-DPB14901 DPA10301-DPB16501 DPA10301-DPB18001 DPA10401-DPB10101 DPA10401-DPB10201 DPA10401-DPB10202 DPA10401-DPB10501 DQA10102-DQB10501
TTPDKKHQKEPPFLWMGYELHP

SEQ ID NO: 5660 - protein, 23 aa, Human immunodeficiency virus 1
  source 1..23: note = HLAs: DRB1_1001 DPA10103-DPB10101 DPA10103-DPB10201 DPA10103-DPB10202 DPA10103-DPB10401 DPA10103-DPB112601 DPA10103-DPB11501 DPA10103-DPB11601 DPA10103-DPB11901 DPA10103-DPB12301 DPA10103-DPB13101 DPA10103-DPB13401 DPA10103-DPB13901 DPA10103-DPB14001 DPA10103-DPB14101 DPA10103-DPB14801 DPA10103-DPB15001 DPA10103-DPB15901 DPA10104-DPB10101 DPA10104-DPB11501 DPA10105-DPB10101 DPA10105-DPB10401 DPA10105-DPB15001 DPA10106-DPB10101 DPA10201-DPB10101 DPA10201-DPB11501 DPA10201-DPB11601 DPA10202-DPB10101 DPA10202-DPB10202 DPA10202-DPB110601 DPA10202-DPB11901 DPA10202-DPB13101 DPA10202-DPB16501 DPA10301-DPB10101 DPA10301-DPB10201 DPA10301-DPB10202 DPA10301-DPB10401 DPA10301-DPB10402 DPA10301-DPB110501 DPA10301-DPB110601 DPA10301-DPB11801 DPA10301-DPB12301 DPA10301-DPB13901 DPA10301-DPB14001 DPA10301-DPB14901 DPA10301-DPB15501 DPA10301-DPB16501 DPA10301-DPB17501 DPA10301-DPB18001 DPA10401-DPB10101 DPA10401-DPB10201 DPA10401-DPB10202 DPA10401-DPB10501 DQA10101-DQB10501 DQA10102-DQB10501; note = HLAs: DQA10102-DQB10502 DQA10104-DQB10501 DQA10105-DQB10501
TTPDKKHQKEPPFLWMGYELHPD

SEQ ID NO: 5661 - protein, 24 aa, Human immunodeficiency virus 1
  source 1..24: note = HLAs: DRB1_1001 DPA10103-DPB10101 DPA10103-DPB10201 DPA10103-DPB10202 DPA10103-DPB10401 DPA10103-DPB112601 DPA10103-DPB11501 DPA10103-DPB11601 DPA10103-DPB11801 DPA10103-DPB11901 DPA10103-DPB12301 DPA10103-DPB13101 DPA10103-DPB13401 DPA10103-DPB13901 DPA10103-DPB14001 DPA10103-DPB14101 DPA10103-DPB14801 DPA10103-DPB15001 DPA10103-DPB15901 DPA10104-DPB10101 DPA10104-DPB11501 DPA10105-DPB10101 DPA10105-DPB10401 DPA10105-DPB11801 DPA10105-DPB15001 DPA10106-DPB10101 DPA10201-DPB10101 DPA10201-DPB10202 DPA10201-DPB110601 DPA10201-DPB11501 DPA10201-DPB11601 DPA10201-DPB11901 DPA10202-DPB10101 DPA10202-DPB10201 DPA10202-DPB10202 DPA10202-DPB10401 DPA10202-DPB110601 DPA10202-DPB11901 DPA10202-DPB13101 DPA10202-DPB16501 DPA10301-DPB10101 DPA10301-DPB10201 DPA10301-DPB10202 DPA10301-DPB10401 DPA10301-DPB10402 DPA10301-DPB110501 DPA10301-DPB110601 DPA10301-DPB11801 DPA10301-DPB12301 DPA10301-DPB13901 DPA10301-DPB14001 DPA10301-DPB14901 DPA10301-DPB15501 DPA10301-DPB16501 DPA10301-DPB17501; note = HLAs: DPA10301-DPB18001 DPA10401-DPB10101 DPA10401-DPB10201 DPA10401-DPB10202 DPA10401-DPB10402 DPA10401-DPB10501 DPA10401-DPB110501 DPA10401-DPB14901 DQA10101-DQB10501 DQA10102-DQB10501 DQA10102-DQB10502 DQA10102-DQB10503 DQA10103-DQB10501 DQA10104-DQB10501 DQA10105-DQB10501
TTPDKKHQKEPPFLWMGYELHPDK

SEQ ID NO: 5662 - protein, 25 aa, Human immunodeficiency virus 1
  source 1..25: note = HLAs: DRB1_0101 DRB1_1001 DPA10103-DPB10101 DPA10103-DPB10201 DPA10103-DPB10202 DPA10103-DPB10401 DPA10103-DPB10501 DPA10103-DPB112601 DPA10103-DPB11501 DPA10103-DPB11601 DPA10103-DPB11801 DPA10103-DPB11901 DPA10103-DPB12301 DPA10103-DPB13101 DPA10103-DPB13401 DPA10103-DPB13901 DPA10103-DPB14001 DPA10103-DPB14101 DPA10103-DPB14801 DPA10103-DPB15001 DPA10103-DPB15901 DPA10104-DPB10101 DPA10104-DPB11501 DPA10105-DPB10101 DPA10105-DPB10401 DPA10105-DPB11801 DPA10105-DPB15001 DPA10106-DPB10101 DPA10201-DPB10101 DPA10201-DPB10202 DPA10201-DPB110601 DPA10201-DPB11501 DPA10201-DPB11601 DPA10201-DPB11901 DPA10201-DPB13401 DPA10202-DPB10101 DPA10202-DPB10201 DPA10202-DPB10202 DPA10202-DPB10401 DPA10202-DPB110601 DPA10202-DPB11901 DPA10202-DPB13101 DPA10202-DPB16501 DPA10301-DPB10101 DPA10301-DPB10201 DPA10301-DPB10202 DPA10301-DPB10401 DPA10301-DPB10402 DPA10301-DPB110501 DPA10301-DPB110601 DPA10301-DPB11301 DPA10301-DPB11801 DPA10301-DPB12301 DPA10301-DPB13901 DPA10301-DPB14001; note = HLAs: DPA10301-DPB14901 DPA10301-DPB15501 DPA10301-DPB16501 DPA10301-DPB17501 DPA10301-DPB18001 DPA10401-DPB10101 DPA10401-DPB10201 DPA10401-DPB10202 DPA10401-DPB10402 DPA10401-DPB10501 DPA10401-DPB110501 DPA10401-DPB14901 DQA10101-DQB10501 DQA10102-DQB10501 DQA10102-DQB10502 DQA10102-DQB10503 DQA10103-DQB10501 DQA10104-DQB10501 DQA10105-DQB10501
TTPDKKHQKEPPFLWMGYELHPDKW

SEQ ID NO: 5663 - protein, 14 aa, Human immunodeficiency virus 1
  source 1..14: note = HLAs: DQA10102-DQB10601 DQA10103-DQB10601
TVGGHQAAMQMLKD

SEQ ID NO: 5664 - protein, 15 aa, Human immunodeficiency virus 1
  source 1..15: note = HLAs: DQA10102-DQB10601 DQA10102-DQB10602 DQA10102-DQB10609 DQA10102-DQB10611 DQA10103-DQB10601 DQA10201-DQB10301 DQA10505-DQB10402
TVGGHQAAMQMLKDT

SEQ ID NO: 5665 - protein, 16 aa, Human immunodeficiency virus 1
  source 1..16: note = HLAs: DQA10102-DQB10601 DQA10102-DQB10602 DQA10102-DQB10609 DQA10102-DQB10611 DQA10103-DQB10601 DQA10201-DQB10301
TVGGHQAAMQMLKDTI

SEQ ID NO: 5666 - protein, 17 aa, Human immunodeficiency virus 1
  source 1..17: note = HLAs: DQA10102-DQB10501 DQA10102-DQB10601 DQA10102-DQB10602 DQA10102-DQB10609 DQA10103-DQB10601 DQA10103-DQB10609
TVGGHQAAMQMLKDTIN

SEQ ID NO: 5667 - protein, 19 aa, Human immunodeficiency virus 1
  source 1..19: note = HLAs: DQA10102-DQB10501 DQA10102-DQB10601 DQA10102-DQB10609 DQA10103-DQB10601
TVGGHQAAMQMLKDTINEE

SEQ ID NO: 5668 - protein, 20 aa, Human immunodeficiency virus 1
  source 1..20: note = HLAs: DRB1_1001 DPA10301-DPB10101 DPA10301-DPB110601 DPA10301-DPB11801 DPA10401-DPB10101 DQA10102-DQB10501 DQA10102-DQB10503 DQA10102-DQB10601 DQA10102-DQB10602 DQA10102-DQB10609 DQA10103-DQB10501 DQA10103-DQB10601 DQA10103-DQB10609
TVGGHQAAMQMLKDTINEEA

SEQ ID NO: 5669 - protein, 21 aa, Human immunodeficiency virus 1
  source 1..21: note = HLAs: DRB1_1001 DPA10301-DPB10101 DPA10401-DPB10101 DQA10102-DQB10501 DQA10102-DQB10609 DQA10103-DQB10609
TVGGHQAAMQMLKDTINEEAA

SEQ ID NO: 5670 - protein, 22 aa, Human immunodeficiency virus 1
  source 1..22: note = HLAs: DRB1_1001 DPA10301-DPB10101 DPA10401-DPB10101 DQA10102-DQB10501 DQA10102-DQB10609 DQA10103-DQB10609
TVGGHQAAMQMLKDTINEEAAE

SEQ ID NO: 5671 - protein, 23 aa, Human immunodeficiency virus 1
  source 1..23: note = HLAs: DRB1_1001 DPA10301-DPB10101 DPA10401-DPB10101 DQA10102-DQB10501 DQA10102-DQB10503 DQA10102-DQB10609 DQA10103-DQB10501 DQA10103-DQB10609
TVGGHQAAMQMLKDTINEEAAEW

SEQ ID NO: 5672 - protein, 24 aa, Human immunodeficiency virus 1
  source 1..24: note = HLAs: DRB1_1001 DPA10301-DPB10101 DPA10401-DPB10101 DQA10102-DQB10501 DQA10102-DQB10503 DQA10102-DQB10609 DQA10103-DQB10501 DQA10103-DQB10609
TVGGHQAAMQMLKDTINEEAAEWD

SEQ ID NO: 5673 - protein, 25 aa, Human immunodeficiency virus 1
  source 1..25: note = HLAs: DRB1_1001 DPA10301-DPB10101 DPA10401-DPB10101 DQA10102-DQB10501 DQA10102-DQB10503 DQA10102-DQB10601 DQA10102-DQB10609 DQA10103-DQB10501 DQA10103-DQB10609
TVGGHQAAMQMLKDTINEEAAEWDR

SEQ ID NO: 5674 - protein, 14 aa, Human immunodeficiency virus 1
  source 1..14: note = HLAs: DQA10102-DQB10501 DQA10201-DQB10301 DQA10501-DQB10201 DQA10505-DQB10201 DQA10505-DQB10202
TVLDVGDAYFSVPL

SEQ ID NO: 5675 - protein, 15 aa, Human immunodeficiency virus 1
  source 1..15: note = HLAs: DRB1_0101 DPA10301-DPB10101 DPA10301-DPB10202 DQA10102-DQB10501 DQA10102-DQB10502 DQA10102-DQB10503 DQA10102-DQB10604 DQA10102-DQB10609 DQA10103-DQB10501 DQA10201-DQB10301 DQA10501-DQB10201 DQA10501-DQB10301 DQA10501-DQB10319 DQA10503-DQB10301 DQA10505-DQB10201 DQA10505-DQB10202 DQA10505-DQB10301 DQA10505-DQB10309 DQA10505-DQB10319 DQA10508-DQB10301 DQA10509-DQB10301
TVLDVGDAYFSVPLD

SEQ ID NO: 5676 - protein, 16 aa, Human immunodeficiency virus 1
  source 1..16: note = HLAs: DPA10301-DPB10101 DPA10401-DPB10101 DQA10101-DQB10501 DQA10102-DQB10501 DQA10102-DQB10502 DQA10102-DQB10503 DQA10102-DQB10604 DQA10102-DQB10609 DQA10103-DQB10501 DQA10104-DQB10501 DQA10105-DQB10501 DQA10201-DQB10301 DQA10301-DQB10305 DQA10501-DQB10201 DQA10505-DQB10201 DQA10505-DQB10202
TVLDVGDAYFSVPLDK

SEQ ID NO: 5677 - protein, 14 aa, Human immunodeficiency virus 1
  source 1..14: note = HLAs: DQA10201-DQB10301
TVLVGPTPVNIIGR

SEQ ID NO: 5678 - protein, 15 aa, Human immunodeficiency virus 1
  source 1..15: note = HLAs: DRB1_0101 DRB1_0701 DRB1_0901 DRB1_1001 DQA10102-DQB10601 DQA10103-DQB10601 DQA10201-DQB10301
TVLVGPTPVNIIGRN

SEQ ID NO: 5679 - protein, 14 aa, Human immunodeficiency virus 1
  source 1..14: note = HLAs: DRB1_0101 DRB1_0102 DRB1_1001
TVNDIQKLVGKLNW

SEQ ID NO: 5680 - protein, 15 aa, Human immunodeficiency virus 1
  source 1..15: note = HLAs: DRB1_0101 DRB1_0102 DRB1_0801 DRB1_0804 DRB1_0806 DRB1_1001 DRB1_1101 DRB1_1102 DRB1_1103 DRB1_1104 DRB1_1202 DRB1_1301 DRB1_1304 DRB1_1305 DRB1_1406 DRB1_1601
TVNDIQKLVGKLNWA

SEQ ID NO: 5681 - protein, 16 aa, Human immunodeficiency virus 1
  source 1..16: note = HLAs: DRB1_0101 DRB1_0102 DRB1_0804 DRB1_0806 DRB1_1001 DRB1_1103 DRB1_1104 DRB1_1304
TVNDIQKLVGKLNWAS

SEQ ID NO: 5682 - protein, 17 aa, Human immunodeficiency virus 1
  source 1..17: note = HLAs: DRB1_0101 DRB1_0102 DRB1_0801 DRB1_0802 DRB1_0804 DRB1_0806 DRB1_0809 DRB1_1001 DRB1_1101 DRB1_1102 DRB1_1103 DRB1_1104 DRB1_1202 DRB1_1301 DRB1_1304 DRB1_1305 DRB1_1406 DRB1_1501
TVNDIQKLVGKLNWASQ

SEQ ID NO: 5683 - protein, 18 aa, Human immunodeficiency virus 1
  source 1..18: note = HLAs: DRB1_0101 DRB1_1001
TVNDIQKLVGKLNWASQI

SEQ ID NO: 5684 - protein, 19 aa, Human immunodeficiency virus 1
  source 1..19: note = HLAs: DRB1_0101 DRB1_0102 DRB1_0804 DRB1_0806 DRB1_1001 DRB1_1102 DRB1_1103 DRB1_1104 DRB1_1114 DRB1_1301 DRB1_1302 DRB1_1304 DRB1_1406 DRB1_1501 DQA10102-DQB10501 DQA10103-DQB10501
TVNDIQKLVGKLNWASQIY

SEQ ID NO: 5685 - protein, 20 aa, Human immunodeficiency virus 1
  source 1..20: note = HLAs: DRB1_0101 DRB1_0102 DRB1_0404 DRB1_0410 DRB1_0801 DRB1_0802 DRB1_0804 DRB1_0806 DRB1_0809 DRB1_0813 DRB1_1001 DRB1_1101 DRB1_1102 DRB1_1103 DRB1_1104 DRB1_1114 DRB1_1301 DRB1_1302 DRB1_1304 DRB1_1305 DRB1_1406 DRB1_1501 DRB1_1502 DRB1_1503 DRB1_1601 DRB1_1602 DPA10202-DPB110601 DPA10202-DPB11901 DPA10301-DPB10101 DPA10301-DPB10201 DPA10301-DPB10202 DPA10301-DPB110601 DPA10301-DPB11801 DPA10401-DPB10101 DPA10401-DPB10501 DQA10102-DQB10501 DQA10102-DQB10503 DQA10103-DQB10501 DQA10103-DQB10609
TVNDIQKLVGKLNWASQIYP

SEQ ID NO: 5686 - protein, 21 aa, Human immunodeficiency virus 1
  source 1..21: note = HLAs: DRB1_0101 DRB1_0102 DRB1_0801 DRB1_0804 DRB1_0806 DRB1_1001 DRB1_1101 DRB1_1102 DRB1_1103 DRB1_1104 DRB1_1114 DRB1_1301 DRB1_1302 DRB1_1304 DRB1_1305 DRB1_1406 DRB1_1501 DQA10102-DQB10501 DQA10102-DQB10601 DQA10102-DQB10602 DQA10102-DQB10609 DQA10102-DQB10611 DQA10103-DQB10501 DQA10103-DQB10601 DQA10103-DQB10602 DQA10103-DQB10609 DQA10201-DQB10301
TVNDIQKLVGKLNWASQIYPG

SEQ ID NO: 5687 - protein, 22 aa, Human immunodeficiency virus 1
  source 1..22: note = HLAs: DRB1_0101 DRB1_0102 DRB1_0404 DRB1_0410 DRB1_0801 DRB1_0804 DRB1_0806 DRB1_0813 DRB1_1001 DRB1_1101 DRB1_1102 DRB1_1103 DRB1_1104 DRB1_1114 DRB1_1301 DRB1_1302 DRB1_1304 DRB1_1305 DRB1_1406 DRB1_1501 DPA10103-DPB11501 DPA10104-DPB11501 DPA10301-DPB10101 DPA10301-DPB10201 DPA10301-DPB10202 DPA10301-DPB110601 DPA10301-DPB11801 DPA10401-DPB10101 DQA10101-DQB10601 DQA10102-DQB10501 DQA10102-DQB10503 DQA10102-DQB10601 DQA10102-DQB10602 DQA10102-DQB10609 DQA10102-DQB10610 DQA10102-DQB10611 DQA10103-DQB10501 DQA10103-DQB10601 DQA10103-DQB10602 DQA10103-DQB10609 DQA10201-DQB10301
TVNDIQKLVGKLNWASQIYPGI

SEQ ID NO: 5688 - protein, 23 aa, Human immunodeficiency virus 1
  source 1..23: note = HLAs: DRB1_0101 DRB1_0102 DRB1_0404 DRB1_0410 DRB1_0801 DRB1_0802 DRB1_0804 DRB1_0806 DRB1_0809 DRB1_0813 DRB1_1001 DRB1_1101 DRB1_1102 DRB1_1103 DRB1_1104 DRB1_1114 DRB1_1301 DRB1_1302 DRB1_1304 DRB1_1305 DRB1_1406 DRB1_1501 DRB1_1602 DPA10103-DPB11501 DPA10104-DPB11501 DPA10202-DPB10101 DPA10301-DPB10101 DPA10301-DPB10201 DPA10301-DPB10202 DPA10301-DPB10401 DPA10301-DPB110601 DPA10301-DPB11801 DPA10301-DPB12301 DPA10301-DPB13901 DPA10301-DPB14001 DPA10301-DPB16501 DPA10401-DPB10101 DPA10401-DPB10201 DPA10401-DPB10202 DQA10101-DQB10601 DQA10102-DQB10501 DQA10102-DQB10503 DQA10102-DQB10601 DQA10102-DQB10602 DQA10102-DQB10609 DQA10102-DQB10610 DQA10102-DQB10611 DQA10103-DQB10501 DQA10103-DQB10601 DQA10103-DQB10602 DQA10103-DQB10603 DQA10103-DQB10609 DQA10201-DQB10301
TVNDIQKLVGKLNWASQIYPGIK

SEQ ID NO: 5689 - protein, 24 aa, Human immunodeficiency virus 1
  source 1..24: note = HLAs: DRB1_0101 DRB1_0102 DRB1_0404 DRB1_0410 DRB1_0801 DRB1_0802 DRB1_0804 DRB1_0806 DRB1_0809 DRB1_0813 DRB1_0901 DRB1_1001 DRB1_1101 DRB1_1102 DRB1_1103 DRB1_1104 DRB1_1114 DRB1_1301 DRB1_1302 DRB1_1304 DRB1_1305 DRB1_1406 DRB1_1501 DRB1_1502 DRB1_1503 DRB1_1601 DRB1_1602 DPA10103-DPB10101 DPA10103-DPB11501 DPA10103-DPB15001 DPA10104-DPB10101 DPA10104-DPB11501 DPA10105-DPB10101 DPA10105-DPB15001 DPA10202-DPB10101 DPA10202-DPB10202 DPA10202-DPB110601 DPA10202-DPB11901 DPA10301-DPB10101 DPA10301-DPB10201 DPA10301-DPB10202 DPA10301-DPB10401 DPA10301-DPB110601 DPA10301-DPB11801 DPA10301-DPB12301 DPA10301-DPB13901 DPA10301-DPB14001 DPA10301-DPB16501 DPA10401-DPB10101 DPA10401-DPB10201 DPA10401-DPB10202 DQA10101-DQB10601 DQA10101-DQB10602 DQA10102-DQB10501 DQA10102-DQB10503 DQA10102-DQB10601 DQA10102-DQB10602 DQA10102-DQB10603 DQA10102-DQB10609 DQA10102-DQB10610 DQA10102-DQB10611 DQA10102-DQB10614 DQA10103-DQB10501 DQA10103-DQB10503 DQA10103-DQB10601 DQA10103-DQB10602 DQA10103-DQB10603; note = HLAs: DQA10103-DQB10608 DQA10103-DQB10609 DQA10103-DQB10614 DQA10104-DQB10602 DQA10105-DQB10602 DQA10201-DQB10301 DQA10201-DQB10303 DQA10501-DQB10301 DQA10501-DQB10319 DQA10503-DQB10301 DQA10505-DQB10301 DQA10505-DQB10309 DQA10505-DQB10319 DQA10508-DQB10301 DQA10509-DQB10301
TVNDIQKLVGKLNWASQIYPGIKV

SEQ ID NO: 5690 - protein, 15 aa, Human immunodeficiency virus 1
  source 1..15: note = HLAs: DRB1_0101 DRB1_0401 DRB1_0405 DRB1_0408 DRB1_0701 DRB1_0901 DRB1_1001 DRB1_1114 DRB1_1302 DRB1_1502 DRB1_1601 DRB1_1602 DPA10301-DPB10101 DPA10301-DPB10201 DQA10102-DQB10501
TWIPEWEFVNTPPLV

SEQ ID NO: 5691 - protein, 16 aa, Human immunodeficiency virus 1
  source 1..16: note = HLAs: DRB1_0101 DRB1_0401 DRB1_0405 DRB1_0408 DRB1_0701 DRB1_0813 DRB1_0901 DRB1_1001 DRB1_1114 DRB1_1302 DRB1_1601 DRB1_1602 DPA10103-DPB11501 DPA10104-DPB11501 DPA10202-DPB10101 DPA10202-DPB13101 DPA10301-DPB10101 DPA10301-DPB10201 DPA10301-DPB10202 DPA10301-DPB10401 DPA10301-DPB11801 DPA10301-DPB12301 DPA10301-DPB13901 DPA10301-DPB14001 DPA10401-DPB10101 DQA10102-DQB10501
TWIPEWEFVNTPPLVK

SEQ ID NO: 5692 - protein, 17 aa, Human immunodeficiency virus 1
  source 1..17: note = HLAs: DRB1_0101 DRB1_0401 DRB1_0405 DRB1_0408 DRB1_0410 DRB1_0701 DRB1_0801 DRB1_0813 DRB1_0901 DRB1_1001 DRB1_1101 DRB1_1114 DRB1_1302 DRB1_1305 DRB1_1312 DRB1_1402 DRB1_1406 DRB1_1502 DRB1_1601 DRB1_1602 DPA10103-DPB10101 DPA10103-DPB11501 DPA10103-DPB13101 DPA10103-DPB15001 DPA10104-DPB10101 DPA10104-DPB11501 DPA10105-DPB10101 DPA10105-DPB15001 DPA10106-DPB10101 DPA10201-DPB10101 DPA10201-DPB11501 DPA10202-DPB10101 DPA10202-DPB10202 DPA10202-DPB10501 DPA10202-DPB110601 DPA10202-DPB11901 DPA10202-DPB13101 DPA10202-DPB13801 DPA10202-DPB16501 DPA10301-DPB10101 DPA10301-DPB10201 DPA10301-DPB10202 DPA10301-DPB10401 DPA10301-DPB10402 DPA10301-DPB110501 DPA10301-DPB110601 DPA10301-DPB11801 DPA10301-DPB12301 DPA10301-DPB13901 DPA10301-DPB14001 DPA10301-DPB14901 DPA10301-DPB16501 DPA10301-DPB17501 DPA10301-DPB18001 DPA10401-DPB10101 DPA10401-DPB10201 DPA10401-DPB10202 DPA10401-DPB10501 DQA10102-DQB10501 DQA10103-DQB10501
TWIPEWEFVNTPPLVKL

SEQ ID NO: 5693 - protein, 18 aa, Human immunodeficiency virus 1
  source 1..18: note = HLAs: DRB1_0101 DRB1_0408 DRB1_0701 DRB1_0901 DRB1_1001 DRB1_1602 DPA10103-DPB11501 DPA10104-DPB11501 DPA10202-DPB10101 DPA10202-DPB13101 DPA10301-DPB10101 DPA10301-DPB10201 DPA10301-DPB10202 DPA10301-DPB10401 DPA10301-DPB11801 DPA10301-DPB12301 DPA10301-DPB13901 DPA10301-DPB14001 DPA10401-DPB10101 DQA10102-DQB10501
TWIPEWEFVNTPPLVKLW

SEQ ID NO: 5694 - protein, 19 aa, Human immunodeficiency virus 1
  source 1..19: note = HLAs: DRB1_0101 DRB1_0401 DRB1_0405 DRB1_0408 DRB1_0701 DRB1_0801 DRB1_0813 DRB1_0901 DRB1_1001 DRB1_1101 DRB1_1114 DRB1_1302 DRB1_1305 DRB1_1312 DRB1_1402 DRB1_1406 DRB1_1502 DRB1_1601 DRB1_1602 DPA10103-DPB10101 DPA10103-DPB10201 DPA10103-DPB11501 DPA10103-DPB13101 DPA10103-DPB13401 DPA10103-DPB14801 DPA10103-DPB15001 DPA10104-DPB10101 DPA10104-DPB11501 DPA10105-DPB10101 DPA10105-DPB15001 DPA10106-DPB10101 DPA10201-DPB10101 DPA10201-DPB11501 DPA10202-DPB10101 DPA10202-DPB10201 DPA10202-DPB10202 DPA10202-DPB10501 DPA10202-DPB110601 DPA10202-DPB11901 DPA10202-DPB13101 DPA10202-DPB13801 DPA10202-DPB15501 DPA10202-DPB16501 DPA10301-DPB10101 DPA10301-DPB10201 DPA10301-DPB10202 DPA10301-DPB10401 DPA10301-DPB10402 DPA10301-DPB110501 DPA10301-DPB110601 DPA10301-DPB11801 DPA10301-DPB12301 DPA10301-DPB13901 DPA10301-DPB14001 DPA10301-DPB14901 DPA10301-DPB15501 DPA10301-DPB16501 DPA10301-DPB17501 DPA10301-DPB18001 DPA10401-DPB10101 DPA10401-DPB10201 DPA10401-DPB10202 DPA10401-DPB10501; note = HLAs: DPA10401-DPB11401 DQA10102-DQB10501 DQA10102-DQB10609 DQA10103-DQB10501
TWIPEWEFVNTPPLVKLWY

SEQ ID NO: 5695 - protein, 20 aa, Human immunodeficiency virus 1
  source 1..20: note = HLAs: DRB1_0101 DRB1_0401 DRB1_0404 DRB1_0405 DRB1_0408 DRB1_0410 DRB1_0701 DRB1_0801 DRB1_0802 DRB1_0803 DRB1_0809 DRB1_0813 DRB1_0901 DRB1_1001 DRB1_1101 DRB1_1102 DRB1_1114 DRB1_1301 DRB1_1302 DRB1_1303 DRB1_1304 DRB1_1305 DRB1_1312 DRB1_1402 DRB1_1406 DRB1_1501 DRB1_1502 DRB1_1601 DRB1_1602 DPA10103-DPB10101 DPA10103-DPB10201 DPA10103-DPB10202 DPA10103-DPB10401 DPA10103-DPB10501 DPA10103-DPB112601 DPA10103-DPB11501 DPA10103-DPB11601 DPA10103-DPB11801 DPA10103-DPB11901 DPA10103-DPB12301 DPA10103-DPB13101 DPA10103-DPB13401 DPA10103-DPB13901 DPA10103-DPB14001 DPA10103-DPB14101 DPA10103-DPB14801 DPA10103-DPB15001 DPA10103-DPB15901 DPA10104-DPB10101 DPA10104-DPB11501 DPA10105-DPB10101 DPA10105-DPB10401 DPA10105-DPB11801 DPA10105-DPB15001 DPA10106-DPB10101 DPA10201-DPB10101 DPA10201-DPB10501 DPA10201-DPB110601 DPA10201-DPB11501 DPA10201-DPB11601 DPA10201-DPB11901 DPA10202-DPB10101 DPA10202-DPB10201 DPA10202-DPB10202 DPA10202-DPB10401 DPA10202-DPB10501 DPA10202-DPB110601; note = HLAs: DPA10202-DPB11101 DPA10202-DPB11301 DPA10202-DPB11401 DPA10202-DPB11801 DPA10202-DPB11901 DPA10202-DPB12101 DPA10202-DPB13001 DPA10202-DPB13101 DPA10202-DPB13801 DPA10202-DPB15501 DPA10202-DPB16501 DPA10202-DPB18501 DPA10301-DPB10101 DPA10301-DPB10201 DPA10301-DPB10202 DPA10301-DPB10401 DPA10301-DPB10402 DPA10301-DPB110501 DPA10301-DPB110601 DPA10301-DPB11101 DPA10301-DPB11301 DPA10301-DPB11801 DPA10301-DPB12301 DPA10301-DPB13901 DPA10301-DPB14001 DPA10301-DPB14901 DPA10301-DPB15501 DPA10301-DPB16501 DPA10301-DPB17501 DPA10301-DPB18001 DPA10401-DPB10101 DPA10401-DPB10201 DPA10401-DPB10202 DPA10401-DPB10301 DPA10401-DPB10402 DPA10401-DPB10501 DPA10401-DPB110501 DPA10401-DPB11301 DPA10401-DPB113301 DPA10401-DPB11401 DPA10401-DPB14901 DQA10102-DQB10501 DQA10102-DQB10503 DQA10102-DQB10609 DQA10103-DQB10501 DQA10103-DQB10609
TWIPEWEFVNTPPLVKLWYQ

SEQ ID NO: 5696 - protein, 21 aa, Human immunodeficiency virus 1
  source 1..21: note = HLAs: DRB1_0101 DRB1_0401 DRB1_0405 DRB1_0408 DRB1_0410 DRB1_0701 DRB1_0801 DRB1_0813 DRB1_0901 DRB1_1001 DRB1_1101 DRB1_1114 DRB1_1302 DRB1_1303 DRB1_1304 DRB1_1305 DRB1_1312 DRB1_1402 DRB1_1406 DRB1_1502 DRB1_1601 DRB1_1602 DPA10103-DPB10101 DPA10103-DPB11501 DPA10103-DPB13101 DPA10103-DPB15001 DPA10104-DPB10101 DPA10104-DPB11501 DPA10105-DPB10101 DPA10105-DPB15001 DPA10106-DPB10101 DPA10201-DPB10101 DPA10202-DPB10101 DPA10202-DPB10501 DPA10202-DPB110601 DPA10202-DPB11901 DPA10202-DPB13101 DPA10202-DPB13801 DPA10202-DPB16501 DPA10301-DPB10101 DPA10301-DPB10201 DPA10301-DPB10202 DPA10301-DPB10401 DPA10301-DPB10402 DPA10301-DPB110501 DPA10301-DPB110601 DPA10301-DPB11801 DPA10301-DPB12301 DPA10301-DPB13901 DPA10301-DPB14001 DPA10301-DPB14901 DPA10301-DPB16501 DPA10301-DPB17501 DPA10301-DPB18001 DPA10401-DPB10101 DPA10401-DPB10201 DPA10401-DPB10202 DPA10401-DPB10501 DQA10102-DQB10501 DQA10103-DQB10501
TWIPEWEFVNTPPLVKLWYQL

SEQ ID NO: 5697 - protein, 22 aa, Human immunodeficiency virus 1
  source 1..22: note = HLAs: DRB1_0101 DRB1_0401 DRB1_0405 DRB1_0408 DRB1_0410 DRB1_0701 DRB1_0801 DRB1_0813 DRB1_0901 DRB1_1001 DRB1_1101 DRB1_1114 DRB1_1302 DRB1_1303 DRB1_1304 DRB1_1305 DRB1_1312 DRB1_1402 DRB1_1406 DRB1_1502 DRB1_1601 DRB1_1602 DPA10103-DPB10101 DPA10103-DPB10201 DPA10103-DPB10202 DPA10103-DPB11501 DPA10103-DPB11601 DPA10103-DPB13101 DPA10103-DPB13401 DPA10103-DPB14001 DPA10103-DPB14101 DPA10103-DPB14801 DPA10103-DPB15001 DPA10104-DPB10101 DPA10104-DPB11501 DPA10105-DPB10101 DPA10105-DPB15001 DPA10106-DPB10101 DPA10201-DPB10101 DPA10201-DPB11501 DPA10202-DPB10101 DPA10202-DPB10201 DPA10202-DPB10202 DPA10202-DPB10501 DPA10202-DPB110601 DPA10202-DPB11901 DPA10202-DPB13101 DPA10202-DPB13801 DPA10202-DPB16501 DPA10301-DPB10101 DPA10301-DPB10201 DPA10301-DPB10202 DPA10301-DPB10401 DPA10301-DPB10402 DPA10301-DPB110501 DPA10301-DPB110601 DPA10301-DPB11801 DPA10301-DPB12301 DPA10301-DPB13901 DPA10301-DPB14001 DPA10301-DPB14901 DPA10301-DPB15501 DPA10301-DPB16501 DPA10301-DPB17501; note = HLAs: DPA10301-DPB18001 DPA10401-DPB10101 DPA10401-DPB10201 DPA10401-DPB10202 DPA10401-DPB10501 DQA10102-DQB10501 DQA10103-DQB10501
TWIPEWEFVNTPPLVKLWYQLE

SEQ ID NO: 5698 - protein, 13 aa, Human immunodeficiency virus 1
  source 1..13: note = HLAs: DPA10103-DPB10101 DPA10103-DPB10201 DPA10103-DPB10202 DPA10103-DPB10401 DPA10103-DPB112601 DPA10103-DPB11501 DPA10103-DPB11601 DPA10103-DPB12301 DPA10103-DPB13101 DPA10103-DPB13401 DPA10103-DPB13901 DPA10103-DPB14001 DPA10103-DPB14101 DPA10103-DPB14801 DPA10103-DPB15901 DPA10104-DPB10101 DPA10104-DPB11501 DPA10105-DPB10101 DPA10105-DPB10401 DPA10106-DPB10101 DPA10201-DPB10101 DPA10201-DPB11501 DPA10201-DPB11601 DPA10202-DPB10101 DPA10202-DPB10202 DPA10202-DPB110601 DPA10202-DPB11901 DPA10202-DPB13101 DPA10202-DPB16501 DPA10301-DPB10101 DPA10301-DPB10201 DPA10301-DPB10202 DPA10301-DPB10401 DPA10301-DPB10402 DPA10301-DPB110501 DPA10301-DPB110601 DPA10301-DPB11801 DPA10301-DPB12301 DPA10301-DPB13901 DPA10301-DPB14001 DPA10301-DPB14901 DPA10301-DPB16501 DPA10301-DPB18001 DPA10401-DPB10101 DPA10401-DPB10201 DPA10401-DPB10202
TYQIYQEPFKNLK

SEQ ID NO: 5699 - protein, 14 aa, Human immunodeficiency virus 1
  source 1..14: note = HLAs: DRB1_1001 DPA10103-DPB10101 DPA10103-DPB10201 DPA10103-DPB10202 DPA10103-DPB10401 DPA10103-DPB10402 DPA10103-DPB110501 DPA10103-DPB112601 DPA10103-DPB11501 DPA10103-DPB11601 DPA10103-DPB11801 DPA10103-DPB11901 DPA10103-DPB12301 DPA10103-DPB13101 DPA10103-DPB13401 DPA10103-DPB13901 DPA10103-DPB14001 DPA10103-DPB14101 DPA10103-DPB14801 DPA10103-DPB14901 DPA10103-DPB15001 DPA10103-DPB15101 DPA10103-DPB15901 DPA10103-DPB18001 DPA10104-DPB10101 DPA10104-DPB11501 DPA10105-DPB10101 DPA10105-DPB10401 DPA10105-DPB11801 DPA10105-DPB15001 DPA10106-DPB10101 DPA10201-DPB10101 DPA10201-DPB10201 DPA10201-DPB10202 DPA10201-DPB10401 DPA10201-DPB110601 DPA10201-DPB11501 DPA10201-DPB11601 DPA10201-DPB11901 DPA10201-DPB13401 DPA10202-DPB10101 DPA10202-DPB10201 DPA10202-DPB10202 DPA10202-DPB10401 DPA10202-DPB10501 DPA10202-DPB110601 DPA10202-DPB11801 DPA10202-DPB11901 DPA10202-DPB13101 DPA10202-DPB13801 DPA10202-DPB16501 DPA10301-DPB10101 DPA10301-DPB10201 DPA10301-DPB10202 DPA10301-DPB10401; note = HLAs: DPA10301-DPB10402 DPA10301-DPB110501 DPA10301-DPB110601 DPA10301-DPB11801 DPA10301-DPB12301 DPA10301-DPB13901 DPA10301-DPB14001 DPA10301-DPB14901 DPA10301-DPB16501 DPA10301-DPB17501 DPA10301-DPB18001 DPA10401-DPB10101 DPA10401-DPB10201 DPA10401-DPB10202 DPA10401-DPB10402 DPA10401-DPB110501 DPA10401-DPB14901
TYQIYQEPFKNLKT

SEQ ID NO: 5700 - protein, 15 aa, Human immunodeficiency virus 1
  source 1..15: note = HLAs: DRB1_0101 DRB1_1001 DRB1_1304 DRB1_1601 DPA10103-DPB10101 DPA10103-DPB10201 DPA10103-DPB10202 DPA10103-DPB10401 DPA10103-DPB10402 DPA10103-DPB110501 DPA10103-DPB112601 DPA10103-DPB11501 DPA10103-DPB11601 DPA10103-DPB11801 DPA10103-DPB11901 DPA10103-DPB12301 DPA10103-DPB13101 DPA10103-DPB13401 DPA10103-DPB13901 DPA10103-DPB14001 DPA10103-DPB14101 DPA10103-DPB14801 DPA10103-DPB14901 DPA10103-DPB15001 DPA10103-DPB15101 DPA10103-DPB15901 DPA10103-DPB18001 DPA10104-DPB10101 DPA10104-DPB11501 DPA10105-DPB10101 DPA10105-DPB10401 DPA10105-DPB11801 DPA10105-DPB15001 DPA10106-DPB10101 DPA10201-DPB10101 DPA10201-DPB10201 DPA10201-DPB10202 DPA10201-DPB10401 DPA10201-DPB110601 DPA10201-DPB11501 DPA10201-DPB11601 DPA10201-DPB11801 DPA10201-DPB11901 DPA10201-DPB13401 DPA10202-DPB10101 DPA10202-DPB10201 DPA10202-DPB10202 DPA10202-DPB10401 DPA10202-DPB10501 DPA10202-DPB110001 DPA10202-DPB110601 DPA10202-DPB11801 DPA10202-DPB11901 DPA10202-DPB13101 DPA10202-DPB13801 DPA10202-DPB16501; note = HLAs: DPA10301-DPB10101 DPA10301-DPB10201 DPA10301-DPB10202 DPA10301-DPB10401 DPA10301-DPB10402 DPA10301-DPB110501 DPA10301-DPB110601 DPA10301-DPB11801 DPA10301-DPB12301 DPA10301-DPB13901 DPA10301-DPB14001 DPA10301-DPB14901 DPA10301-DPB16501 DPA10301-DPB17501 DPA10301-DPB18001 DPA10401-DPB10101 DPA10401-DPB10201 DPA10401-DPB10202 DPA10401-DPB10402 DPA10401-DPB10501 DPA10401-DPB110501 DPA10401-DPB14901
TYQIYQEPFKNLKTG

SEQ ID NO: 5701 - protein, 16 aa, Human immunodeficiency virus 1
  source 1..16: note = HLAs: DRB1_1001 DPA10103-DPB10101 DPA10103-DPB10201 DPA10103-DPB10202 DPA10103-DPB10401 DPA10103-DPB10402 DPA10103-DPB110501 DPA10103-DPB112601 DPA10103-DPB11501 DPA10103-DPB11601 DPA10103-DPB11801 DPA10103-DPB11901 DPA10103-DPB12301 DPA10103-DPB13101 DPA10103-DPB13401 DPA10103-DPB13901 DPA10103-DPB14001 DPA10103-DPB14101 DPA10103-DPB14801 DPA10103-DPB14901 DPA10103-DPB15001 DPA10103-DPB15101 DPA10103-DPB15901 DPA10103-DPB18001 DPA10104-DPB10101 DPA10104-DPB11501 DPA10105-DPB10101 DPA10105-DPB10401 DPA10105-DPB11801 DPA10105-DPB15001 DPA10106-DPB10101 DPA10201-DPB10101 DPA10201-DPB10201 DPA10201-DPB10202 DPA10201-DPB10401 DPA10201-DPB110601 DPA10201-DPB11501 DPA10201-DPB11601 DPA10201-DPB11901 DPA10201-DPB13401 DPA10202-DPB10101 DPA10202-DPB10201 DPA10202-DPB10202 DPA10202-DPB10401 DPA10202-DPB10501 DPA10202-DPB110601 DPA10202-DPB11801 DPA10202-DPB11901 DPA10202-DPB13101 DPA10202-DPB13801 DPA10202-DPB16501 DPA10301-DPB10101 DPA10301-DPB10201 DPA10301-DPB10202 DPA10301-DPB10401; note = HLAs: DPA10301-DPB10402 DPA10301-DPB110501 DPA10301-DPB110601 DPA10301-DPB11801 DPA10301-DPB12301 DPA10301-DPB13901 DPA10301-DPB14001 DPA10301-DPB14901 DPA10301-DPB16501 DPA10301-DPB17501 DPA10301-DPB18001 DPA10401-DPB10101 DPA10401-DPB10201 DPA10401-DPB10202 DPA10401-DPB10402 DPA10401-DPB110501 DPA10401-DPB14901
TYQIYQEPFKNLKTGK

SEQ ID NO: 5702 - protein, 17 aa, Human immunodeficiency virus 1
  source 1..17: note = HLAs: DRB1_0101 DRB1_1001 DPA10103-DPB10101 DPA10103-DPB10201 DPA10103-DPB10202 DPA10103-DPB10401 DPA10103-DPB112601 DPA10103-DPB11501 DPA10103-DPB11601 DPA10103-DPB11801 DPA10103-DPB11901 DPA10103-DPB12301 DPA10103-DPB13101 DPA10103-DPB13401 DPA10103-DPB13901 DPA10103-DPB14001 DPA10103-DPB14101 DPA10103-DPB14801 DPA10103-DPB15001 DPA10103-DPB15901 DPA10104-DPB10101 DPA10104-DPB11501 DPA10105-DPB10101 DPA10105-DPB10401 DPA10105-DPB11801 DPA10105-DPB15001 DPA10106-DPB10101 DPA10201-DPB10101 DPA10201-DPB10201 DPA10201-DPB10202 DPA10201-DPB110601 DPA10201-DPB11501 DPA10201-DPB11601 DPA10201-DPB11901 DPA10201-DPB13401 DPA10202-DPB10101 DPA10202-DPB10201 DPA10202-DPB10202 DPA10202-DPB10401 DPA10202-DPB10501 DPA10202-DPB110601 DPA10202-DPB11801 DPA10202-DPB11901 DPA10202-DPB13101 DPA10202-DPB13801 DPA10202-DPB16501 DPA10301-DPB10101 DPA10301-DPB10201 DPA10301-DPB10202 DPA10301-DPB10401 DPA10301-DPB10402 DPA10301-DPB110501 DPA10301-DPB110601 DPA10301-DPB11801 DPA10301-DPB12301; note = HLAs: DPA10301-DPB13901 DPA10301-DPB14001 DPA10301-DPB14901 DPA10301-DPB16501 DPA10301-DPB17501 DPA10301-DPB18001 DPA10401-DPB10101 DPA10401-DPB10201 DPA10401-DPB10202 DPA10401-DPB10402 DPA10401-DPB110501 DPA10401-DPB14901
TYQIYQEPFKNLKTGKY

SEQ ID NO: 5703 - protein, 18 aa, Human immunodeficiency virus 1
  source 1..18: note = HLAs: DPA10103-DPB10101 DPA10103-DPB10201 DPA10103-DPB10202 DPA10103-DPB10401 DPA10103-DPB112601 DPA10103-DPB11501 DPA10103-DPB11601 DPA10103-DPB12301 DPA10103-DPB13101 DPA10103-DPB13401 DPA10103-DPB13901 DPA10103-DPB14001 DPA10103-DPB14101 DPA10103-DPB14801 DPA10104-DPB10101 DPA10104-DPB11501 DPA10105-DPB10101 DPA10105-DPB10401 DPA10106-DPB10101 DPA10201-DPB10101 DPA10201-DPB11501 DPA10201-DPB11601 DPA10202-DPB10101 DPA10202-DPB10202 DPA10202-DPB110601 DPA10202-DPB11901 DPA10202-DPB13101 DPA10202-DPB16501 DPA10301-DPB10101 DPA10301-DPB10201 DPA10301-DPB10202 DPA10301-DPB10401 DPA10301-DPB10402 DPA10301-DPB110501 DPA10301-DPB110601 DPA10301-DPB11801 DPA10301-DPB12301 DPA10301-DPB13901 DPA10301-DPB14001 DPA10301-DPB14901 DPA10301-DPB18001 DPA10401-DPB10101 DPA10401-DPB10201 DPA10401-DPB10202
TYQIYQEPFKNLKTGKYA

SEQ ID NO: 5704 - protein, 15 aa, Human immunodeficiency virus 1
  source 1..15: note = HLAs: DRB1_1304 DRB1_1406
VAKEIVASCDKCQLK

SEQ ID NO: 5705 - protein, 13 aa, Human immunodeficiency virus 1
  source 1..13: note = HLAs: DRB1_1001 DQA10201-DQB10301 DQA10301-DQB10304 DQA10302-DQB10304 DQA10303-DQB10304 DQA10401-DQB10301 DQA10401-DQB10319 DQA10501-DQB10201 DQA10501-DQB10203 DQA10505-DQB10201 DQA10505-DQB10202
VASGYIEAEVIPA

SEQ ID NO: 5706 - protein, 14 aa, Human immunodeficiency virus 1
  source 1..14: note = HLAs: DRB1_0101 DRB1_0401 DRB1_0408 DRB1_0901 DRB1_1001 DPA10301-DPB10101 DPA10401-DPB10101 DQA10102-DQB10501 DQA10102-DQB10503 DQA10102-DQB10601 DQA10102-DQB10609 DQA10103-DQB10609 DQA10201-DQB10201 DQA10201-DQB10202 DQA10201-DQB10301 DQA10201-DQB10302 DQA10201-DQB10303 DQA10301-DQB10301 DQA10301-DQB10302 DQA10301-DQB10304 DQA10301-DQB10305 DQA10302-DQB10301 DQA10302-DQB10302 DQA10302-DQB10304 DQA10303-DQB10301 DQA10303-DQB10302 DQA10303-DQB10304 DQA10401-DQB10201 DQA10401-DQB10301 DQA10401-DQB10319 DQA10401-DQB10402 DQA10402-DQB10402 DQA10501-DQB10201 DQA10501-DQB10203 DQA10501-DQB10301 DQA10501-DQB10319 DQA10503-DQB10301 DQA10505-DQB10201 DQA10505-DQB10202 DQA10505-DQB10301 DQA10505-DQB10302 DQA10505-DQB10309 DQA10505-DQB10319 DQA10506-DQB10303 DQA10508-DQB10301 DQA10509-DQB10301 DQA10601-DQB10301
VASGYIEAEVIPAE

SEQ ID NO: 5707 - protein, 15 aa, Human immunodeficiency virus 1
  source 1..15: note = HLAs: DRB1_0101 DRB1_0102 DRB1_0401 DRB1_0404 DRB1_0405 DRB1_0408 DRB1_0701 DRB1_0813 DRB1_0901 DRB1_1001 DRB1_1602 DPA10301-DPB10101 DPA10401-DPB10101 DQA10102-DQB10501 DQA10102-DQB10503 DQA10102-DQB10601 DQA10102-DQB10604 DQA10102-DQB10609 DQA10102-DQB10611 DQA10103-DQB10601 DQA10103-DQB10609 DQA10201-DQB10201 DQA10201-DQB10202 DQA10201-DQB10301 DQA10201-DQB10302 DQA10201-DQB10303 DQA10301-DQB10301 DQA10301-DQB10302 DQA10301-DQB10304 DQA10302-DQB10301 DQA10302-DQB10302 DQA10302-DQB10304 DQA10303-DQB10301 DQA10303-DQB10302 DQA10303-DQB10304 DQA10401-DQB10201 DQA10401-DQB10301 DQA10401-DQB10319 DQA10401-DQB10402 DQA10402-DQB10402 DQA10501-DQB10201 DQA10501-DQB10203 DQA10501-DQB10301 DQA10501-DQB10319 DQA10503-DQB10301 DQA10505-DQB10201 DQA10505-DQB10202 DQA10505-DQB10301 DQA10505-DQB10302 DQA10505-DQB10309 DQA10505-DQB10319 DQA10506-DQB10303 DQA10508-DQB10301 DQA10509-DQB10301 DQA10601-DQB10301
VASGYIEAEVIPAET

SEQ ID NO: 5708 - protein, 16 aa, Human immunodeficiency virus 1
  source 1..16: note = HLAs: DRB1_0101 DRB1_0401 DRB1_0405 DRB1_0408 DRB1_0901 DRB1_1001 DPA10301-DPB10101 DPA10401-DPB10101 DQA10102-DQB10501 DQA10102-DQB10503 DQA10102-DQB10601 DQA10102-DQB10604 DQA10102-DQB10609 DQA10102-DQB10611 DQA10103-DQB10601 DQA10103-DQB10609 DQA10201-DQB10201 DQA10201-DQB10202 DQA10201-DQB10301 DQA10201-DQB10302 DQA10201-DQB10303 DQA10301-DQB10301 DQA10301-DQB10302 DQA10301-DQB10303 DQA10301-DQB10304 DQA10301-DQB10305 DQA10302-DQB10301 DQA10302-DQB10302 DQA10302-DQB10303 DQA10302-DQB10304 DQA10303-DQB10301 DQA10303-DQB10302 DQA10303-DQB10303 DQA10303-DQB10304 DQA10401-DQB10201 DQA10401-DQB10301 DQA10401-DQB10319 DQA10401-DQB10402 DQA10402-DQB10402 DQA10501-DQB10201 DQA10501-DQB10203 DQA10501-DQB10301 DQA10501-DQB10319 DQA10503-DQB10301 DQA10505-DQB10201 DQA10505-DQB10202 DQA10505-DQB10301 DQA10505-DQB10302 DQA10505-DQB10309 DQA10505-DQB10319 DQA10506-DQB10303 DQA10508-DQB10301 DQA10509-DQB10301 DQA10601-DQB10301
VASGYIEAEVIPAETG

SEQ ID NO: 5709 - protein, 17 aa, Human immunodeficiency virus 1
  source 1..17: note = HLAs: DRB1_0101 DRB1_0401 DRB1_0405 DRB1_0408 DRB1_0901 DRB1_1001 DPA10301-DPB10101 DPA10401-DPB10101 DQA10102-DQB10501 DQA10102-DQB10503 DQA10102-DQB10601 DQA10102-DQB10609 DQA10103-DQB10601 DQA10103-DQB10609 DQA10201-DQB10301 DQA10201-DQB10302 DQA10201-DQB10303 DQA10301-DQB10301 DQA10301-DQB10302 DQA10301-DQB10304 DQA10302-DQB10301 DQA10302-DQB10302 DQA10302-DQB10304 DQA10303-DQB10301 DQA10303-DQB10302 DQA10303-DQB10304 DQA10401-DQB10301 DQA10401-DQB10319 DQA10401-DQB10402 DQA10402-DQB10402 DQA10501-DQB10201 DQA10501-DQB10203 DQA10501-DQB10301 DQA10501-DQB10319 DQA10503-DQB10301 DQA10505-DQB10201 DQA10505-DQB10202 DQA10505-DQB10301 DQA10505-DQB10302 DQA10505-DQB10309 DQA10505-DQB10319 DQA10506-DQB10303 DQA10508-DQB10301 DQA10509-DQB10301 DQA10601-DQB10301
VASGYIEAEVIPAETGQ

SEQ ID NO: 5710 - protein, 18 aa, Human immunodeficiency virus 1
  source 1..18: note = HLAs: DRB1_0408 DRB1_1001 DQA10102-DQB10501 DQA10102-DQB10609 DQA10201-DQB10301 DQA10301-DQB10302 DQA10301-DQB10304 DQA10302-DQB10302 DQA10302-DQB10304 DQA10303-DQB10302 DQA10303-DQB10304 DQA10401-DQB10301 DQA10401-DQB10319 DQA10501-DQB10201 DQA10501-DQB10203 DQA10505-DQB10201 DQA10505-DQB10202
VASGYIEAEVIPAETGQE

SEQ ID NO: 5711 - protein, 19 aa, Human immunodeficiency virus 1
  source 1..19: note = HLAs: DRB1_0101 DRB1_0401 DRB1_0408 DRB1_0901 DRB1_1001 DPA10301-DPB10101 DPA10401-DPB10101 DQA10102-DQB10501 DQA10102-DQB10503 DQA10102-DQB10601 DQA10102-DQB10609 DQA10103-DQB10609 DQA10201-DQB10301 DQA10201-DQB10302 DQA10201-DQB10303 DQA10301-DQB10301 DQA10301-DQB10302 DQA10301-DQB10304 DQA10302-DQB10301 DQA10302-DQB10302 DQA10302-DQB10304 DQA10303-DQB10301 DQA10303-DQB10302 DQA10303-DQB10304 DQA10401-DQB10301 DQA10401-DQB10319 DQA10401-DQB10402 DQA10402-DQB10402 DQA10501-DQB10201 DQA10501-DQB10203 DQA10501-DQB10301 DQA10501-DQB10319 DQA10503-DQB10301 DQA10505-DQB10201 DQA10505-DQB10202 DQA10505-DQB10301 DQA10505-DQB10302 DQA10505-DQB10309 DQA10505-DQB10319 DQA10506-DQB10303 DQA10508-DQB10301 DQA10509-DQB10301 DQA10601-DQB10301
VASGYIEAEVIPAETGQET

SEQ ID NO: 5712 - protein, 20 aa, Human immunodeficiency virus 1
  source 1..20: note = HLAs: DRB1_0101 DRB1_0401 DRB1_0404 DRB1_0405 DRB1_0408 DRB1_0813 DRB1_0901 DRB1_1001 DPA10301-DPB10101 DPA10301-DPB16501 DPA10401-DPB10101 DQA10102-DQB10501 DQA10102-DQB10503 DQA10102-DQB10601 DQA10102-DQB10609 DQA10103-DQB10501 DQA10103-DQB10601 DQA10103-DQB10609 DQA10201-DQB10301 DQA10201-DQB10303 DQA10301-DQB10301 DQA10301-DQB10304 DQA10302-DQB10301 DQA10302-DQB10304 DQA10303-DQB10301 DQA10303-DQB10304 DQA10401-DQB10301 DQA10401-DQB10319 DQA10501-DQB10201 DQA10501-DQB10203 DQA10501-DQB10301 DQA10501-DQB10319 DQA10503-DQB10301 DQA10505-DQB10201 DQA10505-DQB10202 DQA10505-DQB10301 DQA10505-DQB10302 DQA10505-DQB10309 DQA10505-DQB10319 DQA10506-DQB10303 DQA10508-DQB10301 DQA10509-DQB10301 DQA10601-DQB10301
VASGYIEAEVIPAETGQETA

SEQ ID NO: 5713 - protein, 21 aa, Human immunodeficiency virus 1
  source 1..21: note = HLAs: DRB1_0101 DRB1_0401 DRB1_0405 DRB1_0408 DRB1_0901 DRB1_1001 DPA10301-DPB10101 DPA10401-DPB10101 DQA10102-DQB10501 DQA10102-DQB10503 DQA10102-DQB10601 DQA10102-DQB10609 DQA10201-DQB10301 DQA10501-DQB10201 DQA10501-DQB10203 DQA10505-DQB10201 DQA10505-DQB10202
VASGYIEAEVIPAETGQETAY

SEQ ID NO: 5714 - protein, 22 aa, Human immunodeficiency virus 1
  source 1..22: note = HLAs: DRB1_0101 DRB1_0401 DRB1_0405 DRB1_0408 DRB1_0901 DRB1_1001 DPA10301-DPB10101 DPA10401-DPB10101 DQA10102-DQB10501 DQA10102-DQB10503 DQA10102-DQB10601 DQA10102-DQB10609 DQA10201-DQB10301 DQA10401-DQB10301 DQA10401-DQB10319 DQA10501-DQB10201 DQA10501-DQB10203 DQA10505-DQB10201 DQA10505-DQB10202
VASGYIEAEVIPAETGQETAYF

SEQ ID NO: 5715 - protein, 13 aa, Human immunodeficiency virus 1
  source 1..13: note = HLAs: DQA10201-DQB10301 DQA10301-DQB10304 DQA10302-DQB10304 DQA10303-DQB10304 DQA10401-DQB10301 DQA10401-DQB10319 DQA10501-DQB10201 DQA10505-DQB10201 DQA10505-DQB10202 DQA10505-DQB10302 DQA10601-DQB10301
VAVHVASGYIEAE

SEQ ID NO: 5716 - protein, 14 aa, Human immunodeficiency virus 1
  source 1..14: note = HLAs: DPA10301-DPB10101 DQA10102-DQB10501 DQA10102-DQB10601 DQA10102-DQB10609 DQA10201-DQB10201 DQA10201-DQB10202 DQA10201-DQB10301 DQA10201-DQB10302 DQA10201-DQB10303 DQA10301-DQB10301 DQA10301-DQB10302 DQA10301-DQB10304 DQA10301-DQB10305 DQA10302-DQB10301 DQA10302-DQB10302 DQA10302-DQB10304 DQA10303-DQB10301 DQA10303-DQB10302 DQA10303-DQB10304 DQA10401-DQB10201 DQA10401-DQB10301 DQA10401-DQB10319 DQA10401-DQB10402 DQA10402-DQB10402 DQA10501-DQB10201 DQA10501-DQB10203 DQA10501-DQB10301 DQA10501-DQB10319 DQA10503-DQB10301 DQA10505-DQB10201 DQA10505-DQB10202 DQA10505-DQB10301 DQA10505-DQB10302 DQA10505-DQB10309 DQA10505-DQB10319 DQA10506-DQB10303 DQA10508-DQB10301 DQA10509-DQB10301 DQA10601-DQB10301
VAVHVASGYIEAEV

SEQ ID NO: 5717 - protein, 15 aa, Human immunodeficiency virus 1
  source 1..15: note = HLAs: DRB1_0101 DRB1_0701 DRB1_0901 DRB1_1001 DPA10103-DPB11501 DPA10104-DPB11501 DPA10301-DPB10101 DPA10301-DPB10201 DPA10301-DPB10202 DPA10301-DPB110601 DPA10301-DPB11801 DPA10301-DPB14001 DPA10301-DPB16501 DPA10401-DPB10101 DPA10401-DPB10201 DPA10401-DPB10202 DQA10102-DQB10501 DQA10102-DQB10502 DQA10102-DQB10503 DQA10102-DQB10601 DQA10102-DQB10604 DQA10102-DQB10609 DQA10102-DQB10611 DQA10103-DQB10501 DQA10103-DQB10601 DQA10103-DQB10609 DQA10201-DQB10201 DQA10201-DQB10202 DQA10201-DQB10301 DQA10201-DQB10302 DQA10201-DQB10303 DQA10301-DQB10301 DQA10301-DQB10302 DQA10301-DQB10303 DQA10301-DQB10304 DQA10301-DQB10305 DQA10302-DQB10301 DQA10302-DQB10302 DQA10302-DQB10303 DQA10302-DQB10304 DQA10303-DQB10301 DQA10303-DQB10302 DQA10303-DQB10303 DQA10303-DQB10304 DQA10401-DQB10201 DQA10401-DQB10301 DQA10401-DQB10319 DQA10401-DQB10402 DQA10402-DQB10402 DQA10501-DQB10201 DQA10501-DQB10203 DQA10501-DQB10301 DQA10501-DQB10319 DQA10503-DQB10301 DQA10505-DQB10201 DQA10505-DQB10202; note = HLAs: DQA10505-DQB10301 DQA10505-DQB10302 DQA10505-DQB10309 DQA10505-DQB10319 DQA10505-DQB10402 DQA10506-DQB10303 DQA10508-DQB10301 DQA10509-DQB10301 DQA10601-DQB10301
VAVHVASGYIEAEVI

SEQ ID NO: 5718 - protein, 16 aa, Human immunodeficiency virus 1
  source 1..16: note = HLAs: DPA10103-DPB11501 DPA10104-DPB11501 DPA10301-DPB10101 DPA10301-DPB10201 DPA10301-DPB10202 DPA10301-DPB110601 DPA10301-DPB16501 DPA10401-DPB10101 DPA10401-DPB10201 DPA10401-DPB10202 DQA10102-DQB10501 DQA10102-DQB10502 DQA10102-DQB10503 DQA10102-DQB10601 DQA10102-DQB10604 DQA10102-DQB10609 DQA10102-DQB10611 DQA10103-DQB10501 DQA10103-DQB10601 DQA10103-DQB10609 DQA10201-DQB10201 DQA10201-DQB10202 DQA10201-DQB10301 DQA10201-DQB10302 DQA10201-DQB10303 DQA10301-DQB10301 DQA10301-DQB10302 DQA10301-DQB10303 DQA10301-DQB10304 DQA10301-DQB10305 DQA10302-DQB10301 DQA10302-DQB10302 DQA10302-DQB10303 DQA10302-DQB10304 DQA10303-DQB10301 DQA10303-DQB10302 DQA10303-DQB10303 DQA10303-DQB10304 DQA10401-DQB10201 DQA10401-DQB10301 DQA10401-DQB10319 DQA10401-DQB10402 DQA10402-DQB10402 DQA10501-DQB10201 DQA10501-DQB10203 DQA10501-DQB10301 DQA10501-DQB10319 DQA10503-DQB10301 DQA10505-DQB10201 DQA10505-DQB10202 DQA10505-DQB10301 DQA10505-DQB10302 DQA10505-DQB10309 DQA10505-DQB10319 DQA10506-DQB10303; note = HLAs: DQA10508-DQB10301 DQA10509-DQB10301 DQA10601-DQB10301
VAVHVASGYIEAEVIP

SEQ ID NO: 5719 - protein, 17 aa, Human immunodeficiency virus 1
  source 1..17: note = HLAs: DRB1_0101 DRB1_0401 DRB1_0408 DRB1_0701 DRB1_0901 DRB1_1001 DPA10103-DPB11501 DPA10104-DPB11501 DPA10202-DPB10101 DPA10301-DPB10101 DPA10301-DPB10201 DPA10301-DPB10202 DPA10301-DPB110601 DPA10301-DPB14001 DPA10301-DPB16501 DPA10401-DPB10101 DPA10401-DPB10201 DPA10401-DPB10202 DQA10102-DQB10501 DQA10102-DQB10502 DQA10102-DQB10503 DQA10102-DQB10601 DQA10102-DQB10604 DQA10102-DQB10609 DQA10102-DQB10611 DQA10103-DQB10501 DQA10103-DQB10601 DQA10103-DQB10609 DQA10201-DQB10201 DQA10201-DQB10202 DQA10201-DQB10301 DQA10201-DQB10302 DQA10201-DQB10303 DQA10301-DQB10301 DQA10301-DQB10302 DQA10301-DQB10303 DQA10301-DQB10304 DQA10301-DQB10305 DQA10302-DQB10301 DQA10302-DQB10302 DQA10302-DQB10303 DQA10302-DQB10304 DQA10303-DQB10301 DQA10303-DQB10302 DQA10303-DQB10303 DQA10303-DQB10304 DQA10401-DQB10201 DQA10401-DQB10301 DQA10401-DQB10319 DQA10401-DQB10402 DQA10402-DQB10402 DQA10501-DQB10201 DQA10501-DQB10203 DQA10501-DQB10301 DQA10501-DQB10319 DQA10503-DQB10301 DQA10505-DQB10201; note = HLAs: DQA10505-DQB10202 DQA10505-DQB10301 DQA10505-DQB10302 DQA10505-DQB10309 DQA10505-DQB10319 DQA10506-DQB10303 DQA10508-DQB10301 DQA10509-DQB10301 DQA10601-DQB10301
VAVHVASGYIEAEVIPA

SEQ ID NO: 5720 - protein, 18 aa, Human immunodeficiency virus 1
  source 1..18: note = HLAs: DRB1_1001 DPA10301-DPB10101 DPA10401-DPB10101 DQA10102-DQB10501 DQA10102-DQB10503 DQA10102-DQB10601 DQA10102-DQB10609 DQA10102-DQB10611 DQA10103-DQB10609 DQA10201-DQB10201 DQA10201-DQB10202 DQA10201-DQB10301 DQA10201-DQB10302 DQA10301-DQB10301 DQA10301-DQB10302 DQA10301-DQB10304 DQA10301-DQB10305 DQA10302-DQB10301 DQA10302-DQB10302 DQA10302-DQB10304 DQA10303-DQB10301 DQA10303-DQB10302 DQA10303-DQB10304 DQA10401-DQB10201 DQA10401-DQB10301 DQA10401-DQB10319 DQA10401-DQB10402 DQA10402-DQB10402 DQA10501-DQB10201 DQA10501-DQB10203 DQA10501-DQB10301 DQA10501-DQB10319 DQA10503-DQB10301 DQA10505-DQB10201 DQA10505-DQB10202 DQA10505-DQB10301 DQA10505-DQB10302 DQA10505-DQB10309 DQA10505-DQB10319 DQA10506-DQB10303 DQA10508-DQB10301 DQA10509-DQB10301 DQA10601-DQB10301
VAVHVASGYIEAEVIPAE

SEQ ID NO: 5721 - protein, 19 aa, Human immunodeficiency virus 1
  source 1..19: note = HLAs: DRB1_0101 DRB1_0401 DRB1_0405 DRB1_0408 DRB1_0901 DRB1_1001 DPA10103-DPB10101 DPA10103-DPB11501 DPA10104-DPB10101 DPA10104-DPB11501 DPA10105-DPB10101 DPA10202-DPB10101 DPA10301-DPB10101 DPA10301-DPB10201 DPA10301-DPB10202 DPA10301-DPB10401 DPA10301-DPB110601 DPA10301-DPB11801 DPA10301-DPB12301 DPA10301-DPB13901 DPA10301-DPB16501 DPA10401-DPB10101 DPA10401-DPB10202 DQA10101-DQB10501 DQA10102-DQB10501 DQA10102-DQB10502 DQA10102-DQB10503 DQA10102-DQB10601 DQA10102-DQB10602 DQA10102-DQB10604 DQA10102-DQB10609 DQA10102-DQB10610 DQA10102-DQB10611 DQA10103-DQB10501 DQA10103-DQB10601 DQA10103-DQB10609 DQA10104-DQB10501 DQA10105-DQB10501 DQA10201-DQB10201 DQA10201-DQB10202 DQA10201-DQB10301 DQA10201-DQB10302 DQA10201-DQB10303 DQA10301-DQB10301 DQA10301-DQB10302 DQA10301-DQB10303 DQA10301-DQB10304 DQA10301-DQB10305 DQA10302-DQB10301 DQA10302-DQB10302 DQA10302-DQB10303 DQA10302-DQB10304 DQA10303-DQB10301 DQA10303-DQB10302 DQA10303-DQB10303 DQA10303-DQB10304 DQA10401-DQB10201; note = HLAs: DQA10401-DQB10301 DQA10401-DQB10319 DQA10401-DQB10402 DQA10402-DQB10402 DQA10501-DQB10201 DQA10501-DQB10203 DQA10501-DQB10301 DQA10501-DQB10319 DQA10503-DQB10301 DQA10505-DQB10201 DQA10505-DQB10202 DQA10505-DQB10301 DQA10505-DQB10302 DQA10505-DQB10309 DQA10505-DQB10319 DQA10506-DQB10303 DQA10508-DQB10301 DQA10509-DQB10301 DQA10601-DQB10301
VAVHVASGYIEAEVIPAET

SEQ ID NO: 5722 - protein, 20 aa, Human immunodeficiency virus 1
  source 1..20: note = HLAs: DRB1_0101 DRB1_0401 DRB1_0404 DRB1_0405 DRB1_0408 DRB1_0701 DRB1_0802 DRB1_0809 DRB1_0813 DRB1_0901 DRB1_1001 DRB1_1602 DPA10103-DPB10101 DPA10103-DPB11501 DPA10103-DPB15001 DPA10104-DPB10101 DPA10104-DPB11501 DPA10105-DPB10101 DPA10105-DPB15001 DPA10202-DPB10101 DPA10301-DPB10101 DPA10301-DPB10201 DPA10301-DPB10202 DPA10301-DPB10401 DPA10301-DPB110601 DPA10301-DPB11801 DPA10301-DPB12301 DPA10301-DPB13901 DPA10301-DPB14001 DPA10301-DPB15501 DPA10301-DPB16501 DPA10401-DPB10101 DPA10401-DPB10201 DPA10401-DPB10202 DPA10401-DPB10301 DPA10401-DPB10501 DPA10401-DPB11401 DQA10101-DQB10501 DQA10101-DQB10601 DQA10102-DQB10501 DQA10102-DQB10502 DQA10102-DQB10503 DQA10102-DQB10601 DQA10102-DQB10602 DQA10102-DQB10604 DQA10102-DQB10609 DQA10102-DQB10610 DQA10102-DQB10611 DQA10103-DQB10501 DQA10103-DQB10503 DQA10103-DQB10601 DQA10103-DQB10609 DQA10104-DQB10501 DQA10105-DQB10501 DQA10201-DQB10201 DQA10201-DQB10202 DQA10201-DQB10301 DQA10201-DQB10302 DQA10201-DQB10303 DQA10301-DQB10301; note = HLAs: DQA10301-DQB10302 DQA10301-DQB10303 DQA10301-DQB10304 DQA10301-DQB10305 DQA10302-DQB10301 DQA10302-DQB10302 DQA10302-DQB10303 DQA10302-DQB10304 DQA10303-DQB10301 DQA10303-DQB10302 DQA10303-DQB10303 DQA10303-DQB10304 DQA10401-DQB10201 DQA10401-DQB10301 DQA10401-DQB10319 DQA10401-DQB10402 DQA10402-DQB10402 DQA10501-DQB10201 DQA10501-DQB10203 DQA10501-DQB10301 DQA10501-DQB10319 DQA10503-DQB10301 DQA10505-DQB10201 DQA10505-DQB10202 DQA10505-DQB10301 DQA10505-DQB10302 DQA10505-DQB10309 DQA10505-DQB10319 DQA10505-DQB10402 DQA10506-DQB10303 DQA10508-DQB10301 DQA10509-DQB10301 DQA10601-DQB10301
VAVHVASGYIEAEVIPAETG

SEQ ID NO: 5723 - protein, 21 aa, Human immunodeficiency virus 1
  source 1..21: note = HLAs: DRB1_0101 DRB1_0401 DRB1_0405 DRB1_0408 DRB1_0901 DRB1_1001 DPA10103-DPB10101 DPA10103-DPB11501 DPA10104-DPB10101 DPA10104-DPB11501 DPA10105-DPB10101 DPA10301-DPB10101 DPA10301-DPB10201 DPA10301-DPB10202 DPA10301-DPB110601 DPA10301-DPB16501 DPA10401-DPB10101 DQA10102-DQB10501 DQA10102-DQB10502 DQA10102-DQB10503 DQA10102-DQB10601 DQA10102-DQB10604 DQA10102-DQB10609 DQA10102-DQB10611 DQA10103-DQB10501 DQA10103-DQB10601 DQA10103-DQB10609 DQA10201-DQB10201 DQA10201-DQB10202 DQA10201-DQB10301 DQA10201-DQB10302 DQA10201-DQB10303 DQA10301-DQB10301 DQA10301-DQB10302 DQA10301-DQB10304 DQA10302-DQB10301 DQA10302-DQB10302 DQA10302-DQB10304 DQA10303-DQB10301 DQA10303-DQB10302 DQA10303-DQB10304 DQA10401-DQB10201 DQA10401-DQB10301 DQA10401-DQB10319 DQA10401-DQB10402 DQA10402-DQB10402 DQA10501-DQB10201 DQA10501-DQB10203 DQA10501-DQB10301 DQA10501-DQB10319 DQA10503-DQB10301 DQA10505-DQB10201 DQA10505-DQB10202 DQA10505-DQB10301 DQA10505-DQB10302 DQA10505-DQB10309 DQA10505-DQB10319; note = HLAs: DQA10506-DQB10303 DQA10508-DQB10301 DQA10509-DQB10301 DQA10601-DQB10301
VAVHVASGYIEAEVIPAETGQ

SEQ ID NO: 5724 - protein, 22 aa, Human immunodeficiency virus 1
  source 1..22: note = HLAs: DRB1_0101 DRB1_0401 DRB1_0405 DRB1_0408 DRB1_0901 DRB1_1001 DPA10103-DPB10101 DPA10103-DPB11501 DPA10104-DPB10101 DPA10104-DPB11501 DPA10105-DPB10101 DPA10301-DPB10101 DPA10301-DPB10201 DPA10301-DPB10202 DPA10301-DPB110601 DPA10301-DPB16501 DPA10401-DPB10101 DQA10102-DQB10501 DQA10102-DQB10502 DQA10102-DQB10503 DQA10102-DQB10601 DQA10102-DQB10604 DQA10102-DQB10609 DQA10102-DQB10611 DQA10103-DQB10501 DQA10103-DQB10601 DQA10103-DQB10609 DQA10201-DQB10201 DQA10201-DQB10202 DQA10201-DQB10301 DQA10201-DQB10302 DQA10201-DQB10303 DQA10301-DQB10301 DQA10301-DQB10302 DQA10301-DQB10304 DQA10302-DQB10301 DQA10302-DQB10302 DQA10302-DQB10304 DQA10303-DQB10301 DQA10303-DQB10302 DQA10303-DQB10304 DQA10401-DQB10201 DQA10401-DQB10301 DQA10401-DQB10319 DQA10401-DQB10402 DQA10402-DQB10402 DQA10501-DQB10201 DQA10501-DQB10203 DQA10501-DQB10301 DQA10501-DQB10319 DQA10503-DQB10301 DQA10505-DQB10201 DQA10505-DQB10202 DQA10505-DQB10301 DQA10505-DQB10302 DQA10505-DQB10309 DQA10505-DQB10319; note = HLAs: DQA10506-DQB10303 DQA10508-DQB10301 DQA10509-DQB10301 DQA10601-DQB10301
VAVHVASGYIEAEVIPAETGQE

SEQ ID NO: 5725 - protein, 23 aa, Human immunodeficiency virus 1
  source 1..23: note = HLAs: DRB1_0101 DRB1_0401 DRB1_0405 DRB1_0408 DRB1_0901 DRB1_1001 DPA10103-DPB10101 DPA10103-DPB11501 DPA10104-DPB10101 DPA10104-DPB11501 DPA10105-DPB10101 DPA10301-DPB10101 DPA10301-DPB10201 DPA10301-DPB10202 DPA10301-DPB110601 DPA10301-DPB11801 DPA10301-DPB16501 DPA10401-DPB10101 DQA10102-DQB10501 DQA10102-DQB10502 DQA10102-DQB10503 DQA10102-DQB10601 DQA10102-DQB10604 DQA10102-DQB10609 DQA10102-DQB10611 DQA10103-DQB10501 DQA10103-DQB10601 DQA10103-DQB10609 DQA10201-DQB10201 DQA10201-DQB10202 DQA10201-DQB10301 DQA10201-DQB10302 DQA10201-DQB10303 DQA10301-DQB10301 DQA10301-DQB10302 DQA10301-DQB10304 DQA10302-DQB10301 DQA10302-DQB10302 DQA10302-DQB10304 DQA10303-DQB10301 DQA10303-DQB10302 DQA10303-DQB10304 DQA10401-DQB10201 DQA10401-DQB10301 DQA10401-DQB10319 DQA10401-DQB10402 DQA10402-DQB10402 DQA10501-DQB10201 DQA10501-DQB10203 DQA10501-DQB10301 DQA10501-DQB10319 DQA10503-DQB10301 DQA10505-DQB10201 DQA10505-DQB10202 DQA10505-DQB10301 DQA10505-DQB10302 DQA10505-DQB10309; note = HLAs: DQA10505-DQB10319 DQA10506-DQB10303 DQA10508-DQB10301 DQA10509-DQB10301 DQA10601-DQB10301
VAVHVASGYIEAEVIPAETGQET

SEQ ID NO: 5726 - protein, 24 aa, Human immunodeficiency virus 1
  source 1..24: note = HLAs: DRB1_0101 DRB1_0401 DRB1_0405 DRB1_0408 DRB1_0901 DRB1_1001 DPA10103-DPB10101 DPA10103-DPB11501 DPA10104-DPB10101 DPA10104-DPB11501 DPA10105-DPB10101 DPA10301-DPB10101 DPA10301-DPB10201 DPA10301-DPB10202 DPA10301-DPB110601 DPA10301-DPB11801 DPA10301-DPB16501 DPA10401-DPB10101 DQA10102-DQB10501 DQA10102-DQB10502 DQA10102-DQB10503 DQA10102-DQB10601 DQA10102-DQB10604 DQA10102-DQB10609 DQA10102-DQB10611 DQA10103-DQB10501 DQA10103-DQB10601 DQA10103-DQB10609 DQA10201-DQB10201 DQA10201-DQB10202 DQA10201-DQB10301 DQA10201-DQB10302 DQA10201-DQB10303 DQA10301-DQB10301 DQA10301-DQB10302 DQA10301-DQB10304 DQA10302-DQB10301 DQA10302-DQB10302 DQA10302-DQB10304 DQA10303-DQB10301 DQA10303-DQB10302 DQA10303-DQB10304 DQA10401-DQB10201 DQA10401-DQB10301 DQA10401-DQB10319 DQA10401-DQB10402 DQA10402-DQB10402 DQA10501-DQB10201 DQA10501-DQB10203 DQA10501-DQB10301 DQA10501-DQB10319 DQA10503-DQB10301 DQA10505-DQB10201 DQA10505-DQB10202 DQA10505-DQB10301 DQA10505-DQB10302 DQA10505-DQB10309; note = HLAs: DQA10505-DQB10319 DQA10506-DQB10303 DQA10508-DQB10301 DQA10509-DQB10301 DQA10601-DQB10301
VAVHVASGYIEAEVIPAETGQETA

SEQ ID NO: 5727 - protein, 25 aa, Human immunodeficiency virus 1
  source 1..25: note = HLAs: DRB1_0101 DRB1_0401 DRB1_0405 DRB1_0408 DRB1_0901 DRB1_1001 DPA10103-DPB10101 DPA10103-DPB11501 DPA10104-DPB10101 DPA10104-DPB11501 DPA10105-DPB10101 DPA10301-DPB10101 DPA10301-DPB10201 DPA10301-DPB10202 DPA10301-DPB110601 DPA10301-DPB11801 DPA10301-DPB16501 DPA10401-DPB10101 DQA10102-DQB10501 DQA10102-DQB10502 DQA10102-DQB10503 DQA10102-DQB10601 DQA10102-DQB10604 DQA10102-DQB10609 DQA10102-DQB10611 DQA10103-DQB10501 DQA10103-DQB10601 DQA10103-DQB10609 DQA10201-DQB10201 DQA10201-DQB10202 DQA10201-DQB10301 DQA10201-DQB10302 DQA10201-DQB10303 DQA10301-DQB10301 DQA10301-DQB10302 DQA10301-DQB10304 DQA10302-DQB10301 DQA10302-DQB10302 DQA10302-DQB10304 DQA10303-DQB10301 DQA10303-DQB10302 DQA10303-DQB10304 DQA10401-DQB10201 DQA10401-DQB10301 DQA10401-DQB10319 DQA10401-DQB10402 DQA10402-DQB10402 DQA10501-DQB10201 DQA10501-DQB10203 DQA10501-DQB10301 DQA10501-DQB10319 DQA10503-DQB10301 DQA10505-DQB10201 DQA10505-DQB10202 DQA10505-DQB10301 DQA10505-DQB10302 DQA10505-DQB10309; note = HLAs: DQA10505-DQB10319 DQA10506-DQB10303 DQA10508-DQB10301 DQA10509-DQB10301 DQA10601-DQB10301
VAVHVASGYIEAEVIPAETGQETAY

SEQ ID NO: 5728 - protein, 19 aa, Human immunodeficiency virus 1
  source 1..19: note = HLAs: DRB1_0401 DRB1_0405
VDCSPGIWQLDCTHLEGKI

SEQ ID NO: 5729 - protein, 20 aa, Human immunodeficiency virus 1
  source 1..20: note = HLAs: DRB1_0101 DRB1_0401 DRB1_0405 DRB1_0408 DRB1_1001 DRB1_1303 DPA10301-DPB10101
VDCSPGIWQLDCTHLEGKII

SEQ ID NO: 5730 - protein, 13 aa, Human immunodeficiency virus 1
  source 1..13: note = HLAs: DRB1_1101 DRB1_1305
VDFRELNKRTQDF

SEQ ID NO: 5731 - protein, 14 aa, Human immunodeficiency virus 1
  source 1..14: note = HLAs: DRB1_1101 DRB1_1104 DRB1_1305
VDFRELNKRTQDFW

SEQ ID NO: 5732 - protein, 15 aa, Human immunodeficiency virus 1
  source 1..15: note = HLAs: DRB1_0801 DRB1_0806 DRB1_1101 DRB1_1103 DRB1_1104 DRB1_1304 DRB1_1305
VDFRELNKRTQDFWE

SEQ ID NO: 5733 - protein, 16 aa, Human immunodeficiency virus 1
  source 1..16: note = HLAs: DRB1_1101 DRB1_1104 DRB1_1305
VDFRELNKRTQDFWEV

SEQ ID NO: 5734 - protein, 17 aa, Human immunodeficiency virus 1
  source 1..17: note = HLAs: DRB1_1101 DRB1_1103 DRB1_1104 DRB1_1305
VDFRELNKRTQDFWEVQ

SEQ ID NO: 5735 - protein, 18 aa, Human immunodeficiency virus 1
  source 1..18: note = HLAs: DRB1_1101 DRB1_1305
VDFRELNKRTQDFWEVQL

SEQ ID NO: 5736 - protein, 19 aa, Human immunodeficiency virus 1
  source 1..19: note = HLAs: DRB1_1101 DRB1_1104 DRB1_1305 DPA10103-DPB11501 DPA10104-DPB11501 DPA10301-DPB10101 DPA10301-DPB10201 DPA10301-DPB10202 DPA10401-DPB10101 DQA10102-DQB10501
VDFRELNKRTQDFWEVQLG

SEQ ID NO: 5737 - protein, 20 aa, Human immunodeficiency virus 1
  source 1..20: note = HLAs: DRB1_1101 DRB1_1104 DRB1_1305 DPA10103-DPB10101 DPA10103-DPB11501 DPA10103-DPB11601 DPA10103-DPB13101 DPA10103-DPB15001 DPA10104-DPB10101 DPA10104-DPB11501 DPA10105-DPB10101 DPA10105-DPB15001 DPA10202-DPB10101 DPA10202-DPB13101 DPA10301-DPB10101 DPA10301-DPB10201 DPA10301-DPB10202 DPA10301-DPB10401 DPA10301-DPB110601 DPA10301-DPB11801 DPA10301-DPB12301 DPA10301-DPB13901 DPA10301-DPB14001 DPA10301-DPB16501 DPA10401-DPB10101 DPA10401-DPB10201 DPA10401-DPB10202 DPA10401-DPB10501 DQA10102-DQB10501 DQA10102-DQB10503
VDFRELNKRTQDFWEVQLGI

SEQ ID NO: 5738 - protein, 21 aa, Human immunodeficiency virus 1
  source 1..21: note = HLAs: DRB1_1101 DRB1_1104 DRB1_1305 DPA10103-DPB10101 DPA10103-DPB11501 DPA10103-DPB13101 DPA10104-DPB10101 DPA10104-DPB11501 DPA10105-DPB10101 DPA10301-DPB10101 DPA10301-DPB10201 DPA10301-DPB10202 DPA10301-DPB10401 DPA10301-DPB110601 DPA10301-DPB11801 DPA10301-DPB12301 DPA10301-DPB13901 DPA10301-DPB14001 DPA10301-DPB16501 DPA10401-DPB10101 DQA10102-DQB10501
VDFRELNKRTQDFWEVQLGIP

SEQ ID NO: 5739 - protein, 22 aa, Human immunodeficiency virus 1
  source 1..22: note = HLAs: DRB1_1101 DRB1_1104 DRB1_1305 DPA10103-DPB10101 DPA10103-DPB11501 DPA10103-DPB13101 DPA10103-DPB15001 DPA10104-DPB10101 DPA10104-DPB11501 DPA10105-DPB10101 DPA10105-DPB15001 DPA10202-DPB10101 DPA10301-DPB10101 DPA10301-DPB10201 DPA10301-DPB10202 DPA10301-DPB10401 DPA10301-DPB110601 DPA10301-DPB11801 DPA10301-DPB12301 DPA10301-DPB13901 DPA10301-DPB14001 DPA10301-DPB16501 DPA10401-DPB10101 DPA10401-DPB10501 DQA10102-DQB10501
VDFRELNKRTQDFWEVQLGIPH

SEQ ID NO: 5740 - protein, 23 aa, Human immunodeficiency virus 1
  source 1..23: note = HLAs: DRB1_1001 DRB1_1101 DRB1_1104 DRB1_1305 DPA10103-DPB10101 DPA10103-DPB11501 DPA10103-DPB13101 DPA10103-DPB15001 DPA10104-DPB10101 DPA10104-DPB11501 DPA10105-DPB10101 DPA10105-DPB15001 DPA10202-DPB10101 DPA10301-DPB10101 DPA10301-DPB10201 DPA10301-DPB10202 DPA10301-DPB10401 DPA10301-DPB110601 DPA10301-DPB11801 DPA10301-DPB12301 DPA10301-DPB13901 DPA10301-DPB14001 DPA10301-DPB16501 DPA10401-DPB10101 DPA10401-DPB10201 DPA10401-DPB10202 DPA10401-DPB10501 DQA10102-DQB10501 DQA10102-DQB10503
VDFRELNKRTQDFWEVQLGIPHP

SEQ ID NO: 5741 - protein, 24 aa, Human immunodeficiency virus 1
  source 1..24: note = HLAs: DRB1_0101 DRB1_1001 DRB1_1101 DRB1_1103 DRB1_1104 DRB1_1305 DPA10103-DPB10101 DPA10103-DPB11501 DPA10103-DPB11601 DPA10103-DPB13101 DPA10103-DPB15001 DPA10104-DPB10101 DPA10104-DPB11501 DPA10105-DPB10101 DPA10105-DPB15001 DPA10106-DPB10101 DPA10201-DPB10101 DPA10202-DPB10101 DPA10202-DPB13101 DPA10301-DPB10101 DPA10301-DPB10201 DPA10301-DPB10202 DPA10301-DPB10401 DPA10301-DPB110601 DPA10301-DPB11801 DPA10301-DPB12301 DPA10301-DPB13901 DPA10301-DPB14001 DPA10301-DPB16501 DPA10401-DPB10101 DPA10401-DPB10201 DPA10401-DPB10202 DPA10401-DPB10501 DQA10102-DQB10501 DQA10102-DQB10503 DQA10102-DQB10601 DQA10102-DQB10609 DQA10103-DQB10501 DQA10103-DQB10601 DQA10201-DQB10301 DQA10501-DQB10301 DQA10501-DQB10319 DQA10503-DQB10301 DQA10505-DQB10301 DQA10505-DQB10309 DQA10505-DQB10319 DQA10508-DQB10301 DQA10509-DQB10301 DQA10601-DQB10301
VDFRELNKRTQDFWEVQLGIPHPA

SEQ ID NO: 5742 - protein, 25 aa, Human immunodeficiency virus 1
  source 1..25: note = HLAs: DRB1_0101 DRB1_1001 DRB1_1101 DRB1_1103 DRB1_1104 DRB1_1304 DRB1_1305 DPA10103-DPB10101 DPA10103-DPB11501 DPA10103-DPB11601 DPA10103-DPB13101 DPA10103-DPB15001 DPA10104-DPB10101 DPA10104-DPB11501 DPA10105-DPB10101 DPA10105-DPB15001 DPA10106-DPB10101 DPA10201-DPB10101 DPA10202-DPB10101 DPA10202-DPB13101 DPA10301-DPB10101 DPA10301-DPB10201 DPA10301-DPB10202 DPA10301-DPB10401 DPA10301-DPB110601 DPA10301-DPB11801 DPA10301-DPB12301 DPA10301-DPB13901 DPA10301-DPB14001 DPA10301-DPB16501 DPA10401-DPB10101 DPA10401-DPB10201 DPA10401-DPB10202 DPA10401-DPB10501 DQA10102-DQB10501 DQA10102-DQB10503 DQA10102-DQB10601 DQA10102-DQB10609 DQA10103-DQB10501 DQA10103-DQB10601 DQA10201-DQB10301 DQA10301-DQB10301 DQA10302-DQB10301 DQA10303-DQB10301 DQA10501-DQB10301 DQA10501-DQB10319 DQA10503-DQB10301 DQA10505-DQB10301 DQA10505-DQB10309 DQA10505-DQB10319 DQA10506-DQB10303 DQA10508-DQB10301 DQA10509-DQB10301 DQA10601-DQB10301
VDFRELNKRTQDFWEVQLGIPHPAG

SEQ ID NO: 5743 - protein, 13 aa, Human immunodeficiency virus 1
  source 1..13: note = HLAs: DRB1_0701 DRB1_0901 DRB1_1114 DRB1_1302 DPA10103-DPB11501 DPA10104-DPB11501 DPA10202-DPB10101 DPA10301-DPB10101 DPA10301-DPB10201 DPA10301-DPB10202 DPA10301-DPB10401 DPA10301-DPB11801 DPA10301-DPB12301 DPA10301-DPB13901 DPA10301-DPB14001 DPA10401-DPB10201 DPA10401-DPB10202 DQA10102-DQB10501 DQA10102-DQB10601 DQA10103-DQB10601 DQA10103-DQB10609 DQA10201-DQB10301
VDKLVSSGIRKVL

SEQ ID NO: 5744 - protein, 14 aa, Human immunodeficiency virus 1
  source 1..14: note = HLAs: DRB1_0101 DRB1_0102 DRB1_0701 DRB1_0804 DRB1_0806 DRB1_0813 DRB1_0901 DRB1_1001 DRB1_1102 DRB1_1103 DRB1_1104 DRB1_1114 DRB1_1301 DRB1_1302 DRB1_1304 DRB1_1401 DRB1_1402 DRB1_1404 DRB1_1406 DRB1_1454 DRB1_1501 DPA10103-DPB10201 DPA10103-DPB10202 DPA10103-DPB11501 DPA10103-DPB11801 DPA10103-DPB11901 DPA10103-DPB13401 DPA10103-DPB14001 DPA10103-DPB14101 DPA10103-DPB14801 DPA10103-DPB15001 DPA10104-DPB11501 DPA10105-DPB11801 DPA10105-DPB15001 DPA10106-DPB10101 DPA10201-DPB10101 DPA10201-DPB110601 DPA10201-DPB11501 DPA10201-DPB11901 DPA10202-DPB10101 DPA10202-DPB10201 DPA10202-DPB10202 DPA10202-DPB10501 DPA10202-DPB10901 DPA10202-DPB110601 DPA10202-DPB11801 DPA10202-DPB11901 DPA10202-DPB13101 DPA10202-DPB13801 DPA10202-DPB15501 DPA10202-DPB16501 DPA10301-DPB10101 DPA10301-DPB10201 DPA10301-DPB10202 DPA10301-DPB10401 DPA10301-DPB10402 DPA10301-DPB110501 DPA10301-DPB110601 DPA10301-DPB11801 DPA10301-DPB12301 DPA10301-DPB13901 DPA10301-DPB14001 DPA10301-DPB14901 DPA10301-DPB15501; note = HLAs: DPA10301-DPB16501 DPA10301-DPB17501 DPA10301-DPB18001 DPA10401-DPB10101 DPA10401-DPB10201 DPA10401-DPB10202 DQA10102-DQB10501 DQA10102-DQB10601 DQA10102-DQB10602 DQA10102-DQB10609 DQA10102-DQB10611 DQA10103-DQB10501 DQA10103-DQB10601 DQA10103-DQB10602 DQA10103-DQB10609 DQA10201-DQB10301 DQA10201-DQB10303 DQA10501-DQB10301 DQA10501-DQB10319 DQA10503-DQB10301 DQA10505-DQB10301 DQA10505-DQB10309 DQA10505-DQB10319 DQA10505-DQB10402 DQA10508-DQB10301 DQA10509-DQB10301
VDKLVSSGIRKVLF

SEQ ID NO: 5745 - protein, 15 aa, Human immunodeficiency virus 1
  source 1..15: note = HLAs: DRB1_0101 DRB1_0102 DRB1_0103 DRB1_0401 DRB1_0402 DRB1_0404 DRB1_0408 DRB1_0410 DRB1_0701 DRB1_0801 DRB1_0802 DRB1_0803 DRB1_0804 DRB1_0806 DRB1_0809 DRB1_0813 DRB1_0901 DRB1_1001 DRB1_1101 DRB1_1102 DRB1_1103 DRB1_1104 DRB1_1114 DRB1_1201 DRB1_1202 DRB1_1301 DRB1_1302 DRB1_1303 DRB1_1304 DRB1_1305 DRB1_1312 DRB1_1401 DRB1_1402 DRB1_1403 DRB1_1404 DRB1_1405 DRB1_1406 DRB1_1407 DRB1_1418 DRB1_1454 DRB1_1501 DRB1_1502 DRB1_1503 DRB1_1601 DRB1_1602 DPA10103-DPB10101 DPA10103-DPB10201 DPA10103-DPB10202 DPA10103-DPB10401 DPA10103-DPB10501 DPA10103-DPB112601 DPA10103-DPB11501 DPA10103-DPB11601 DPA10103-DPB11801 DPA10103-DPB11901 DPA10103-DPB12301 DPA10103-DPB13101 DPA10103-DPB13401 DPA10103-DPB13901 DPA10103-DPB14001 DPA10103-DPB14101 DPA10103-DPB14801 DPA10103-DPB15001 DPA10103-DPB15901 DPA10104-DPB10101 DPA10104-DPB11501 DPA10105-DPB10101 DPA10105-DPB10401 DPA10105-DPB11801 DPA10105-DPB15001 DPA10106-DPB10101 DPA10201-DPB10101 DPA10201-DPB10201 DPA10201-DPB10202 DPA10201-DPB110601; note = HLAs: DPA10201-DPB11501 DPA10201-DPB11601 DPA10201-DPB11801 DPA10201-DPB11901 DPA10201-DPB13401 DPA10202-DPB10101 DPA10202-DPB10201 DPA10202-DPB10202 DPA10202-DPB10401 DPA10202-DPB10402 DPA10202-DPB10501 DPA10202-DPB10901 DPA10202-DPB110001 DPA10202-DPB110501 DPA10202-DPB110601 DPA10202-DPB11301 DPA10202-DPB11401 DPA10202-DPB11801 DPA10202-DPB11901 DPA10202-DPB12901 DPA10202-DPB13101 DPA10202-DPB13801 DPA10202-DPB15501 DPA10202-DPB16501 DPA10301-DPB10101 DPA10301-DPB10201 DPA10301-DPB10202 DPA10301-DPB10401 DPA10301-DPB10402 DPA10301-DPB110501 DPA10301-DPB110601 DPA10301-DPB11801 DPA10301-DPB12301 DPA10301-DPB13901 DPA10301-DPB14001 DPA10301-DPB14901 DPA10301-DPB15501 DPA10301-DPB16501 DPA10301-DPB17501 DPA10301-DPB18001 DPA10401-DPB10101 DPA10401-DPB10201 DPA10401-DPB10202 DPA10401-DPB10301 DPA10401-DPB10402 DPA10401-DPB10501 DPA10401-DPB110501 DPA10401-DPB11301 DPA10401-DPB113301 DPA10401-DPB11401 DPA10401-DPB14901 DQA10101-DQB10601 DQA10102-DQB10501 DQA10102-DQB10503; note = HLAs: DQA10102-DQB10601 DQA10102-DQB10602 DQA10102-DQB10609 DQA10102-DQB10611 DQA10103-DQB10501 DQA10103-DQB10503 DQA10103-DQB10601 DQA10103-DQB10602 DQA10103-DQB10603 DQA10103-DQB10604 DQA10103-DQB10608 DQA10103-DQB10609 DQA10103-DQB10614 DQA10201-DQB10301 DQA10201-DQB10303 DQA10501-DQB10301 DQA10501-DQB10319 DQA10503-DQB10301 DQA10505-DQB10301 DQA10505-DQB10309 DQA10505-DQB10319 DQA10505-DQB10402 DQA10506-DQB10303 DQA10508-DQB10301 DQA10509-DQB10301 DQA10601-DQB10301
VDKLVSSGIRKVLFL

SEQ ID NO: 5746 - protein, 16 aa, Human immunodeficiency virus 1
  source 1..16: note = HLAs: DRB1_0101 DRB1_0102 DRB1_0404 DRB1_0410 DRB1_0701 DRB1_0801 DRB1_0802 DRB1_0803 DRB1_0804 DRB1_0806 DRB1_0809 DRB1_0813 DRB1_0901 DRB1_1001 DRB1_1101 DRB1_1102 DRB1_1103 DRB1_1104 DRB1_1114 DRB1_1201 DRB1_1301 DRB1_1302 DRB1_1303 DRB1_1304 DRB1_1305 DRB1_1312 DRB1_1401 DRB1_1402 DRB1_1403 DRB1_1404 DRB1_1405 DRB1_1406 DRB1_1454 DRB1_1501 DRB1_1502 DRB1_1503 DRB1_1602 DPA10103-DPB10101 DPA10103-DPB10201 DPA10103-DPB10202 DPA10103-DPB10401 DPA10103-DPB112601 DPA10103-DPB11501 DPA10103-DPB11601 DPA10103-DPB11801 DPA10103-DPB11901 DPA10103-DPB12301 DPA10103-DPB13101 DPA10103-DPB13401 DPA10103-DPB13901 DPA10103-DPB14001 DPA10103-DPB14101 DPA10103-DPB14801 DPA10103-DPB15001 DPA10103-DPB15901 DPA10104-DPB10101 DPA10104-DPB11501 DPA10105-DPB10101 DPA10105-DPB10401 DPA10105-DPB11801 DPA10105-DPB15001 DPA10106-DPB10101 DPA10201-DPB10101 DPA10201-DPB10201 DPA10201-DPB10202 DPA10201-DPB110601 DPA10201-DPB11501 DPA10201-DPB11601 DPA10201-DPB11901 DPA10201-DPB13401 DPA10202-DPB10101; note = HLAs: DPA10202-DPB10201 DPA10202-DPB10202 DPA10202-DPB10401 DPA10202-DPB10501 DPA10202-DPB10901 DPA10202-DPB110601 DPA10202-DPB11301 DPA10202-DPB11401 DPA10202-DPB11801 DPA10202-DPB11901 DPA10202-DPB12101 DPA10202-DPB12901 DPA10202-DPB13001 DPA10202-DPB13101 DPA10202-DPB13801 DPA10202-DPB15501 DPA10202-DPB16501 DPA10301-DPB10101 DPA10301-DPB10201 DPA10301-DPB10202 DPA10301-DPB10401 DPA10301-DPB10402 DPA10301-DPB110501 DPA10301-DPB110601 DPA10301-DPB11801 DPA10301-DPB12301 DPA10301-DPB13901 DPA10301-DPB14001 DPA10301-DPB14901 DPA10301-DPB15501 DPA10301-DPB16501 DPA10301-DPB17501 DPA10301-DPB18001 DPA10401-DPB10101 DPA10401-DPB10201 DPA10401-DPB10202 DPA10401-DPB10402 DPA10401-DPB10501 DPA10401-DPB110501 DPA10401-DPB11301 DPA10401-DPB113301 DPA10401-DPB11401 DPA10401-DPB14901 DQA10101-DQB10601 DQA10102-DQB10501 DQA10102-DQB10503 DQA10102-DQB10601 DQA10102-DQB10602 DQA10102-DQB10609 DQA10102-DQB10611 DQA10103-DQB10501 DQA10103-DQB10503 DQA10103-DQB10601 DQA10103-DQB10602; note = HLAs: DQA10103-DQB10603 DQA10103-DQB10604 DQA10103-DQB10608 DQA10103-DQB10609 DQA10103-DQB10614 DQA10201-DQB10301 DQA10201-DQB10303 DQA10501-DQB10301 DQA10501-DQB10319 DQA10503-DQB10301 DQA10505-DQB10301 DQA10505-DQB10309 DQA10505-DQB10319 DQA10505-DQB10402 DQA10506-DQB10303 DQA10508-DQB10301 DQA10509-DQB10301 DQA10601-DQB10301
VDKLVSSGIRKVLFLD

SEQ ID NO: 5747 - protein, 17 aa, Human immunodeficiency virus 1
  source 1..17: note = HLAs: DRB1_0101 DRB1_0102 DRB1_0404 DRB1_0410 DRB1_0701 DRB1_0801 DRB1_0802 DRB1_0804 DRB1_0806 DRB1_0809 DRB1_0813 DRB1_0901 DRB1_1001 DRB1_1101 DRB1_1102 DRB1_1103 DRB1_1104 DRB1_1114 DRB1_1201 DRB1_1301 DRB1_1302 DRB1_1303 DRB1_1304 DRB1_1305 DRB1_1312 DRB1_1401 DRB1_1402 DRB1_1403 DRB1_1404 DRB1_1405 DRB1_1406 DRB1_1454 DRB1_1501 DRB1_1502 DRB1_1503 DRB1_1602 DPA10103-DPB10101 DPA10103-DPB10201 DPA10103-DPB10202 DPA10103-DPB10401 DPA10103-DPB10501 DPA10103-DPB112601 DPA10103-DPB11501 DPA10103-DPB11601 DPA10103-DPB11801 DPA10103-DPB11901 DPA10103-DPB12301 DPA10103-DPB13101 DPA10103-DPB13401 DPA10103-DPB13901 DPA10103-DPB14001 DPA10103-DPB14101 DPA10103-DPB14801 DPA10103-DPB15001 DPA10103-DPB15901 DPA10104-DPB10101 DPA10104-DPB11501 DPA10105-DPB10101 DPA10105-DPB10401 DPA10105-DPB11801 DPA10105-DPB15001 DPA10106-DPB10101 DPA10201-DPB10101 DPA10201-DPB10201 DPA10201-DPB10202 DPA10201-DPB110601 DPA10201-DPB11501 DPA10201-DPB11601 DPA10201-DPB11801 DPA10201-DPB11901 DPA10201-DPB13401; note = HLAs: DPA10202-DPB10101 DPA10202-DPB10201 DPA10202-DPB10202 DPA10202-DPB10401 DPA10202-DPB10501 DPA10202-DPB10901 DPA10202-DPB110001 DPA10202-DPB110601 DPA10202-DPB11301 DPA10202-DPB11401 DPA10202-DPB11801 DPA10202-DPB11901 DPA10202-DPB13101 DPA10202-DPB13801 DPA10202-DPB15501 DPA10202-DPB16501 DPA10301-DPB10101 DPA10301-DPB10201 DPA10301-DPB10202 DPA10301-DPB10401 DPA10301-DPB10402 DPA10301-DPB110501 DPA10301-DPB110601 DPA10301-DPB11801 DPA10301-DPB12301 DPA10301-DPB13901 DPA10301-DPB14001 DPA10301-DPB14901 DPA10301-DPB15501 DPA10301-DPB16501 DPA10301-DPB17501 DPA10301-DPB18001 DPA10401-DPB10101 DPA10401-DPB10201 DPA10401-DPB10202 DPA10401-DPB10402 DPA10401-DPB10501 DPA10401-DPB110501 DPA10401-DPB14901 DQA10101-DQB10601 DQA10102-DQB10501 DQA10102-DQB10503 DQA10102-DQB10601 DQA10102-DQB10602 DQA10102-DQB10609 DQA10102-DQB10611 DQA10103-DQB10501 DQA10103-DQB10601 DQA10103-DQB10602 DQA10103-DQB10608 DQA10103-DQB10609 DQA10201-DQB10301 DQA10201-DQB10303 DQA10505-DQB10402
VDKLVSSGIRKVLFLDG

SEQ ID NO: 5748 - protein, 18 aa, Human immunodeficiency virus 1
  source 1..18: note = HLAs: DRB1_0101 DRB1_0701 DRB1_0901 DRB1_1001 DRB1_1102 DRB1_1114 DRB1_1301 DRB1_1302 DRB1_1304 DRB1_1406 DPA10103-DPB10101 DPA10103-DPB10201 DPA10103-DPB10202 DPA10103-DPB11501 DPA10103-DPB11601 DPA10103-DPB11801 DPA10103-DPB11901 DPA10103-DPB13101 DPA10103-DPB13401 DPA10103-DPB14001 DPA10103-DPB14801 DPA10103-DPB15001 DPA10104-DPB10101 DPA10104-DPB11501 DPA10105-DPB10101 DPA10105-DPB11801 DPA10105-DPB15001 DPA10106-DPB10101 DPA10201-DPB10101 DPA10201-DPB110601 DPA10201-DPB11501 DPA10201-DPB11901 DPA10202-DPB10101 DPA10202-DPB10201 DPA10202-DPB10202 DPA10202-DPB10501 DPA10202-DPB110601 DPA10202-DPB11801 DPA10202-DPB11901 DPA10202-DPB13101 DPA10202-DPB13801 DPA10202-DPB16501 DPA10301-DPB10101 DPA10301-DPB10201 DPA10301-DPB10202 DPA10301-DPB10401 DPA10301-DPB10402 DPA10301-DPB110501 DPA10301-DPB110601 DPA10301-DPB11801 DPA10301-DPB12301 DPA10301-DPB13901 DPA10301-DPB14001 DPA10301-DPB14901 DPA10301-DPB16501 DPA10301-DPB17501 DPA10301-DPB18001 DPA10401-DPB10101 DPA10401-DPB10201; note = HLAs: DPA10401-DPB10202 DPA10401-DPB10501 DQA10102-DQB10501 DQA10102-DQB10601 DQA10102-DQB10602 DQA10102-DQB10609 DQA10102-DQB10611 DQA10103-DQB10501 DQA10103-DQB10601 DQA10103-DQB10602 DQA10103-DQB10609 DQA10201-DQB10301
VDKLVSSGIRKVLFLDGI

SEQ ID NO: 5749 - protein, 14 aa, Human immunodeficiency virus 1
  source 1..14: note = HLAs: DPA10301-DPB10101 DPA10301-DPB10201 DPA10301-DPB10202 DPA10301-DPB10401 DPA10301-DPB12301 DPA10301-DPB13901 DPA10401-DPB10101 DQA10102-DQB10501 DQA10501-DQB10201 DQA10505-DQB10201 DQA10505-DQB10202
VEEKAFSPEVIPMF

SEQ ID NO: 5750 - protein, 15 aa, Human immunodeficiency virus 1
  source 1..15: note = HLAs: DRB1_0806 DRB1_1101 DRB1_1102 DRB1_1103 DRB1_1104 DRB1_1301 DRB1_1304 DRB1_1305 DRB1_1406
VESMNKELKKIIGQV

SEQ ID NO: 5751 - protein, 16 aa, Human immunodeficiency virus 1
  source 1..16: note = HLAs: DRB1_0806 DRB1_1101 DRB1_1102 DRB1_1103 DRB1_1104 DRB1_1301 DRB1_1304 DRB1_1305 DRB1_1406
VESMNKELKKIIGQVR

SEQ ID NO: 5752 - protein, 14 aa, Human immunodeficiency virus 1
  source 1..14: note = HLAs: DRB1_1102 DRB1_1103 DRB1_1104 DRB1_1301
VFAIKKKDSTKWRK

SEQ ID NO: 5753 - protein, 15 aa, Human immunodeficiency virus 1
  source 1..15: note = HLAs: DRB1_0801 DRB1_0804 DRB1_0806 DRB1_1101 DRB1_1102 DRB1_1103 DRB1_1104 DRB1_1301 DRB1_1304 DRB1_1305 DRB1_1406 DRB1_1501
VFAIKKKDSTKWRKL

SEQ ID NO: 5754 - protein, 16 aa, Human immunodeficiency virus 1
  source 1..16: note = HLAs: DRB1_0806 DRB1_1102 DRB1_1103 DRB1_1104 DRB1_1301 DRB1_1304 DRB1_1406
VFAIKKKDSTKWRKLV

SEQ ID NO: 5755 - protein, 17 aa, Human immunodeficiency virus 1
  source 1..17: note = HLAs: DRB1_0804 DRB1_0806 DRB1_1101 DRB1_1102 DRB1_1103 DRB1_1104 DRB1_1301 DRB1_1304 DRB1_1305 DRB1_1406
VFAIKKKDSTKWRKLVD

SEQ ID NO: 5756 - protein, 19 aa, Human immunodeficiency virus 1
  source 1..19: note = HLAs: DRB1_0806 DRB1_1102 DRB1_1103 DRB1_1104 DRB1_1301 DRB1_1304
VFAIKKKDSTKWRKLVDFR

SEQ ID NO: 5757 - protein, 20 aa, Human immunodeficiency virus 1
  source 1..20: note = HLAs: DRB1_0801 DRB1_0804 DRB1_0806 DRB1_1101 DRB1_1102 DRB1_1103 DRB1_1104 DRB1_1301 DRB1_1304 DRB1_1305 DPA10103-DPB11501 DPA10104-DPB11501 DPA10202-DPB10501 DPA10202-DPB110601 DPA10202-DPB11901 DPA10202-DPB13101 DPA10202-DPB13801 DPA10301-DPB10101 DPA10301-DPB110601
VFAIKKKDSTKWRKLVDFRE

SEQ ID NO: 5758 - protein, 21 aa, Human immunodeficiency virus 1
  source 1..21: note = HLAs: DRB1_0806 DRB1_1102 DRB1_1103 DRB1_1104 DRB1_1301 DRB1_1304 DPA10103-DPB10101 DPA10103-DPB10201 DPA10103-DPB11501 DPA10103-DPB11601 DPA10103-DPB11901 DPA10103-DPB13101 DPA10103-DPB13401 DPA10103-DPB14801 DPA10103-DPB15001 DPA10104-DPB10101 DPA10104-DPB11501 DPA10105-DPB10101 DPA10105-DPB15001 DPA10201-DPB11601 DPA10202-DPB10101 DPA10202-DPB10501 DPA10202-DPB110601 DPA10202-DPB11901 DPA10202-DPB13101 DPA10202-DPB13801 DPA10202-DPB16501 DPA10301-DPB10101 DPA10301-DPB10201 DPA10301-DPB10202 DPA10301-DPB10401 DPA10301-DPB110601 DPA10301-DPB11801 DPA10301-DPB12301 DPA10301-DPB13901 DPA10301-DPB14001 DPA10301-DPB16501 DPA10401-DPB10101 DPA10401-DPB10201 DPA10401-DPB10202 DPA10401-DPB10501
VFAIKKKDSTKWRKLVDFREL

SEQ ID NO: 5759 - protein, 22 aa, Human immunodeficiency virus 1
  source 1..22: note = HLAs: DRB1_0405 DRB1_0410 DRB1_0806 DRB1_1102 DRB1_1103 DRB1_1104 DRB1_1301 DRB1_1304 DPA10103-DPB10101 DPA10103-DPB10201 DPA10103-DPB10202 DPA10103-DPB10501 DPA10103-DPB11501 DPA10103-DPB11601 DPA10103-DPB11901 DPA10103-DPB13101 DPA10103-DPB13401 DPA10103-DPB14001 DPA10103-DPB14101 DPA10103-DPB14801 DPA10103-DPB15001 DPA10104-DPB10101 DPA10104-DPB11501 DPA10105-DPB10101 DPA10105-DPB15001 DPA10201-DPB110601 DPA10201-DPB11501 DPA10201-DPB11601 DPA10201-DPB11901 DPA10202-DPB10101 DPA10202-DPB10501 DPA10202-DPB110601 DPA10202-DPB11901 DPA10202-DPB13101 DPA10202-DPB13801 DPA10202-DPB16501 DPA10301-DPB10101 DPA10301-DPB10201 DPA10301-DPB10202 DPA10301-DPB10401 DPA10301-DPB110601 DPA10301-DPB11801 DPA10301-DPB12301 DPA10301-DPB13901 DPA10301-DPB14001 DPA10301-DPB16501 DPA10401-DPB10101 DPA10401-DPB10201 DPA10401-DPB10202 DPA10401-DPB10501
VFAIKKKDSTKWRKLVDFRELN

SEQ ID NO: 5760 - protein, 23 aa, Human immunodeficiency virus 1
  source 1..23: note = HLAs: DRB1_0405 DRB1_0410 DRB1_0801 DRB1_0806 DRB1_1001 DRB1_1102 DRB1_1103 DRB1_1104 DRB1_1301 DRB1_1304 DPA10103-DPB10101 DPA10103-DPB10201 DPA10103-DPB10202 DPA10103-DPB10501 DPA10103-DPB11501 DPA10103-DPB11601 DPA10103-DPB11901 DPA10103-DPB13101 DPA10103-DPB13401 DPA10103-DPB14001 DPA10103-DPB14101 DPA10103-DPB14801 DPA10103-DPB15001 DPA10104-DPB10101 DPA10104-DPB11501 DPA10105-DPB10101 DPA10105-DPB15001 DPA10106-DPB10101 DPA10201-DPB10101 DPA10201-DPB110601 DPA10201-DPB11501 DPA10201-DPB11601 DPA10201-DPB11901 DPA10202-DPB10101 DPA10202-DPB10501 DPA10202-DPB110601 DPA10202-DPB11901 DPA10202-DPB13101 DPA10202-DPB13801 DPA10202-DPB16501 DPA10301-DPB10101 DPA10301-DPB10201 DPA10301-DPB10202 DPA10301-DPB10401 DPA10301-DPB110601 DPA10301-DPB11801 DPA10301-DPB12301 DPA10301-DPB13901 DPA10301-DPB14001 DPA10301-DPB15501 DPA10301-DPB16501 DPA10401-DPB10101 DPA10401-DPB10201 DPA10401-DPB10202 DPA10401-DPB10501
VFAIKKKDSTKWRKLVDFRELNK

SEQ ID NO: 5761 - protein, 24 aa, Human immunodeficiency virus 1
  source 1..24: note = HLAs: DRB1_0405 DRB1_0410 DRB1_0801 DRB1_0806 DRB1_1001 DRB1_1102 DRB1_1103 DRB1_1104 DRB1_1301 DRB1_1304 DPA10103-DPB10101 DPA10103-DPB10201 DPA10103-DPB10202 DPA10103-DPB10501 DPA10103-DPB11501 DPA10103-DPB11601 DPA10103-DPB11801 DPA10103-DPB11901 DPA10103-DPB13101 DPA10103-DPB13401 DPA10103-DPB14001 DPA10103-DPB14101 DPA10103-DPB14801 DPA10103-DPB15001 DPA10104-DPB10101 DPA10104-DPB11501 DPA10105-DPB10101 DPA10105-DPB11801 DPA10105-DPB15001 DPA10106-DPB10101 DPA10201-DPB10101 DPA10201-DPB10501 DPA10201-DPB110601 DPA10201-DPB11501 DPA10201-DPB11601 DPA10201-DPB11901 DPA10201-DPB13401 DPA10202-DPB10101 DPA10202-DPB10201 DPA10202-DPB10202 DPA10202-DPB10501 DPA10202-DPB110601 DPA10202-DPB11801 DPA10202-DPB11901 DPA10202-DPB13101 DPA10202-DPB13801 DPA10202-DPB15501 DPA10202-DPB16501 DPA10301-DPB10101 DPA10301-DPB10201 DPA10301-DPB10202 DPA10301-DPB10401 DPA10301-DPB10402 DPA10301-DPB110501 DPA10301-DPB110601 DPA10301-DPB11801 DPA10301-DPB12301 DPA10301-DPB13901 DPA10301-DPB14001; note = HLAs: DPA10301-DPB14901 DPA10301-DPB15501 DPA10301-DPB16501 DPA10301-DPB18001 DPA10401-DPB10101 DPA10401-DPB10201 DPA10401-DPB10202 DPA10401-DPB10501
VFAIKKKDSTKWRKLVDFRELNKR

SEQ ID NO: 5762 - protein, 25 aa, Human immunodeficiency virus 1
  source 1..25: note = HLAs: DRB1_0405 DRB1_0410 DRB1_0801 DRB1_0806 DRB1_1001 DRB1_1102 DRB1_1103 DRB1_1104 DRB1_1301 DRB1_1304 DPA10103-DPB10101 DPA10103-DPB10201 DPA10103-DPB10202 DPA10103-DPB10501 DPA10103-DPB11501 DPA10103-DPB11601 DPA10103-DPB11801 DPA10103-DPB11901 DPA10103-DPB13101 DPA10103-DPB13401 DPA10103-DPB14001 DPA10103-DPB14101 DPA10103-DPB14801 DPA10103-DPB15001 DPA10104-DPB10101 DPA10104-DPB11501 DPA10105-DPB10101 DPA10105-DPB11801 DPA10105-DPB15001 DPA10106-DPB10101 DPA10201-DPB10101 DPA10201-DPB10501 DPA10201-DPB110601 DPA10201-DPB11501 DPA10201-DPB11601 DPA10201-DPB11901 DPA10201-DPB13401 DPA10202-DPB10101 DPA10202-DPB10201 DPA10202-DPB10202 DPA10202-DPB10501 DPA10202-DPB110601 DPA10202-DPB11801 DPA10202-DPB11901 DPA10202-DPB13101 DPA10202-DPB13801 DPA10202-DPB15501 DPA10202-DPB16501 DPA10301-DPB10101 DPA10301-DPB10201 DPA10301-DPB10202 DPA10301-DPB10401 DPA10301-DPB10402 DPA10301-DPB110501 DPA10301-DPB110601 DPA10301-DPB11801 DPA10301-DPB12301 DPA10301-DPB13901 DPA10301-DPB14001; note = HLAs: DPA10301-DPB14901 DPA10301-DPB15501 DPA10301-DPB16501 DPA10301-DPB18001 DPA10401-DPB10101 DPA10401-DPB10201 DPA10401-DPB10202 DPA10401-DPB10501
VFAIKKKDSTKWRKLVDFRELNKRT

SEQ ID NO: 5763 - protein, 13 aa, Human immunodeficiency virus 1
  source 1..13: note = HLAs: DRB1_1101 DRB1_1103 DRB1_1104 DRB1_1305
VFIHNFKRKGGIG

SEQ ID NO: 5764 - protein, 14 aa, Human immunodeficiency virus 1
  source 1..14: note = HLAs: DRB1_0804 DRB1_0806 DRB1_1101 DRB1_1102 DRB1_1103 DRB1_1104 DRB1_1301 DRB1_1305
VFIHNFKRKGGIGG

SEQ ID NO: 5765 - protein, 15 aa, Human immunodeficiency virus 1
  source 1..15: note = HLAs: DRB1_0802 DRB1_0804 DRB1_0806 DRB1_0809 DRB1_1101 DRB1_1102 DRB1_1103 DRB1_1104 DRB1_1301 DRB1_1304 DRB1_1305 DRB1_1406
VFIHNFKRKGGIGGY

SEQ ID NO: 5766 - protein, 16 aa, Human immunodeficiency virus 1
  source 1..16: note = HLAs: DRB1_0804 DRB1_0806 DRB1_1101 DRB1_1102 DRB1_1103 DRB1_1104 DRB1_1301 DRB1_1304 DRB1_1305
VFIHNFKRKGGIGGYS

SEQ ID NO: 5767 - protein, 17 aa, Human immunodeficiency virus 1
  source 1..17: note = HLAs: DRB1_0804 DRB1_0806 DRB1_1101 DRB1_1102 DRB1_1103 DRB1_1104 DRB1_1301 DRB1_1304 DRB1_1305
VFIHNFKRKGGIGGYSA

SEQ ID NO: 5768 - protein, 18 aa, Human immunodeficiency virus 1
  source 1..18: note = HLAs: DRB1_1101 DRB1_1103 DRB1_1104 DRB1_1305
VFIHNFKRKGGIGGYSAG

SEQ ID NO: 5769 - protein, 19 aa, Human immunodeficiency virus 1
  source 1..19: note = HLAs: DRB1_1101 DRB1_1103 DRB1_1104 DRB1_1305
VFIHNFKRKGGIGGYSAGE

SEQ ID NO: 5770 - protein, 20 aa, Human immunodeficiency virus 1
  source 1..20: note = HLAs: DRB1_0804 DRB1_0806 DRB1_1101 DRB1_1102 DRB1_1103 DRB1_1104 DRB1_1301 DRB1_1304 DRB1_1305
VFIHNFKRKGGIGGYSAGER

SEQ ID NO: 5771 - protein, 21 aa, Human immunodeficiency virus 1
  source 1..21: note = HLAs: DRB1_0806 DRB1_1101 DRB1_1102 DRB1_1103 DRB1_1104 DRB1_1301 DRB1_1304 DRB1_1305
VFIHNFKRKGGIGGYSAGERI

SEQ ID NO: 5772 - protein, 22 aa, Human immunodeficiency virus 1
  source 1..22: note = HLAs: DRB1_0806 DRB1_1101 DRB1_1102 DRB1_1103 DRB1_1104 DRB1_1301 DRB1_1304 DRB1_1305
VFIHNFKRKGGIGGYSAGERII

SEQ ID NO: 5773 - protein, 23 aa, Human immunodeficiency virus 1
  source 1..23: note = HLAs: DRB1_0806 DRB1_1101 DRB1_1102 DRB1_1103 DRB1_1104 DRB1_1301 DRB1_1304 DRB1_1305
VFIHNFKRKGGIGGYSAGERIID

SEQ ID NO: 5774 - protein, 24 aa, Human immunodeficiency virus 1
  source 1..24: note = HLAs: DRB1_0806 DRB1_1101 DRB1_1102 DRB1_1103 DRB1_1104 DRB1_1301 DRB1_1304 DRB1_1305
VFIHNFKRKGGIGGYSAGERIIDI

SEQ ID NO: 5775 - protein, 25 aa, Human immunodeficiency virus 1
  source 1..25: note = HLAs: DRB1_0806 DRB1_1101 DRB1_1102 DRB1_1103 DRB1_1104 DRB1_1301 DRB1_1304 DRB1_1305
VFIHNFKRKGGIGGYSAGERIIDII

SEQ ID NO: 5776 - protein, 13 aa, Human immunodeficiency virus 1
  source 1..13: note = HLAs: DPA10103-DPB11501 DPA10104-DPB11501 DPA10301-DPB10201 DPA10301-DPB10202
VGEIYKRWIILGL

SEQ ID NO: 5777 - protein, 14 aa, Human immunodeficiency virus 1
  source 1..14: note = HLAs: DRB1_1001 DPA10103-DPB10101 DPA10103-DPB10201 DPA10103-DPB10202 DPA10103-DPB10501 DPA10103-DPB11101 DPA10103-DPB11501 DPA10103-DPB11601 DPA10103-DPB11901 DPA10103-DPB13101 DPA10103-DPB14801 DPA10103-DPB15001 DPA10104-DPB10101 DPA10104-DPB11501 DPA10105-DPB10101 DPA10105-DPB15001 DPA10202-DPB110601 DPA10202-DPB11901 DPA10301-DPB10101 DPA10301-DPB10201 DPA10301-DPB10202 DPA10301-DPB10401 DPA10301-DPB110601 DPA10301-DPB11801 DPA10301-DPB12301 DPA10301-DPB13901 DPA10301-DPB14001 DPA10301-DPB16501 DPA10401-DPB10101 DPA10401-DPB10201 DPA10401-DPB10202 DPA10401-DPB10501 DQA10102-DQB10501
VGEIYKRWIILGLN

SEQ ID NO: 5778 - protein, 15 aa, Human immunodeficiency virus 1
  source 1..15: note = HLAs: DRB1_0101 DRB1_0404 DRB1_0410 DRB1_0701 DRB1_0801 DRB1_0802 DRB1_0804 DRB1_0806 DRB1_0809 DRB1_0901 DRB1_1001 DRB1_1101 DRB1_1102 DRB1_1103 DRB1_1104 DRB1_1301 DRB1_1304 DRB1_1305 DRB1_1406 DRB1_1501 DRB1_1502 DRB1_1503 DRB1_1601 DRB1_1602 DPA10103-DPB10101 DPA10103-DPB10201 DPA10103-DPB10202 DPA10103-DPB10301 DPA10103-DPB10501 DPA10103-DPB10601 DPA10103-DPB11101 DPA10103-DPB112401 DPA10103-DPB113101 DPA10103-DPB11401 DPA10103-DPB11501 DPA10103-DPB11601 DPA10103-DPB11701 DPA10103-DPB11801 DPA10103-DPB11901 DPA10103-DPB12001 DPA10103-DPB12101 DPA10103-DPB12901 DPA10103-DPB13001 DPA10103-DPB13101 DPA10103-DPB13401 DPA10103-DPB14001 DPA10103-DPB14101 DPA10103-DPB14801 DPA10103-DPB15001 DPA10103-DPB15501 DPA10103-DPB15901 DPA10104-DPB10101 DPA10104-DPB10301 DPA10104-DPB11501 DPA10105-DPB10101 DPA10105-DPB10301 DPA10105-DPB11801 DPA10105-DPB15001 DPA10106-DPB10101 DPA10201-DPB10101 DPA10201-DPB10202 DPA10201-DPB10601 DPA10201-DPB110601 DPA10201-DPB11501 DPA10201-DPB11601; note = HLAs: DPA10201-DPB11901 DPA10201-DPB19101 DPA10202-DPB10101 DPA10202-DPB10201 DPA10202-DPB10202 DPA10202-DPB10501 DPA10202-DPB110601 DPA10202-DPB11101 DPA10202-DPB113101 DPA10202-DPB11701 DPA10202-DPB11801 DPA10202-DPB11901 DPA10202-DPB12101 DPA10202-DPB12901 DPA10202-DPB13001 DPA10202-DPB13101 DPA10202-DPB13801 DPA10202-DPB15501 DPA10202-DPB16501 DPA10301-DPB10101 DPA10301-DPB10201 DPA10301-DPB10202 DPA10301-DPB10301 DPA10301-DPB10401 DPA10301-DPB10402 DPA10301-DPB110501 DPA10301-DPB110601 DPA10301-DPB11101 DPA10301-DPB11301 DPA10301-DPB11701 DPA10301-DPB11801 DPA10301-DPB12301 DPA10301-DPB13901 DPA10301-DPB14001 DPA10301-DPB14901 DPA10301-DPB15501 DPA10301-DPB16501 DPA10301-DPB17501 DPA10301-DPB18001 DPA10401-DPB10101 DPA10401-DPB10201 DPA10401-DPB10202 DPA10401-DPB10301 DPA10401-DPB10501 DPA10401-DPB11301 DPA10401-DPB113301 DPA10401-DPB11401 DQA10102-DQB10501 DQA10103-DQB10501
VGEIYKRWIILGLNK

SEQ ID NO: 5779 - protein, 16 aa, Human immunodeficiency virus 1
  source 1..16: note = HLAs: DRB1_0101 DRB1_0405 DRB1_0408 DRB1_0410 DRB1_0701 DRB1_0801 DRB1_0802 DRB1_0804 DRB1_0806 DRB1_0809 DRB1_0813 DRB1_0901 DRB1_1001 DRB1_1101 DRB1_1104 DRB1_1114 DRB1_1302 DRB1_1304 DRB1_1305 DRB1_1406 DRB1_1501 DRB1_1502 DRB1_1503 DRB1_1601 DRB1_1602 DPA10103-DPB10101 DPA10103-DPB10201 DPA10103-DPB10202 DPA10103-DPB10301 DPA10103-DPB10401 DPA10103-DPB10501 DPA10103-DPB10601 DPA10103-DPB10901 DPA10103-DPB11001 DPA10103-DPB11101 DPA10103-DPB112401 DPA10103-DPB112601 DPA10103-DPB11301 DPA10103-DPB113101 DPA10103-DPB113301 DPA10103-DPB11401 DPA10103-DPB11501 DPA10103-DPB11601 DPA10103-DPB11701 DPA10103-DPB11801 DPA10103-DPB11901 DPA10103-DPB12001 DPA10103-DPB12101 DPA10103-DPB12301 DPA10103-DPB12901 DPA10103-DPB13001 DPA10103-DPB13101 DPA10103-DPB13401 DPA10103-DPB13901 DPA10103-DPB14001 DPA10103-DPB14101 DPA10103-DPB14801 DPA10103-DPB15001 DPA10103-DPB15501 DPA10103-DPB15901 DPA10104-DPB10101 DPA10104-DPB10301 DPA10104-DPB11001 DPA10104-DPB11301 DPA10104-DPB11501 DPA10105-DPB10101; note = HLAs: DPA10105-DPB10301 DPA10105-DPB10401 DPA10105-DPB11801 DPA10105-DPB15001 DPA10106-DPB10101 DPA10106-DPB11101 DPA10201-DPB10101 DPA10201-DPB10201 DPA10201-DPB10202 DPA10201-DPB10301 DPA10201-DPB10501 DPA10201-DPB10601 DPA10201-DPB110601 DPA10201-DPB11101 DPA10201-DPB11301 DPA10201-DPB113301 DPA10201-DPB11501 DPA10201-DPB11601 DPA10201-DPB11901 DPA10201-DPB13001 DPA10201-DPB14501 DPA10201-DPB15501 DPA10201-DPB19101 DPA10202-DPB10101 DPA10202-DPB10201 DPA10202-DPB10202 DPA10202-DPB10401 DPA10202-DPB10501 DPA10202-DPB110601 DPA10202-DPB11101 DPA10202-DPB11301 DPA10202-DPB113101 DPA10202-DPB11701 DPA10202-DPB11801 DPA10202-DPB11901 DPA10202-DPB12101 DPA10202-DPB12901 DPA10202-DPB13001 DPA10202-DPB13101 DPA10202-DPB13801 DPA10202-DPB15501 DPA10202-DPB16501 DPA10202-DPB18501 DPA10301-DPB10101 DPA10301-DPB10201 DPA10301-DPB10202 DPA10301-DPB10301 DPA10301-DPB10401 DPA10301-DPB10402 DPA10301-DPB10901 DPA10301-DPB110501 DPA10301-DPB110601 DPA10301-DPB11101 DPA10301-DPB11301; note = HLAs: DPA10301-DPB11701 DPA10301-DPB11801 DPA10301-DPB12301 DPA10301-DPB13901 DPA10301-DPB14001 DPA10301-DPB14901 DPA10301-DPB15501 DPA10301-DPB16501 DPA10301-DPB17501 DPA10301-DPB18001 DPA10401-DPB10101 DPA10401-DPB10201 DPA10401-DPB10202 DPA10401-DPB10301 DPA10401-DPB10402 DPA10401-DPB10501 DPA10401-DPB110501 DPA10401-DPB11301 DPA10401-DPB113301 DPA10401-DPB11401 DPA10401-DPB14901 DQA10102-DQB10501 DQA10102-DQB10503 DQA10103-DQB10501
VGEIYKRWIILGLNKI

SEQ ID NO: 5780 - protein, 17 aa, Human immunodeficiency virus 1
  source 1..17: note = HLAs: DRB1_0101 DRB1_0102 DRB1_0401 DRB1_0404 DRB1_0405 DRB1_0408 DRB1_0410 DRB1_0701 DRB1_0801 DRB1_0802 DRB1_0803 DRB1_0804 DRB1_0806 DRB1_0809 DRB1_0813 DRB1_0901 DRB1_1001 DRB1_1101 DRB1_1102 DRB1_1103 DRB1_1104 DRB1_1114 DRB1_1201 DRB1_1301 DRB1_1302 DRB1_1304 DRB1_1305 DRB1_1312 DRB1_1401 DRB1_1402 DRB1_1403 DRB1_1404 DRB1_1406 DRB1_1407 DRB1_1454 DRB1_1501 DRB1_1502 DRB1_1503 DRB1_1601 DRB1_1602 DPA10103-DPB10101 DPA10103-DPB10201 DPA10103-DPB10202 DPA10103-DPB10301 DPA10103-DPB10401 DPA10103-DPB10402 DPA10103-DPB10501 DPA10103-DPB10601 DPA10103-DPB10901 DPA10103-DPB11001 DPA10103-DPB110501 DPA10103-DPB11101 DPA10103-DPB112401 DPA10103-DPB112601 DPA10103-DPB11301 DPA10103-DPB113101 DPA10103-DPB113301 DPA10103-DPB11401 DPA10103-DPB11501 DPA10103-DPB11601 DPA10103-DPB11701 DPA10103-DPB11801 DPA10103-DPB11901 DPA10103-DPB12001 DPA10103-DPB12101 DPA10103-DPB12301 DPA10103-DPB12901 DPA10103-DPB13001 DPA10103-DPB13101 DPA10103-DPB13401 DPA10103-DPB13901 DPA10103-DPB14001; note = HLAs: DPA10103-DPB14101 DPA10103-DPB14801 DPA10103-DPB14901 DPA10103-DPB15001 DPA10103-DPB15101 DPA10103-DPB15501 DPA10103-DPB15901 DPA10103-DPB18001 DPA10104-DPB10101 DPA10104-DPB10301 DPA10104-DPB11001 DPA10104-DPB11301 DPA10104-DPB11501 DPA10105-DPB10101 DPA10105-DPB10301 DPA10105-DPB10401 DPA10105-DPB11801 DPA10105-DPB15001 DPA10106-DPB10101 DPA10106-DPB11101 DPA10201-DPB10101 DPA10201-DPB10201 DPA10201-DPB10202 DPA10201-DPB10301 DPA10201-DPB10501 DPA10201-DPB10601 DPA10201-DPB110601 DPA10201-DPB11101 DPA10201-DPB11301 DPA10201-DPB113101 DPA10201-DPB113301 DPA10201-DPB11501 DPA10201-DPB11601 DPA10201-DPB11701 DPA10201-DPB11801 DPA10201-DPB11901 DPA10201-DPB13001 DPA10201-DPB14501 DPA10201-DPB15501 DPA10201-DPB19101 DPA10202-DPB10101 DPA10202-DPB10201 DPA10202-DPB10202 DPA10202-DPB10301 DPA10202-DPB10401 DPA10202-DPB10402 DPA10202-DPB10501 DPA10202-DPB10901 DPA10202-DPB110001 DPA10202-DPB110501 DPA10202-DPB110601 DPA10202-DPB11101 DPA10202-DPB11301 DPA10202-DPB113101; note = HLAs: DPA10202-DPB11401 DPA10202-DPB11701 DPA10202-DPB11801 DPA10202-DPB11901 DPA10202-DPB12101 DPA10202-DPB12901 DPA10202-DPB13001 DPA10202-DPB13101 DPA10202-DPB13801 DPA10202-DPB14501 DPA10202-DPB15501 DPA10202-DPB16501 DPA10202-DPB18501 DPA10301-DPB10101 DPA10301-DPB10201 DPA10301-DPB10202 DPA10301-DPB10301 DPA10301-DPB10401 DPA10301-DPB10402 DPA10301-DPB10901 DPA10301-DPB110501 DPA10301-DPB110601 DPA10301-DPB11101 DPA10301-DPB11301 DPA10301-DPB11701 DPA10301-DPB11801 DPA10301-DPB12301 DPA10301-DPB13901 DPA10301-DPB14001 DPA10301-DPB14901 DPA10301-DPB15501 DPA10301-DPB16501 DPA10301-DPB17501 DPA10301-DPB18001 DPA10401-DPB10101 DPA10401-DPB10201 DPA10401-DPB10202 DPA10401-DPB10301 DPA10401-DPB10402 DPA10401-DPB10501 DPA10401-DPB110501 DPA10401-DPB11301 DPA10401-DPB113301 DPA10401-DPB11401 DPA10401-DPB14901 DQA10102-DQB10501 DQA10102-DQB10503 DQA10102-DQB10609 DQA10103-DQB10501 DQA10103-DQB10609
VGEIYKRWIILGLNKIV

SEQ ID NO: 5781 - protein, 18 aa, Human immunodeficiency virus 1
  source 1..18: note = HLAs: DRB1_0101 DRB1_0102 DRB1_0404 DRB1_0405 DRB1_0408 DRB1_0410 DRB1_0701 DRB1_0801 DRB1_0802 DRB1_0804 DRB1_0806 DRB1_0809 DRB1_0813 DRB1_0901 DRB1_1001 DRB1_1101 DRB1_1102 DRB1_1103 DRB1_1104 DRB1_1114 DRB1_1201 DRB1_1301 DRB1_1302 DRB1_1304 DRB1_1305 DRB1_1312 DRB1_1401 DRB1_1402 DRB1_1404 DRB1_1406 DRB1_1454 DRB1_1501 DRB1_1502 DRB1_1503 DRB1_1601 DRB1_1602 DPA10103-DPB10101 DPA10103-DPB10201 DPA10103-DPB10202 DPA10103-DPB10301 DPA10103-DPB10401 DPA10103-DPB10501 DPA10103-DPB10601 DPA10103-DPB11101 DPA10103-DPB112401 DPA10103-DPB112601 DPA10103-DPB11301 DPA10103-DPB113301 DPA10103-DPB11501 DPA10103-DPB11601 DPA10103-DPB11801 DPA10103-DPB11901 DPA10103-DPB12001 DPA10103-DPB12101 DPA10103-DPB12301 DPA10103-DPB12901 DPA10103-DPB13001 DPA10103-DPB13101 DPA10103-DPB13401 DPA10103-DPB13901 DPA10103-DPB14001 DPA10103-DPB14101 DPA10103-DPB14801 DPA10103-DPB15001 DPA10103-DPB15501 DPA10104-DPB10101 DPA10104-DPB10301 DPA10104-DPB11301 DPA10104-DPB11501 DPA10105-DPB10101 DPA10105-DPB10301; note = HLAs: DPA10105-DPB10401 DPA10105-DPB11801 DPA10105-DPB15001 DPA10106-DPB10101 DPA10106-DPB11101 DPA10201-DPB10101 DPA10201-DPB10201 DPA10201-DPB10202 DPA10201-DPB10501 DPA10201-DPB110601 DPA10201-DPB11101 DPA10201-DPB11501 DPA10201-DPB11601 DPA10201-DPB11901 DPA10201-DPB15501 DPA10202-DPB10101 DPA10202-DPB10201 DPA10202-DPB10202 DPA10202-DPB10401 DPA10202-DPB10501 DPA10202-DPB110601 DPA10202-DPB11101 DPA10202-DPB11301 DPA10202-DPB11801 DPA10202-DPB11901 DPA10202-DPB12101 DPA10202-DPB13001 DPA10202-DPB13101 DPA10202-DPB13801 DPA10202-DPB15501 DPA10202-DPB16501 DPA10301-DPB10101 DPA10301-DPB10201 DPA10301-DPB10202 DPA10301-DPB10301 DPA10301-DPB10401 DPA10301-DPB10402 DPA10301-DPB10901 DPA10301-DPB110501 DPA10301-DPB110601 DPA10301-DPB11101 DPA10301-DPB11301 DPA10301-DPB11701 DPA10301-DPB11801 DPA10301-DPB12301 DPA10301-DPB13901 DPA10301-DPB14001 DPA10301-DPB14901 DPA10301-DPB15501 DPA10301-DPB16501 DPA10301-DPB17501 DPA10301-DPB18001 DPA10401-DPB10101 DPA10401-DPB10201 DPA10401-DPB10202; note = HLAs: DPA10401-DPB10301 DPA10401-DPB10402 DPA10401-DPB10501 DPA10401-DPB110501 DPA10401-DPB11301 DPA10401-DPB113301 DPA10401-DPB11401 DPA10401-DPB14901 DQA10102-DQB10501 DQA10102-DQB10503 DQA10103-DQB10501
VGEIYKRWIILGLNKIVR

SEQ ID NO: 5782 - protein, 19 aa, Human immunodeficiency virus 1
  source 1..19: note = HLAs: DRB1_0101 DRB1_0102 DRB1_0103 DRB1_0401 DRB1_0404 DRB1_0405 DRB1_0408 DRB1_0410 DRB1_0701 DRB1_0801 DRB1_0802 DRB1_0803 DRB1_0804 DRB1_0806 DRB1_0809 DRB1_0813 DRB1_0901 DRB1_1001 DRB1_1101 DRB1_1102 DRB1_1103 DRB1_1104 DRB1_1114 DRB1_1201 DRB1_1202 DRB1_1301 DRB1_1302 DRB1_1303 DRB1_1304 DRB1_1305 DRB1_1312 DRB1_1401 DRB1_1402 DRB1_1403 DRB1_1404 DRB1_1405 DRB1_1406 DRB1_1407 DRB1_1418 DRB1_1454 DRB1_1501 DRB1_1502 DRB1_1503 DRB1_1601 DRB1_1602 DPA10103-DPB10101 DPA10103-DPB10201 DPA10103-DPB10202 DPA10103-DPB10301 DPA10103-DPB10401 DPA10103-DPB10501 DPA10103-DPB10601 DPA10103-DPB10901 DPA10103-DPB11001 DPA10103-DPB11101 DPA10103-DPB112401 DPA10103-DPB112601 DPA10103-DPB11301 DPA10103-DPB113101 DPA10103-DPB113301 DPA10103-DPB11401 DPA10103-DPB11501 DPA10103-DPB11601 DPA10103-DPB11701 DPA10103-DPB11801 DPA10103-DPB11901 DPA10103-DPB12001 DPA10103-DPB12101 DPA10103-DPB12301 DPA10103-DPB12901 DPA10103-DPB13001 DPA10103-DPB13101 DPA10103-DPB13401 DPA10103-DPB13901 DPA10103-DPB14001; note = HLAs: DPA10103-DPB14101 DPA10103-DPB14801 DPA10103-DPB15001 DPA10103-DPB15501 DPA10103-DPB15901 DPA10104-DPB10101 DPA10104-DPB10301 DPA10104-DPB11001 DPA10104-DPB11301 DPA10104-DPB11501 DPA10105-DPB10101 DPA10105-DPB10301 DPA10105-DPB10401 DPA10105-DPB11801 DPA10105-DPB15001 DPA10106-DPB10101 DPA10106-DPB11101 DPA10201-DPB10101 DPA10201-DPB10201 DPA10201-DPB10202 DPA10201-DPB10501 DPA10201-DPB10601 DPA10201-DPB110601 DPA10201-DPB11101 DPA10201-DPB11301 DPA10201-DPB113301 DPA10201-DPB11501 DPA10201-DPB11601 DPA10201-DPB11801 DPA10201-DPB11901 DPA10201-DPB13001 DPA10201-DPB15501 DPA10201-DPB19101 DPA10202-DPB10101 DPA10202-DPB10201 DPA10202-DPB10202 DPA10202-DPB10401 DPA10202-DPB10402 DPA10202-DPB10501 DPA10202-DPB10901 DPA10202-DPB110001 DPA10202-DPB110501 DPA10202-DPB110601 DPA10202-DPB11101 DPA10202-DPB11301 DPA10202-DPB113101 DPA10202-DPB11701 DPA10202-DPB11801 DPA10202-DPB11901 DPA10202-DPB12101 DPA10202-DPB12901 DPA10202-DPB13001 DPA10202-DPB13101 DPA10202-DPB13801; note = HLAs: DPA10202-DPB15501 DPA10202-DPB16501 DPA10202-DPB18501 DPA10301-DPB10101 DPA10301-DPB10201 DPA10301-DPB10202 DPA10301-DPB10301 DPA10301-DPB10401 DPA10301-DPB10402 DPA10301-DPB10901 DPA10301-DPB110501 DPA10301-DPB110601 DPA10301-DPB11101 DPA10301-DPB11301 DPA10301-DPB11701 DPA10301-DPB11801 DPA10301-DPB12301 DPA10301-DPB13901 DPA10301-DPB14001 DPA10301-DPB14901 DPA10301-DPB15501 DPA10301-DPB16501 DPA10301-DPB17501 DPA10301-DPB18001 DPA10401-DPB10101 DPA10401-DPB10201 DPA10401-DPB10202 DPA10401-DPB10301 DPA10401-DPB10402 DPA10401-DPB10501 DPA10401-DPB110501 DPA10401-DPB11301 DPA10401-DPB113301 DPA10401-DPB11401 DPA10401-DPB14901 DQA10102-DQB10501 DQA10102-DQB10503 DQA10102-DQB10609 DQA10103-DQB10501 DQA10103-DQB10503 DQA10103-DQB10608 DQA10103-DQB10609
VGEIYKRWIILGLNKIVRM

SEQ ID NO: 5783 - protein, 20 aa, Human immunodeficiency virus 1
  source 1..20: note = HLAs: DRB1_0101 DRB1_0102 DRB1_0103 DRB1_0401 DRB1_0402 DRB1_0404 DRB1_0405 DRB1_0408 DRB1_0410 DRB1_0701 DRB1_0801 DRB1_0802 DRB1_0803 DRB1_0804 DRB1_0806 DRB1_0809 DRB1_0813 DRB1_0901 DRB1_1001 DRB1_1101 DRB1_1102 DRB1_1103 DRB1_1104 DRB1_1114 DRB1_1201 DRB1_1202 DRB1_1301 DRB1_1302 DRB1_1303 DRB1_1304 DRB1_1305 DRB1_1312 DRB1_1401 DRB1_1402 DRB1_1403 DRB1_1404 DRB1_1405 DRB1_1406 DRB1_1407 DRB1_1418 DRB1_1454 DRB1_1501 DRB1_1502 DRB1_1503 DRB1_1601 DRB1_1602 DPA10103-DPB10101 DPA10103-DPB10201 DPA10103-DPB10202 DPA10103-DPB10301 DPA10103-DPB10401 DPA10103-DPB10402 DPA10103-DPB10501 DPA10103-DPB10601 DPA10103-DPB10901 DPA10103-DPB11001 DPA10103-DPB110501 DPA10103-DPB11101 DPA10103-DPB112401 DPA10103-DPB112601 DPA10103-DPB11301 DPA10103-DPB113101 DPA10103-DPB113301 DPA10103-DPB11401 DPA10103-DPB11501 DPA10103-DPB11601 DPA10103-DPB11701 DPA10103-DPB11801 DPA10103-DPB11901 DPA10103-DPB12001 DPA10103-DPB12101 DPA10103-DPB12301 DPA10103-DPB12901 DPA10103-DPB13001 DPA10103-DPB13101; note = HLAs: DPA10103-DPB13401 DPA10103-DPB13901 DPA10103-DPB14001 DPA10103-DPB14101 DPA10103-DPB14801 DPA10103-DPB14901 DPA10103-DPB15001 DPA10103-DPB15101 DPA10103-DPB15501 DPA10103-DPB15901 DPA10103-DPB18001 DPA10104-DPB10101 DPA10104-DPB10301 DPA10104-DPB11001 DPA10104-DPB11301 DPA10104-DPB11501 DPA10105-DPB10101 DPA10105-DPB10301 DPA10105-DPB10401 DPA10105-DPB11801 DPA10105-DPB15001 DPA10106-DPB10101 DPA10106-DPB11101 DPA10201-DPB10101 DPA10201-DPB10201 DPA10201-DPB10202 DPA10201-DPB10501 DPA10201-DPB10601 DPA10201-DPB10901 DPA10201-DPB11001 DPA10201-DPB110601 DPA10201-DPB11101 DPA10201-DPB11301 DPA10201-DPB113101 DPA10201-DPB113301 DPA10201-DPB11501 DPA10201-DPB11601 DPA10201-DPB11701 DPA10201-DPB11801 DPA10201-DPB11901 DPA10201-DPB13001 DPA10201-DPB13401 DPA10201-DPB15501 DPA10201-DPB19101 DPA10202-DPB10101 DPA10202-DPB10201 DPA10202-DPB10202 DPA10202-DPB10301 DPA10202-DPB10401 DPA10202-DPB10402 DPA10202-DPB10501 DPA10202-DPB10901 DPA10202-DPB110001 DPA10202-DPB110501; note = HLAs: DPA10202-DPB110601 DPA10202-DPB11101 DPA10202-DPB11301 DPA10202-DPB113101 DPA10202-DPB11401 DPA10202-DPB11701 DPA10202-DPB11801 DPA10202-DPB11901 DPA10202-DPB12101 DPA10202-DPB12901 DPA10202-DPB13001 DPA10202-DPB13101 DPA10202-DPB13801 DPA10202-DPB14501 DPA10202-DPB15501 DPA10202-DPB16501 DPA10202-DPB18501 DPA10301-DPB10101 DPA10301-DPB10201 DPA10301-DPB10202 DPA10301-DPB10301 DPA10301-DPB10401 DPA10301-DPB10402 DPA10301-DPB10901 DPA10301-DPB110501 DPA10301-DPB110601 DPA10301-DPB11101 DPA10301-DPB11301 DPA10301-DPB11701 DPA10301-DPB11801 DPA10301-DPB12301 DPA10301-DPB13901 DPA10301-DPB14001 DPA10301-DPB14901 DPA10301-DPB15501 DPA10301-DPB16501 DPA10301-DPB17501 DPA10301-DPB18001 DPA10401-DPB10101 DPA10401-DPB10201 DPA10401-DPB10202 DPA10401-DPB10301 DPA10401-DPB10402 DPA10401-DPB10501 DPA10401-DPB110501 DPA10401-DPB11301 DPA10401-DPB113301 DPA10401-DPB11401 DPA10401-DPB14901 DQA10102-DQB10501 DQA10102-DQB10503 DQA10102-DQB10609 DQA10103-DQB10501 DQA10103-DQB10503; note = HLAs: DQA10103-DQB10601 DQA10103-DQB10602 DQA10103-DQB10608 DQA10103-DQB10609
VGEIYKRWIILGLNKIVRMY

SEQ ID NO: 5784 - protein, 21 aa, Human immunodeficiency virus 1
  source 1..21: note = HLAs: DRB1_0101 DRB1_0102 DRB1_0401 DRB1_0404 DRB1_0405 DRB1_0408 DRB1_0410 DRB1_0701 DRB1_0801 DRB1_0802 DRB1_0803 DRB1_0804 DRB1_0806 DRB1_0809 DRB1_0813 DRB1_0901 DRB1_1001 DRB1_1101 DRB1_1102 DRB1_1103 DRB1_1104 DRB1_1114 DRB1_1201 DRB1_1202 DRB1_1301 DRB1_1302 DRB1_1303 DRB1_1304 DRB1_1305 DRB1_1312 DRB1_1401 DRB1_1402 DRB1_1403 DRB1_1404 DRB1_1405 DRB1_1406 DRB1_1407 DRB1_1418 DRB1_1454 DRB1_1501 DRB1_1502 DRB1_1503 DRB1_1601 DRB1_1602 DPA10103-DPB10101 DPA10103-DPB10201 DPA10103-DPB10202 DPA10103-DPB10301 DPA10103-DPB10501 DPA10103-DPB10601 DPA10103-DPB11101 DPA10103-DPB112401 DPA10103-DPB11301 DPA10103-DPB113101 DPA10103-DPB113301 DPA10103-DPB11401 DPA10103-DPB11501 DPA10103-DPB11601 DPA10103-DPB11701 DPA10103-DPB11801 DPA10103-DPB11901 DPA10103-DPB12001 DPA10103-DPB12101 DPA10103-DPB13001 DPA10103-DPB13101 DPA10103-DPB13401 DPA10103-DPB14001 DPA10103-DPB14101 DPA10103-DPB14801 DPA10103-DPB15001 DPA10103-DPB15501 DPA10104-DPB10101 DPA10104-DPB10301 DPA10104-DPB11301; note = HLAs: DPA10104-DPB11501 DPA10105-DPB10101 DPA10105-DPB10301 DPA10105-DPB11801 DPA10105-DPB15001 DPA10106-DPB10101 DPA10201-DPB10101 DPA10201-DPB10501 DPA10201-DPB110601 DPA10201-DPB11501 DPA10201-DPB11601 DPA10201-DPB11901 DPA10202-DPB10101 DPA10202-DPB10201 DPA10202-DPB10202 DPA10202-DPB10501 DPA10202-DPB110601 DPA10202-DPB11101 DPA10202-DPB11301 DPA10202-DPB11801 DPA10202-DPB11901 DPA10202-DPB12101 DPA10202-DPB13001 DPA10202-DPB13101 DPA10202-DPB13801 DPA10202-DPB15501 DPA10202-DPB16501 DPA10301-DPB10101 DPA10301-DPB10201 DPA10301-DPB10202 DPA10301-DPB10401 DPA10301-DPB10402 DPA10301-DPB10901 DPA10301-DPB110501 DPA10301-DPB110601 DPA10301-DPB11101 DPA10301-DPB11301 DPA10301-DPB11701 DPA10301-DPB11801 DPA10301-DPB12301 DPA10301-DPB13901 DPA10301-DPB14001 DPA10301-DPB14901 DPA10301-DPB15501 DPA10301-DPB16501 DPA10301-DPB17501 DPA10301-DPB18001 DPA10401-DPB10101 DPA10401-DPB10201 DPA10401-DPB10202 DPA10401-DPB10301 DPA10401-DPB10402 DPA10401-DPB10501 DPA10401-DPB110501; note = HLAs: DPA10401-DPB11301 DPA10401-DPB113301 DPA10401-DPB11401 DPA10401-DPB14901 DQA10102-DQB10501 DQA10102-DQB10503 DQA10103-DQB10501 DQA10103-DQB10609
VGEIYKRWIILGLNKIVRMYS

SEQ ID NO: 5785 - protein, 22 aa, Human immunodeficiency virus 1
  source 1..22: note = HLAs: DRB1_0101 DRB1_0102 DRB1_0301 DRB1_0401 DRB1_0404 DRB1_0405 DRB1_0408 DRB1_0410 DRB1_0701 DRB1_0801 DRB1_0802 DRB1_0803 DRB1_0804 DRB1_0806 DRB1_0809 DRB1_0813 DRB1_0901 DRB1_1001 DRB1_1101 DRB1_1102 DRB1_1103 DRB1_1104 DRB1_1114 DRB1_1201 DRB1_1202 DRB1_1301 DRB1_1302 DRB1_1303 DRB1_1304 DRB1_1305 DRB1_1312 DRB1_1401 DRB1_1402 DRB1_1403 DRB1_1404 DRB1_1405 DRB1_1406 DRB1_1407 DRB1_1418 DRB1_1454 DRB1_1501 DRB1_1502 DRB1_1503 DRB1_1601 DRB1_1602 DPA10103-DPB10101 DPA10103-DPB10201 DPA10103-DPB10202 DPA10103-DPB10301 DPA10103-DPB10501 DPA10103-DPB10601 DPA10103-DPB11101 DPA10103-DPB112401 DPA10103-DPB11301 DPA10103-DPB113101 DPA10103-DPB113301 DPA10103-DPB11401 DPA10103-DPB11501 DPA10103-DPB11601 DPA10103-DPB11701 DPA10103-DPB11801 DPA10103-DPB11901 DPA10103-DPB12001 DPA10103-DPB12101 DPA10103-DPB13001 DPA10103-DPB13101 DPA10103-DPB13401 DPA10103-DPB14001 DPA10103-DPB14101 DPA10103-DPB14801 DPA10103-DPB15001 DPA10103-DPB15501 DPA10104-DPB10101 DPA10104-DPB10301 DPA10104-DPB11301; note = HLAs: DPA10104-DPB11501 DPA10105-DPB10101 DPA10105-DPB10301 DPA10105-DPB11801 DPA10105-DPB15001 DPA10106-DPB10101 DPA10201-DPB10101 DPA10201-DPB10501 DPA10201-DPB110601 DPA10201-DPB11501 DPA10201-DPB11601 DPA10201-DPB11901 DPA10202-DPB10101 DPA10202-DPB10201 DPA10202-DPB10202 DPA10202-DPB10401 DPA10202-DPB10501 DPA10202-DPB110601 DPA10202-DPB11101 DPA10202-DPB11301 DPA10202-DPB113101 DPA10202-DPB11701 DPA10202-DPB11801 DPA10202-DPB11901 DPA10202-DPB12101 DPA10202-DPB13001 DPA10202-DPB13101 DPA10202-DPB13801 DPA10202-DPB15501 DPA10202-DPB16501 DPA10301-DPB10101 DPA10301-DPB10201 DPA10301-DPB10202 DPA10301-DPB10401 DPA10301-DPB10402 DPA10301-DPB10901 DPA10301-DPB110501 DPA10301-DPB110601 DPA10301-DPB11101 DPA10301-DPB11301 DPA10301-DPB11701 DPA10301-DPB11801 DPA10301-DPB12301 DPA10301-DPB13901 DPA10301-DPB14001 DPA10301-DPB14901 DPA10301-DPB15501 DPA10301-DPB16501 DPA10301-DPB17501 DPA10301-DPB18001 DPA10401-DPB10101 DPA10401-DPB10201 DPA10401-DPB10202 DPA10401-DPB10301; note = HLAs: DPA10401-DPB10402 DPA10401-DPB10501 DPA10401-DPB110501 DPA10401-DPB11301 DPA10401-DPB113301 DPA10401-DPB11401 DPA10401-DPB14901 DQA10102-DQB10501 DQA10102-DQB10503 DQA10102-DQB10609 DQA10103-DQB10501 DQA10103-DQB10503 DQA10103-DQB10601 DQA10103-DQB10602 DQA10103-DQB10608 DQA10103-DQB10609
VGEIYKRWIILGLNKIVRMYSP

SEQ ID NO: 5786 - protein, 14 aa, Human immunodeficiency virus 1
  source 1..14: note = HLAs: DQA10102-DQB10601
VGGHQAAMQMLKDT

SEQ ID NO: 5787 - protein, 15 aa, Human immunodeficiency virus 1
  source 1..15: note = HLAs: DQA10102-DQB10601 DQA10102-DQB10602 DQA10103-DQB10601
VGGHQAAMQMLKDTI

SEQ ID NO: 5788 - protein, 16 aa, Human immunodeficiency virus 1
  source 1..16: note = HLAs: DQA10102-DQB10501 DQA10102-DQB10601 DQA10102-DQB10602 DQA10102-DQB10609 DQA10103-DQB10601
VGGHQAAMQMLKDTIN

SEQ ID NO: 5789 - protein, 17 aa, Human immunodeficiency virus 1
  source 1..17: note = HLAs: DRB1_1001 DQA10102-DQB10501 DQA10102-DQB10601 DQA10102-DQB10609 DQA10103-DQB10601
VGGHQAAMQMLKDTINE

SEQ ID NO: 5790 - protein, 19 aa, Human immunodeficiency virus 1
  source 1..19: note = HLAs: DRB1_1001 DPA10301-DPB10101 DQA10102-DQB10501 DQA10102-DQB10609
VGGHQAAMQMLKDTINEEA

SEQ ID NO: 5791 - protein, 20 aa, Human immunodeficiency virus 1
  source 1..20: note = HLAs: DRB1_1001 DPA10301-DPB10101 DPA10301-DPB11801 DPA10401-DPB10101 DQA10102-DQB10501 DQA10102-DQB10503 DQA10102-DQB10601 DQA10102-DQB10609 DQA10103-DQB10501 DQA10103-DQB10601 DQA10103-DQB10609
VGGHQAAMQMLKDTINEEAA

SEQ ID NO: 5792 - protein, 21 aa, Human immunodeficiency virus 1
  source 1..21: note = HLAs: DRB1_1001 DPA10301-DPB10101 DPA10401-DPB10101 DQA10102-DQB10501 DQA10102-DQB10609
VGGHQAAMQMLKDTINEEAAE

SEQ ID NO: 5793 - protein, 22 aa, Human immunodeficiency virus 1
  source 1..22: note = HLAs: DRB1_1001 DPA10301-DPB10101 DPA10401-DPB10101 DQA10102-DQB10501 DQA10102-DQB10609 DQA10103-DQB10609
VGGHQAAMQMLKDTINEEAAEW

SEQ ID NO: 5794 - protein, 23 aa, Human immunodeficiency virus 1
  source 1..23: note = HLAs: DRB1_1001 DPA10301-DPB10101 DPA10401-DPB10101 DQA10102-DQB10501 DQA10102-DQB10609 DQA10103-DQB10609
VGGHQAAMQMLKDTINEEAAEWD

SEQ ID NO: 5795 - protein, 24 aa, Human immunodeficiency virus 1
  source 1..24: note = HLAs: DRB1_1001 DPA10301-DPB10101 DPA10401-DPB10101 DQA10102-DQB10501 DQA10102-DQB10503 DQA10102-DQB10609 DQA10103-DQB10609
VGGHQAAMQMLKDTINEEAAEWDR

SEQ ID NO: 5796 - protein, 13 aa, Human immunodeficiency virus 1
  source 1..13: note = HLAs: DQA10102-DQB10601 DQA10102-DQB10602 DQA10102-DQB10611 DQA10103-DQB10601 DQA10103-DQB10602
VGKLNWASQIYPG

SEQ ID NO: 5797 - protein, 14 aa, Human immunodeficiency virus 1
  source 1..14: note = HLAs: DPA10301-DPB10201 DPA10301-DPB10202 DQA10101-DQB10601 DQA10101-DQB10602 DQA10102-DQB10501 DQA10102-DQB10503 DQA10102-DQB10601 DQA10102-DQB10602 DQA10102-DQB10603 DQA10102-DQB10609 DQA10102-DQB10610 DQA10102-DQB10611 DQA10102-DQB10614 DQA10103-DQB10601 DQA10103-DQB10602 DQA10103-DQB10609 DQA10104-DQB10602 DQA10105-DQB10602 DQA10201-DQB10301 DQA10201-DQB10303 DQA10301-DQB10301 DQA10302-DQB10301 DQA10303-DQB10301 DQA10401-DQB10301 DQA10401-DQB10319 DQA10501-DQB10301 DQA10501-DQB10319 DQA10503-DQB10301 DQA10505-DQB10301 DQA10505-DQB10309 DQA10505-DQB10319 DQA10506-DQB10303 DQA10508-DQB10301 DQA10509-DQB10301 DQA10601-DQB10301
VGKLNWASQIYPGI

SEQ ID NO: 5798 - protein, 15 aa, Human immunodeficiency virus 1
  source 1..15: note = HLAs: DRB1_0101 DRB1_0701 DRB1_0901 DRB1_1001 DRB1_1114 DRB1_1302 DRB1_1304 DPA10103-DPB10201 DPA10103-DPB10202 DPA10103-DPB11501 DPA10103-DPB13401 DPA10103-DPB14801 DPA10104-DPB11501 DPA10202-DPB10101 DPA10301-DPB10101 DPA10301-DPB10201 DPA10301-DPB10202 DPA10301-DPB10401 DPA10301-DPB110601 DPA10301-DPB11801 DPA10301-DPB12301 DPA10301-DPB13901 DPA10301-DPB14001 DPA10401-DPB10101 DPA10401-DPB10201 DPA10401-DPB10202 DQA10101-DQB10601 DQA10101-DQB10602 DQA10102-DQB10501 DQA10102-DQB10503 DQA10102-DQB10601 DQA10102-DQB10602 DQA10102-DQB10603 DQA10102-DQB10609 DQA10102-DQB10610 DQA10102-DQB10611 DQA10102-DQB10614 DQA10103-DQB10501 DQA10103-DQB10601 DQA10103-DQB10602 DQA10103-DQB10603 DQA10103-DQB10608 DQA10103-DQB10609 DQA10103-DQB10614 DQA10104-DQB10602 DQA10105-DQB10602 DQA10201-DQB10301 DQA10201-DQB10303 DQA10301-DQB10301 DQA10302-DQB10301 DQA10303-DQB10301 DQA10401-DQB10301 DQA10401-DQB10319 DQA10501-DQB10301 DQA10501-DQB10319 DQA10503-DQB10301 DQA10505-DQB10301 DQA10505-DQB10309; note = HLAs: DQA10505-DQB10319 DQA10505-DQB10402 DQA10506-DQB10303 DQA10508-DQB10301 DQA10509-DQB10301 DQA10601-DQB10301
VGKLNWASQIYPGIK

SEQ ID NO: 5799 - protein, 16 aa, Human immunodeficiency virus 1
  source 1..16: note = HLAs: DRB1_0101 DRB1_0901 DRB1_1001 DRB1_1114 DRB1_1302 DRB1_1501 DPA10103-DPB10101 DPA10103-DPB10201 DPA10103-DPB10202 DPA10103-DPB11501 DPA10103-DPB13401 DPA10103-DPB14801 DPA10104-DPB10101 DPA10104-DPB11501 DPA10105-DPB10101 DPA10202-DPB10101 DPA10301-DPB10101 DPA10301-DPB10201 DPA10301-DPB10202 DPA10301-DPB10401 DPA10301-DPB110601 DPA10301-DPB11801 DPA10301-DPB12301 DPA10301-DPB13901 DPA10301-DPB14001 DPA10401-DPB10101 DPA10401-DPB10201 DPA10401-DPB10202 DQA10101-DQB10601 DQA10101-DQB10602 DQA10102-DQB10501 DQA10102-DQB10503 DQA10102-DQB10601 DQA10102-DQB10602 DQA10102-DQB10603 DQA10102-DQB10604 DQA10102-DQB10609 DQA10102-DQB10610 DQA10102-DQB10611 DQA10102-DQB10614 DQA10103-DQB10501 DQA10103-DQB10503 DQA10103-DQB10601 DQA10103-DQB10602 DQA10103-DQB10603 DQA10103-DQB10604 DQA10103-DQB10608 DQA10103-DQB10609 DQA10103-DQB10614 DQA10104-DQB10602 DQA10105-DQB10602 DQA10201-DQB10301 DQA10201-DQB10303 DQA10301-DQB10301 DQA10302-DQB10301 DQA10303-DQB10301 DQA10401-DQB10301; note = HLAs: DQA10401-DQB10319 DQA10501-DQB10301 DQA10501-DQB10319 DQA10503-DQB10301 DQA10505-DQB10301 DQA10505-DQB10309 DQA10505-DQB10319 DQA10505-DQB10402 DQA10506-DQB10303 DQA10508-DQB10301 DQA10509-DQB10301 DQA10601-DQB10301
VGKLNWASQIYPGIKV

SEQ ID NO: 5800 - protein, 13 aa, Human immunodeficiency virus 1
  source 1..13: note = HLAs: DQA10102-DQB10501 DQA10102-DQB10609 DQA10201-DQB10201 DQA10201-DQB10202 DQA10201-DQB10301 DQA10201-DQB10302 DQA10301-DQB10302 DQA10301-DQB10304 DQA10302-DQB10302 DQA10302-DQB10304 DQA10303-DQB10302 DQA10303-DQB10304 DQA10401-DQB10201 DQA10401-DQB10301 DQA10401-DQB10319 DQA10401-DQB10402 DQA10402-DQB10402 DQA10501-DQB10201 DQA10501-DQB10203 DQA10501-DQB10301 DQA10501-DQB10319 DQA10503-DQB10301 DQA10505-DQB10201 DQA10505-DQB10202 DQA10505-DQB10301 DQA10505-DQB10302 DQA10505-DQB10309 DQA10505-DQB10319 DQA10508-DQB10301 DQA10509-DQB10301 DQA10601-DQB10301
VHVASGYIEAEVI

SEQ ID NO: 5801 - protein, 14 aa, Human immunodeficiency virus 1
  source 1..14: note = HLAs: DPA10301-DPB10101 DQA10102-DQB10501 DQA10102-DQB10503 DQA10102-DQB10601 DQA10102-DQB10609 DQA10201-DQB10201 DQA10201-DQB10202 DQA10201-DQB10301 DQA10201-DQB10302 DQA10201-DQB10303 DQA10301-DQB10301 DQA10301-DQB10302 DQA10301-DQB10303 DQA10301-DQB10304 DQA10301-DQB10305 DQA10302-DQB10301 DQA10302-DQB10302 DQA10302-DQB10303 DQA10302-DQB10304 DQA10303-DQB10301 DQA10303-DQB10302 DQA10303-DQB10303 DQA10303-DQB10304 DQA10401-DQB10201 DQA10401-DQB10301 DQA10401-DQB10319 DQA10401-DQB10402 DQA10402-DQB10402 DQA10501-DQB10201 DQA10501-DQB10203 DQA10501-DQB10301 DQA10501-DQB10319 DQA10503-DQB10301 DQA10505-DQB10201 DQA10505-DQB10202 DQA10505-DQB10301 DQA10505-DQB10302 DQA10505-DQB10309 DQA10505-DQB10319 DQA10506-DQB10303 DQA10508-DQB10301 DQA10509-DQB10301 DQA10601-DQB10301
VHVASGYIEAEVIP

SEQ ID NO: 5802 - protein, 15 aa, Human immunodeficiency virus 1
  source 1..15: note = HLAs: DRB1_0101 DRB1_0401 DRB1_0405 DRB1_0408 DRB1_0701 DRB1_0901 DRB1_1001 DPA10103-DPB11501 DPA10104-DPB11501 DPA10301-DPB10101 DPA10301-DPB10201 DPA10301-DPB10202 DPA10401-DPB10101 DQA10101-DQB10601 DQA10102-DQB10501 DQA10102-DQB10502 DQA10102-DQB10503 DQA10102-DQB10601 DQA10102-DQB10604 DQA10102-DQB10609 DQA10102-DQB10611 DQA10103-DQB10601 DQA10103-DQB10609 DQA10201-DQB10201 DQA10201-DQB10202 DQA10201-DQB10301 DQA10201-DQB10302 DQA10201-DQB10303 DQA10301-DQB10301 DQA10301-DQB10302 DQA10301-DQB10303 DQA10301-DQB10304 DQA10301-DQB10305 DQA10302-DQB10301 DQA10302-DQB10302 DQA10302-DQB10303 DQA10302-DQB10304 DQA10303-DQB10301 DQA10303-DQB10302 DQA10303-DQB10303 DQA10303-DQB10304 DQA10401-DQB10201 DQA10401-DQB10301 DQA10401-DQB10319 DQA10401-DQB10402 DQA10402-DQB10402 DQA10501-DQB10201 DQA10501-DQB10203 DQA10501-DQB10301 DQA10501-DQB10319 DQA10503-DQB10301 DQA10505-DQB10201 DQA10505-DQB10202 DQA10505-DQB10301 DQA10505-DQB10302 DQA10505-DQB10309 DQA10505-DQB10319 DQA10505-DQB10402; note = HLAs: DQA10506-DQB10303 DQA10508-DQB10301 DQA10509-DQB10301 DQA10601-DQB10301
VHVASGYIEAEVIPA

SEQ ID NO: 5803 - protein, 16 aa, Human immunodeficiency virus 1
  source 1..16: note = HLAs: DRB1_0101 DRB1_0401 DRB1_0408 DRB1_0901 DRB1_1001 DPA10103-DPB11501 DPA10104-DPB11501 DPA10301-DPB10101 DPA10301-DPB10201 DPA10301-DPB10202 DPA10301-DPB110601 DPA10301-DPB16501 DPA10401-DPB10101 DQA10101-DQB10601 DQA10102-DQB10501 DQA10102-DQB10502 DQA10102-DQB10503 DQA10102-DQB10601 DQA10102-DQB10602 DQA10102-DQB10604 DQA10102-DQB10609 DQA10102-DQB10610 DQA10102-DQB10611 DQA10103-DQB10501 DQA10103-DQB10601 DQA10103-DQB10609 DQA10201-DQB10201 DQA10201-DQB10202 DQA10201-DQB10301 DQA10201-DQB10302 DQA10201-DQB10303 DQA10301-DQB10301 DQA10301-DQB10302 DQA10301-DQB10303 DQA10301-DQB10304 DQA10301-DQB10305 DQA10302-DQB10202 DQA10302-DQB10301 DQA10302-DQB10302 DQA10302-DQB10303 DQA10302-DQB10304 DQA10303-DQB10202 DQA10303-DQB10301 DQA10303-DQB10302 DQA10303-DQB10303 DQA10303-DQB10304 DQA10401-DQB10201 DQA10401-DQB10301 DQA10401-DQB10319 DQA10401-DQB10402 DQA10402-DQB10402 DQA10501-DQB10201 DQA10501-DQB10203 DQA10501-DQB10301 DQA10501-DQB10319 DQA10503-DQB10301 DQA10505-DQB10201; note = HLAs: DQA10505-DQB10202 DQA10505-DQB10301 DQA10505-DQB10302 DQA10505-DQB10309 DQA10505-DQB10319 DQA10506-DQB10303 DQA10508-DQB10301 DQA10509-DQB10301 DQA10601-DQB10301
VHVASGYIEAEVIPAE

SEQ ID NO: 5804 - protein, 17 aa, Human immunodeficiency virus 1
  source 1..17: note = HLAs: DRB1_0101 DRB1_0401 DRB1_0405 DRB1_0408 DRB1_0901 DRB1_1001 DPA10103-DPB11501 DPA10104-DPB11501 DPA10301-DPB10101 DPA10301-DPB10201 DPA10301-DPB10202 DPA10301-DPB110601 DPA10301-DPB16501 DPA10401-DPB10101 DQA10101-DQB10601 DQA10102-DQB10501 DQA10102-DQB10502 DQA10102-DQB10503 DQA10102-DQB10601 DQA10102-DQB10602 DQA10102-DQB10604 DQA10102-DQB10609 DQA10102-DQB10611 DQA10103-DQB10501 DQA10103-DQB10601 DQA10103-DQB10609 DQA10201-DQB10201 DQA10201-DQB10202 DQA10201-DQB10301 DQA10201-DQB10302 DQA10201-DQB10303 DQA10301-DQB10301 DQA10301-DQB10302 DQA10301-DQB10303 DQA10301-DQB10304 DQA10301-DQB10305 DQA10302-DQB10301 DQA10302-DQB10302 DQA10302-DQB10303 DQA10302-DQB10304 DQA10303-DQB10301 DQA10303-DQB10302 DQA10303-DQB10303 DQA10303-DQB10304 DQA10401-DQB10201 DQA10401-DQB10301 DQA10401-DQB10319 DQA10401-DQB10402 DQA10402-DQB10402 DQA10501-DQB10201 DQA10501-DQB10203 DQA10501-DQB10301 DQA10501-DQB10319 DQA10503-DQB10301 DQA10505-DQB10201 DQA10505-DQB10202 DQA10505-DQB10301; note = HLAs: DQA10505-DQB10302 DQA10505-DQB10309 DQA10505-DQB10319 DQA10506-DQB10303 DQA10508-DQB10301 DQA10509-DQB10301 DQA10601-DQB10301
VHVASGYIEAEVIPAET

SEQ ID NO: 5805 - protein, 18 aa, Human immunodeficiency virus 1
  source 1..18: note = HLAs: DRB1_0101 DRB1_0408 DRB1_1001 DPA10301-DPB10101 DPA10401-DPB10101 DQA10102-DQB10501 DQA10102-DQB10503 DQA10102-DQB10601 DQA10102-DQB10609 DQA10201-DQB10201 DQA10201-DQB10202 DQA10201-DQB10301 DQA10201-DQB10302 DQA10301-DQB10301 DQA10301-DQB10302 DQA10301-DQB10304 DQA10302-DQB10301 DQA10302-DQB10302 DQA10302-DQB10304 DQA10303-DQB10301 DQA10303-DQB10302 DQA10303-DQB10304 DQA10401-DQB10201 DQA10401-DQB10301 DQA10401-DQB10319 DQA10401-DQB10402 DQA10402-DQB10402 DQA10501-DQB10201 DQA10501-DQB10203 DQA10501-DQB10301 DQA10501-DQB10319 DQA10503-DQB10301 DQA10505-DQB10201 DQA10505-DQB10202 DQA10505-DQB10301 DQA10505-DQB10302 DQA10505-DQB10309 DQA10505-DQB10319 DQA10506-DQB10303 DQA10508-DQB10301 DQA10509-DQB10301 DQA10601-DQB10301
VHVASGYIEAEVIPAETG

SEQ ID NO: 5806 - protein, 19 aa, Human immunodeficiency virus 1
  source 1..19: note = HLAs: DRB1_0101 DRB1_0401 DRB1_0405 DRB1_0408 DRB1_0901 DRB1_1001 DPA10301-DPB10101 DPA10301-DPB16501 DPA10401-DPB10101 DQA10102-DQB10501 DQA10102-DQB10502 DQA10102-DQB10503 DQA10102-DQB10601 DQA10102-DQB10602 DQA10102-DQB10604 DQA10102-DQB10609 DQA10102-DQB10611 DQA10103-DQB10501 DQA10103-DQB10601 DQA10103-DQB10609 DQA10201-DQB10201 DQA10201-DQB10202 DQA10201-DQB10301 DQA10201-DQB10302 DQA10201-DQB10303 DQA10301-DQB10301 DQA10301-DQB10302 DQA10301-DQB10303 DQA10301-DQB10304 DQA10301-DQB10305 DQA10302-DQB10301 DQA10302-DQB10302 DQA10302-DQB10303 DQA10302-DQB10304 DQA10303-DQB10301 DQA10303-DQB10302 DQA10303-DQB10303 DQA10303-DQB10304 DQA10401-DQB10201 DQA10401-DQB10301 DQA10401-DQB10319 DQA10401-DQB10402 DQA10402-DQB10402 DQA10501-DQB10201 DQA10501-DQB10203 DQA10501-DQB10301 DQA10501-DQB10319 DQA10503-DQB10301 DQA10505-DQB10201 DQA10505-DQB10202 DQA10505-DQB10301 DQA10505-DQB10302 DQA10505-DQB10309 DQA10505-DQB10319 DQA10506-DQB10303 DQA10508-DQB10301 DQA10509-DQB10301; note = HLAs: DQA10601-DQB10301
VHVASGYIEAEVIPAETGQ

SEQ ID NO: 5807 - protein, 20 aa, Human immunodeficiency virus 1
  source 1..20: note = HLAs: DRB1_0101 DRB1_0401 DRB1_0404 DRB1_0405 DRB1_0408 DRB1_0701 DRB1_0802 DRB1_0809 DRB1_0813 DRB1_0901 DRB1_1001 DPA10103-DPB10101 DPA10103-DPB11501 DPA10104-DPB10101 DPA10104-DPB11501 DPA10105-DPB10101 DPA10202-DPB10101 DPA10301-DPB10101 DPA10301-DPB10201 DPA10301-DPB10202 DPA10301-DPB110601 DPA10301-DPB11801 DPA10301-DPB16501 DPA10401-DPB10101 DPA10401-DPB11401 DQA10101-DQB10501 DQA10101-DQB10601 DQA10102-DQB10501 DQA10102-DQB10502 DQA10102-DQB10503 DQA10102-DQB10601 DQA10102-DQB10602 DQA10102-DQB10604 DQA10102-DQB10609 DQA10102-DQB10611 DQA10103-DQB10501 DQA10103-DQB10601 DQA10103-DQB10609 DQA10104-DQB10501 DQA10105-DQB10501 DQA10201-DQB10201 DQA10201-DQB10202 DQA10201-DQB10301 DQA10201-DQB10302 DQA10201-DQB10303 DQA10301-DQB10301 DQA10301-DQB10302 DQA10301-DQB10304 DQA10302-DQB10301 DQA10302-DQB10302 DQA10302-DQB10304 DQA10303-DQB10301 DQA10303-DQB10302 DQA10303-DQB10304 DQA10401-DQB10201 DQA10401-DQB10301 DQA10401-DQB10319 DQA10401-DQB10402 DQA10402-DQB10402 DQA10501-DQB10201; note = HLAs: DQA10501-DQB10203 DQA10501-DQB10301 DQA10501-DQB10319 DQA10503-DQB10301 DQA10505-DQB10201 DQA10505-DQB10202 DQA10505-DQB10301 DQA10505-DQB10302 DQA10505-DQB10309 DQA10505-DQB10319 DQA10506-DQB10303 DQA10508-DQB10301 DQA10509-DQB10301 DQA10601-DQB10301
VHVASGYIEAEVIPAETGQE

SEQ ID NO: 5808 - protein, 21 aa, Human immunodeficiency virus 1
  source 1..21: note = HLAs: DRB1_0101 DRB1_0401 DRB1_0405 DRB1_0408 DRB1_0901 DRB1_1001 DPA10301-DPB10101 DPA10401-DPB10101 DQA10102-DQB10501 DQA10102-DQB10502 DQA10102-DQB10503 DQA10102-DQB10601 DQA10102-DQB10609 DQA10103-DQB10501 DQA10103-DQB10601 DQA10103-DQB10609 DQA10201-DQB10201 DQA10201-DQB10202 DQA10201-DQB10301 DQA10201-DQB10302 DQA10201-DQB10303 DQA10301-DQB10302 DQA10301-DQB10304 DQA10302-DQB10302 DQA10302-DQB10304 DQA10303-DQB10302 DQA10303-DQB10304 DQA10401-DQB10301 DQA10401-DQB10319 DQA10401-DQB10402 DQA10402-DQB10402 DQA10501-DQB10201 DQA10501-DQB10203 DQA10501-DQB10301 DQA10501-DQB10319 DQA10503-DQB10301 DQA10505-DQB10201 DQA10505-DQB10202 DQA10505-DQB10301 DQA10505-DQB10302 DQA10505-DQB10309 DQA10505-DQB10319 DQA10506-DQB10303 DQA10508-DQB10301 DQA10509-DQB10301 DQA10601-DQB10301
VHVASGYIEAEVIPAETGQET

SEQ ID NO: 5809 - protein, 22 aa, Human immunodeficiency virus 1
  source 1..22: note = HLAs: DRB1_0101 DRB1_0401 DRB1_0405 DRB1_0408 DRB1_0901 DRB1_1001 DPA10301-DPB10101 DPA10401-DPB10101 DQA10102-DQB10501 DQA10102-DQB10502 DQA10102-DQB10503 DQA10102-DQB10601 DQA10102-DQB10609 DQA10103-DQB10501 DQA10103-DQB10601 DQA10103-DQB10609 DQA10201-DQB10201 DQA10201-DQB10202 DQA10201-DQB10301 DQA10201-DQB10302 DQA10201-DQB10303 DQA10301-DQB10301 DQA10301-DQB10302 DQA10301-DQB10304 DQA10302-DQB10301 DQA10302-DQB10302 DQA10302-DQB10304 DQA10303-DQB10301 DQA10303-DQB10302 DQA10303-DQB10304 DQA10401-DQB10301 DQA10401-DQB10319 DQA10401-DQB10402 DQA10402-DQB10402 DQA10501-DQB10201 DQA10501-DQB10203 DQA10501-DQB10301 DQA10501-DQB10319 DQA10503-DQB10301 DQA10505-DQB10201 DQA10505-DQB10202 DQA10505-DQB10301 DQA10505-DQB10302 DQA10505-DQB10309 DQA10505-DQB10319 DQA10506-DQB10303 DQA10508-DQB10301 DQA10509-DQB10301 DQA10601-DQB10301
VHVASGYIEAEVIPAETGQETA

SEQ ID NO: 5810 - protein, 23 aa, Human immunodeficiency virus 1
  source 1..23: note = HLAs: DRB1_0101 DRB1_0401 DRB1_0405 DRB1_0408 DRB1_0901 DRB1_1001 DPA10301-DPB10101 DPA10301-DPB16501 DPA10401-DPB10101 DQA10102-DQB10501 DQA10102-DQB10502 DQA10102-DQB10503 DQA10102-DQB10601 DQA10102-DQB10609 DQA10103-DQB10501 DQA10103-DQB10601 DQA10103-DQB10609 DQA10201-DQB10201 DQA10201-DQB10202 DQA10201-DQB10301 DQA10201-DQB10302 DQA10201-DQB10303 DQA10301-DQB10301 DQA10301-DQB10302 DQA10301-DQB10304 DQA10302-DQB10301 DQA10302-DQB10302 DQA10302-DQB10304 DQA10303-DQB10301 DQA10303-DQB10302 DQA10303-DQB10304 DQA10401-DQB10301 DQA10401-DQB10319 DQA10401-DQB10402 DQA10402-DQB10402 DQA10501-DQB10201 DQA10501-DQB10203 DQA10501-DQB10301 DQA10501-DQB10319 DQA10503-DQB10301 DQA10505-DQB10201 DQA10505-DQB10202 DQA10505-DQB10301 DQA10505-DQB10302 DQA10505-DQB10309 DQA10505-DQB10319 DQA10506-DQB10303 DQA10508-DQB10301 DQA10509-DQB10301 DQA10601-DQB10301
VHVASGYIEAEVIPAETGQETAY

SEQ ID NO: 5811 - protein, 24 aa, Human immunodeficiency virus 1
  source 1..24: note = HLAs: DRB1_0101 DRB1_0401 DRB1_0405 DRB1_0408 DRB1_0901 DRB1_1001 DPA10301-DPB10101 DPA10301-DPB16501 DPA10401-DPB10101 DQA10102-DQB10501 DQA10102-DQB10502 DQA10102-DQB10503 DQA10102-DQB10601 DQA10102-DQB10609 DQA10103-DQB10501 DQA10103-DQB10601 DQA10103-DQB10609 DQA10201-DQB10201 DQA10201-DQB10202 DQA10201-DQB10301 DQA10201-DQB10302 DQA10201-DQB10303 DQA10301-DQB10301 DQA10301-DQB10302 DQA10301-DQB10304 DQA10302-DQB10301 DQA10302-DQB10302 DQA10302-DQB10304 DQA10303-DQB10301 DQA10303-DQB10302 DQA10303-DQB10304 DQA10401-DQB10301 DQA10401-DQB10319 DQA10401-DQB10402 DQA10402-DQB10402 DQA10501-DQB10201 DQA10501-DQB10203 DQA10501-DQB10301 DQA10501-DQB10319 DQA10503-DQB10301 DQA10505-DQB10201 DQA10505-DQB10202 DQA10505-DQB10301 DQA10505-DQB10302 DQA10505-DQB10309 DQA10505-DQB10319 DQA10506-DQB10303 DQA10508-DQB10301 DQA10509-DQB10301 DQA10601-DQB10301
VHVASGYIEAEVIPAETGQETAYF

SEQ ID NO: 5812 - protein, 13 aa, Human immunodeficiency virus 1
  source 1..13: note = HLAs: DRB1_0101 DRB1_1001 DQA10102-DQB10501 DQA10201-DQB10301 DQA10201-DQB10303 DQA10506-DQB10303
VIPMFSALSEGAT

SEQ ID NO: 5813 - protein, 14 aa, Human immunodeficiency virus 1
  source 1..14: note = HLAs: DRB1_0101 DRB1_0102 DRB1_0404 DRB1_0408 DRB1_0901 DRB1_1001 DQA10102-DQB10501 DQA10102-DQB10503 DQA10102-DQB10601 DQA10102-DQB10602 DQA10102-DQB10611 DQA10103-DQB10501 DQA10103-DQB10601 DQA10201-DQB10301 DQA10201-DQB10302 DQA10201-DQB10303 DQA10301-DQB10301 DQA10302-DQB10301 DQA10303-DQB10301 DQA10401-DQB10301 DQA10401-DQB10319 DQA10501-DQB10203 DQA10501-DQB10301 DQA10501-DQB10319 DQA10503-DQB10301 DQA10505-DQB10301 DQA10505-DQB10302 DQA10505-DQB10309 DQA10505-DQB10319 DQA10505-DQB10402 DQA10506-DQB10303 DQA10508-DQB10301 DQA10509-DQB10301 DQA10601-DQB10301
VIPMFSALSEGATP

SEQ ID NO: 5814 - protein, 15 aa, Human immunodeficiency virus 1
  source 1..15: note = HLAs: DRB1_0101 DRB1_0102 DRB1_0401 DRB1_0404 DRB1_0405 DRB1_0408 DRB1_0410 DRB1_0701 DRB1_0901 DRB1_1001 DRB1_1601 DRB1_1602 DQA10102-DQB10501 DQA10102-DQB10503 DQA10102-DQB10601 DQA10102-DQB10602 DQA10102-DQB10609 DQA10102-DQB10611 DQA10103-DQB10501 DQA10103-DQB10601 DQA10103-DQB10602 DQA10103-DQB10609 DQA10201-DQB10301 DQA10201-DQB10302 DQA10201-DQB10303 DQA10301-DQB10301 DQA10302-DQB10301 DQA10303-DQB10301 DQA10401-DQB10301 DQA10401-DQB10319 DQA10501-DQB10203 DQA10501-DQB10301 DQA10501-DQB10319 DQA10503-DQB10301 DQA10505-DQB10301 DQA10505-DQB10302 DQA10505-DQB10309 DQA10505-DQB10319 DQA10505-DQB10402 DQA10506-DQB10303 DQA10508-DQB10301 DQA10509-DQB10301 DQA10601-DQB10301
VIPMFSALSEGATPQ

SEQ ID NO: 5815 - protein, 16 aa, Human immunodeficiency virus 1
  source 1..16: note = HLAs: DRB1_0101 DRB1_0102 DRB1_0401 DRB1_0404 DRB1_0408 DRB1_0901 DRB1_1001 DQA10102-DQB10501 DQA10102-DQB10503 DQA10102-DQB10601 DQA10102-DQB10602 DQA10102-DQB10609 DQA10102-DQB10611 DQA10103-DQB10501 DQA10103-DQB10601 DQA10103-DQB10602 DQA10103-DQB10609 DQA10201-DQB10301 DQA10201-DQB10302 DQA10201-DQB10303 DQA10301-DQB10301 DQA10302-DQB10301 DQA10303-DQB10301 DQA10401-DQB10301 DQA10401-DQB10319 DQA10501-DQB10203 DQA10501-DQB10301 DQA10501-DQB10319 DQA10503-DQB10301 DQA10505-DQB10301 DQA10505-DQB10302 DQA10505-DQB10309 DQA10505-DQB10319 DQA10505-DQB10402 DQA10506-DQB10303 DQA10508-DQB10301 DQA10509-DQB10301 DQA10601-DQB10301
VIPMFSALSEGATPQD

SEQ ID NO: 5816 - protein, 17 aa, Human immunodeficiency virus 1
  source 1..17: note = HLAs: DRB1_0101 DRB1_0102 DRB1_0401 DRB1_0404 DRB1_0408 DRB1_0410 DRB1_0901 DRB1_1001 DQA10102-DQB10501 DQA10102-DQB10503 DQA10102-DQB10601 DQA10102-DQB10602 DQA10102-DQB10609 DQA10102-DQB10611 DQA10103-DQB10501 DQA10103-DQB10601 DQA10103-DQB10602 DQA10103-DQB10609 DQA10201-DQB10301 DQA10201-DQB10302 DQA10201-DQB10303 DQA10301-DQB10301 DQA10302-DQB10301 DQA10303-DQB10301 DQA10401-DQB10301 DQA10401-DQB10319 DQA10501-DQB10301 DQA10501-DQB10319 DQA10503-DQB10301 DQA10505-DQB10301 DQA10505-DQB10302 DQA10505-DQB10309 DQA10505-DQB10319 DQA10505-DQB10402 DQA10506-DQB10303 DQA10508-DQB10301 DQA10509-DQB10301 DQA10601-DQB10301
VIPMFSALSEGATPQDL

SEQ ID NO: 5817 - protein, 18 aa, Human immunodeficiency virus 1
  source 1..18: note = HLAs: DRB1_1001 DQA10102-DQB10501 DQA10102-DQB10601 DQA10103-DQB10601 DQA10201-DQB10301 DQA10201-DQB10303 DQA10401-DQB10301 DQA10401-DQB10319 DQA10501-DQB10301 DQA10501-DQB10319 DQA10503-DQB10301 DQA10505-DQB10301 DQA10505-DQB10309 DQA10505-DQB10319 DQA10508-DQB10301 DQA10509-DQB10301 DQA10601-DQB10301
VIPMFSALSEGATPQDLN

SEQ ID NO: 5818 - protein, 19 aa, Human immunodeficiency virus 1
  source 1..19: note = HLAs: DRB1_0101 DRB1_0901 DRB1_1001 DQA10102-DQB10501 DQA10102-DQB10601 DQA10102-DQB10602 DQA10102-DQB10609 DQA10102-DQB10611 DQA10103-DQB10601 DQA10103-DQB10609 DQA10201-DQB10301 DQA10201-DQB10303 DQA10401-DQB10301 DQA10401-DQB10319 DQA10501-DQB10301 DQA10501-DQB10319 DQA10503-DQB10301 DQA10505-DQB10301 DQA10505-DQB10302 DQA10505-DQB10309 DQA10505-DQB10319 DQA10506-DQB10303 DQA10508-DQB10301 DQA10509-DQB10301 DQA10601-DQB10301
VIPMFSALSEGATPQDLNT

SEQ ID NO: 5819 - protein, 20 aa, Human immunodeficiency virus 1
  source 1..20: note = HLAs: DRB1_0101 DRB1_0404 DRB1_0408 DRB1_0901 DRB1_1001 DQA10102-DQB10501 DQA10102-DQB10503 DQA10102-DQB10601 DQA10102-DQB10602 DQA10102-DQB10609 DQA10102-DQB10611 DQA10103-DQB10501 DQA10103-DQB10601 DQA10103-DQB10602 DQA10103-DQB10609 DQA10201-DQB10301 DQA10201-DQB10303 DQA10301-DQB10301 DQA10302-DQB10301 DQA10303-DQB10301 DQA10401-DQB10301 DQA10401-DQB10319 DQA10501-DQB10301 DQA10501-DQB10319 DQA10503-DQB10301 DQA10505-DQB10301 DQA10505-DQB10309 DQA10505-DQB10319 DQA10505-DQB10402 DQA10506-DQB10303 DQA10508-DQB10301 DQA10509-DQB10301 DQA10601-DQB10301
VIPMFSALSEGATPQDLNTM

SEQ ID NO: 5820 - protein, 21 aa, Human immunodeficiency virus 1
  source 1..21: note = HLAs: DRB1_0101 DRB1_1001 DQA10102-DQB10501 DQA10102-DQB10601 DQA10103-DQB10601 DQA10103-DQB10609 DQA10201-DQB10301 DQA10201-DQB10303 DQA10501-DQB10301 DQA10501-DQB10319 DQA10503-DQB10301 DQA10505-DQB10301 DQA10505-DQB10309 DQA10505-DQB10319 DQA10508-DQB10301 DQA10509-DQB10301
VIPMFSALSEGATPQDLNTML

SEQ ID NO: 5821 - protein, 22 aa, Human immunodeficiency virus 1
  source 1..22: note = HLAs: DRB1_0101 DRB1_1001 DQA10102-DQB10501 DQA10102-DQB10601 DQA10103-DQB10601 DQA10103-DQB10609 DQA10201-DQB10301 DQA10201-DQB10303 DQA10501-DQB10301 DQA10501-DQB10319 DQA10503-DQB10301 DQA10505-DQB10301 DQA10505-DQB10309 DQA10505-DQB10319 DQA10508-DQB10301 DQA10509-DQB10301 DQA10601-DQB10301
VIPMFSALSEGATPQDLNTMLN

SEQ ID NO: 5822 - protein, 23 aa, Human immunodeficiency virus 1
  source 1..23: note = HLAs: DRB1_0101 DRB1_1001 DQA10102-DQB10501 DQA10102-DQB10601 DQA10103-DQB10601 DQA10103-DQB10609 DQA10201-DQB10301 DQA10201-DQB10303 DQA10501-DQB10301 DQA10501-DQB10319 DQA10503-DQB10301 DQA10505-DQB10301 DQA10505-DQB10309 DQA10505-DQB10319 DQA10508-DQB10301 DQA10509-DQB10301 DQA10601-DQB10301
VIPMFSALSEGATPQDLNTMLNT

SEQ ID NO: 5823 - protein, 24 aa, Human immunodeficiency virus 1
  source 1..24: note = HLAs: DRB1_0101 DRB1_1001 DQA10102-DQB10501 DQA10102-DQB10601 DQA10102-DQB10609 DQA10103-DQB10601 DQA10103-DQB10609 DQA10201-DQB10301 DQA10201-DQB10303 DQA10501-DQB10301 DQA10501-DQB10319 DQA10503-DQB10301 DQA10505-DQB10301 DQA10505-DQB10309 DQA10505-DQB10319 DQA10506-DQB10303 DQA10508-DQB10301 DQA10509-DQB10301 DQA10601-DQB10301
VIPMFSALSEGATPQDLNTMLNTV

SEQ ID NO: 5824 - protein, 25 aa, Human immunodeficiency virus 1
  source 1..25: note = HLAs: DRB1_0101 DRB1_1001 DQA10102-DQB10501 DQA10102-DQB10601 DQA10102-DQB10609 DQA10103-DQB10501 DQA10103-DQB10601 DQA10103-DQB10609 DQA10201-DQB10301 DQA10201-DQB10303 DQA10501-DQB10301 DQA10501-DQB10319 DQA10503-DQB10301 DQA10505-DQB10301 DQA10505-DQB10309 DQA10505-DQB10319 DQA10506-DQB10303 DQA10508-DQB10301 DQA10509-DQB10301 DQA10601-DQB10301
VIPMFSALSEGATPQDLNTMLNTVG

SEQ ID NO: 5825 - protein, 13 aa, Human immunodeficiency virus 1
  source 1..13: note = HLAs: DRB1_0101 DRB1_0405 DRB1_0408 DRB1_1001 DPA10301-DPB10101 DPA10301-DPB10202 DQA10101-DQB10501 DQA10102-DQB10501 DQA10102-DQB10502 DQA10102-DQB10503 DQA10103-DQB10501 DQA10104-DQB10501 DQA10105-DQB10501
VIYQYMDDLYVGS

SEQ ID NO: 5826 - protein, 14 aa, Human immunodeficiency virus 1
  source 1..14: note = HLAs: DRB1_0101 DRB1_0401 DRB1_0405 DRB1_0408 DRB1_1001 DRB1_1602 DPA10103-DPB11501 DPA10104-DPB11501 DPA10202-DPB10101 DPA10301-DPB10101 DPA10301-DPB10201 DPA10301-DPB10202 DPA10301-DPB10401 DPA10301-DPB110601 DPA10301-DPB11801 DPA10301-DPB12301 DPA10301-DPB13901 DPA10301-DPB14001 DPA10301-DPB16501 DPA10401-DPB10101 DQA10101-DQB10501 DQA10102-DQB10501 DQA10102-DQB10502 DQA10102-DQB10503 DQA10102-DQB10609 DQA10103-DQB10501 DQA10104-DQB10501 DQA10105-DQB10501 DQA10501-DQB10201 DQA10505-DQB10201 DQA10505-DQB10202
VIYQYMDDLYVGSD

SEQ ID NO: 5827 - protein, 15 aa, Human immunodeficiency virus 1
  source 1..15: note = HLAs: DRB1_0101 DRB1_0102 DRB1_0401 DRB1_0404 DRB1_0405 DRB1_0408 DRB1_0410 DRB1_1001 DRB1_1501 DRB1_1502 DRB1_1601 DRB1_1602 DPA10103-DPB10101 DPA10103-DPB11501 DPA10104-DPB10101 DPA10104-DPB11501 DPA10105-DPB10101 DPA10202-DPB10101 DPA10301-DPB10101 DPA10301-DPB10201 DPA10301-DPB10202 DPA10301-DPB10401 DPA10301-DPB110601 DPA10301-DPB11801 DPA10301-DPB12301 DPA10301-DPB13901 DPA10301-DPB14001 DPA10301-DPB16501 DPA10401-DPB10101 DPA10401-DPB10201 DPA10401-DPB10202 DQA10101-DQB10501 DQA10101-DQB10503 DQA10102-DQB10501 DQA10102-DQB10502 DQA10102-DQB10503 DQA10102-DQB10604 DQA10102-DQB10609 DQA10103-DQB10501 DQA10104-DQB10501 DQA10104-DQB10503 DQA10105-DQB10501 DQA10107-DQB10503 DQA10501-DQB10201 DQA10505-DQB10201 DQA10505-DQB10202
VIYQYMDDLYVGSDL

SEQ ID NO: 5828 - protein, 16 aa, Human immunodeficiency virus 1
  source 1..16: note = HLAs: DRB1_0101 DRB1_0401 DRB1_0405 DRB1_0408 DRB1_1001 DRB1_1602 DPA10103-DPB10101 DPA10103-DPB11501 DPA10104-DPB10101 DPA10104-DPB11501 DPA10105-DPB10101 DPA10202-DPB10101 DPA10301-DPB10101 DPA10301-DPB10201 DPA10301-DPB10202 DPA10301-DPB10401 DPA10301-DPB110601 DPA10301-DPB11801 DPA10301-DPB12301 DPA10301-DPB13901 DPA10301-DPB14001 DPA10301-DPB16501 DPA10401-DPB10101 DPA10401-DPB10202 DQA10101-DQB10501 DQA10101-DQB10503 DQA10102-DQB10501 DQA10102-DQB10502 DQA10102-DQB10503 DQA10102-DQB10604 DQA10102-DQB10609 DQA10103-DQB10501 DQA10104-DQB10501 DQA10104-DQB10503 DQA10105-DQB10501 DQA10107-DQB10503 DQA10501-DQB10201 DQA10505-DQB10201 DQA10505-DQB10202
VIYQYMDDLYVGSDLE

SEQ ID NO: 5829 - protein, 17 aa, Human immunodeficiency virus 1
  source 1..17: note = HLAs: DRB1_0101 DRB1_0405 DRB1_0408 DRB1_1001 DRB1_1602 DPA10103-DPB10101 DPA10103-DPB11501 DPA10104-DPB10101 DPA10104-DPB11501 DPA10105-DPB10101 DPA10202-DPB10101 DPA10301-DPB10101 DPA10301-DPB10201 DPA10301-DPB10202 DPA10301-DPB10401 DPA10301-DPB110601 DPA10301-DPB11801 DPA10301-DPB12301 DPA10301-DPB13901 DPA10301-DPB14001 DPA10301-DPB16501 DPA10401-DPB10101 DQA10101-DQB10501 DQA10102-DQB10501 DQA10102-DQB10502 DQA10102-DQB10503 DQA10102-DQB10604 DQA10102-DQB10609 DQA10103-DQB10501 DQA10104-DQB10501 DQA10105-DQB10501 DQA10501-DQB10201 DQA10505-DQB10201 DQA10505-DQB10202
VIYQYMDDLYVGSDLEI

SEQ ID NO: 5830 - protein, 18 aa, Human immunodeficiency virus 1
  source 1..18: note = HLAs: DPA10301-DPB10101 DPA10301-DPB10202 DQA10101-DQB10501 DQA10102-DQB10501 DQA10102-DQB10502 DQA10102-DQB10503 DQA10102-DQB10609 DQA10103-DQB10501 DQA10104-DQB10501 DQA10105-DQB10501
VIYQYMDDLYVGSDLEIG

SEQ ID NO: 5831 - protein, 19 aa, Human immunodeficiency virus 1
  source 1..19: note = HLAs: DRB1_0101 DRB1_0405 DRB1_0408 DRB1_1001 DPA10103-DPB10101 DPA10103-DPB11501 DPA10104-DPB10101 DPA10104-DPB11501 DPA10105-DPB10101 DPA10202-DPB10101 DPA10301-DPB10101 DPA10301-DPB10201 DPA10301-DPB10202 DPA10301-DPB10401 DPA10301-DPB110601 DPA10301-DPB11801 DPA10301-DPB12301 DPA10301-DPB13901 DPA10301-DPB14001 DPA10301-DPB16501 DPA10401-DPB10101 DQA10101-DQB10501 DQA10102-DQB10501 DQA10102-DQB10502 DQA10102-DQB10503 DQA10102-DQB10604 DQA10102-DQB10609 DQA10103-DQB10501 DQA10104-DQB10501 DQA10105-DQB10501 DQA10501-DQB10201 DQA10505-DQB10201 DQA10505-DQB10202
VIYQYMDDLYVGSDLEIGQ

SEQ ID NO: 5832 - protein, 20 aa, Human immunodeficiency virus 1
  source 1..20: note = HLAs: DRB1_0101 DRB1_0405 DRB1_0408 DRB1_1001 DRB1_1602 DPA10103-DPB10101 DPA10103-DPB11501 DPA10104-DPB10101 DPA10104-DPB11501 DPA10105-DPB10101 DPA10202-DPB10101 DPA10301-DPB10101 DPA10301-DPB10201 DPA10301-DPB10202 DPA10301-DPB10401 DPA10301-DPB10402 DPA10301-DPB110501 DPA10301-DPB110601 DPA10301-DPB11801 DPA10301-DPB12301 DPA10301-DPB13901 DPA10301-DPB14001 DPA10301-DPB14901 DPA10301-DPB16501 DPA10301-DPB18001 DPA10401-DPB10101 DPA10401-DPB10201 DPA10401-DPB10202 DQA10101-DQB10501 DQA10102-DQB10501 DQA10102-DQB10502 DQA10102-DQB10503 DQA10102-DQB10604 DQA10102-DQB10609 DQA10103-DQB10501 DQA10103-DQB10609 DQA10104-DQB10501 DQA10105-DQB10501
VIYQYMDDLYVGSDLEIGQH

SEQ ID NO: 5833 - protein, 21 aa, Human immunodeficiency virus 1
  source 1..21: note = HLAs: DRB1_0405 DRB1_0408 DRB1_1001 DPA10103-DPB10101 DPA10103-DPB11501 DPA10104-DPB10101 DPA10104-DPB11501 DPA10105-DPB10101 DPA10301-DPB10101 DPA10301-DPB10201 DPA10301-DPB10202 DPA10301-DPB10401 DPA10301-DPB110601 DPA10301-DPB11801 DPA10301-DPB12301 DPA10301-DPB13901 DPA10301-DPB14001 DPA10301-DPB16501 DPA10401-DPB10101 DQA10101-DQB10501 DQA10102-DQB10501 DQA10102-DQB10503 DQA10102-DQB10609 DQA10103-DQB10501 DQA10104-DQB10501 DQA10105-DQB10501
VIYQYMDDLYVGSDLEIGQHR

SEQ ID NO: 5834 - protein, 25 aa, Human immunodeficiency virus 1
  source 1..25: note = HLAs: DPA10301-DPB10101
VKLKPGMDGPKVKQWPLTEEKIKAL

SEQ ID NO: 5835 - protein, 17 aa, Human immunodeficiency virus 1
  source 1..17: note = HLAs: DPA10301-DPB10101
VKQWPLTEEKIKALTEI

SEQ ID NO: 5836 - protein, 15 aa, Human immunodeficiency virus 1
  source 1..15: note = HLAs: DRB1_0101 DRB1_1001 DPA10301-DPB10101 DPA10301-DPB10201 DPA10301-DPB10202
VKVVEEKAFSPEVIP

SEQ ID NO: 5837 - protein, 16 aa, Human immunodeficiency virus 1
  source 1..16: note = HLAs: DPA10301-DPB10101 DPA10301-DPB10201 DPA10401-DPB10101 DQA10102-DQB10501
VKVVEEKAFSPEVIPM

SEQ ID NO: 5838 - protein, 17 aa, Human immunodeficiency virus 1
  source 1..17: note = HLAs: DPA10103-DPB10101 DPA10103-DPB11501 DPA10104-DPB10101 DPA10104-DPB11501 DPA10105-DPB10101 DPA10202-DPB10101 DPA10301-DPB10101 DPA10301-DPB10201 DPA10301-DPB10202 DPA10301-DPB10401 DPA10301-DPB110601 DPA10301-DPB11801 DPA10301-DPB12301 DPA10301-DPB13901 DPA10301-DPB14001 DPA10301-DPB16501 DPA10401-DPB10101 DQA10102-DQB10501
VKVVEEKAFSPEVIPMF

SEQ ID NO: 5839 - protein, 14 aa, Human immunodeficiency virus 1
  source 1..14: note = HLAs: DQA10102-DQB10501
VLDVGDAYFSVPLD

SEQ ID NO: 5840 - protein, 15 aa, Human immunodeficiency virus 1
  source 1..15: note = HLAs: DPA10301-DPB10101 DPA10401-DPB10101 DQA10102-DQB10501 DQA10102-DQB10502 DQA10102-DQB10503 DQA10103-DQB10501 DQA10201-DQB10301
VLDVGDAYFSVPLDK

SEQ ID NO: 5841 - protein, 14 aa, Human immunodeficiency virus 1
  source 1..14: note = HLAs: DRB1_0301 DQA10102-DQB10501
VLFLDGIDKAQEEH

SEQ ID NO: 5842 - protein, 15 aa, Human immunodeficiency virus 1
  source 1..15: note = HLAs: DRB1_0301 DRB1_0401 DQA10102-DQB10501
VLFLDGIDKAQEEHE

SEQ ID NO: 5843 - protein, 14 aa, Human immunodeficiency virus 1
  source 1..14: note = HLAs: DQA10201-DQB10301 DQA10501-DQB10301 DQA10501-DQB10319 DQA10503-DQB10301 DQA10505-DQB10301 DQA10505-DQB10309 DQA10505-DQB10319 DQA10505-DQB10402 DQA10508-DQB10301 DQA10509-DQB10301
VLPQGWKGSPAIFQ

SEQ ID NO: 5844 - protein, 15 aa, Human immunodeficiency virus 1
  source 1..15: note = HLAs: DRB1_0101 DRB1_0401 DRB1_0701 DRB1_0901 DRB1_1001 DQA10102-DQB10601 DQA10103-DQB10601 DQA10201-DQB10301 DQA10501-DQB10301 DQA10501-DQB10319 DQA10503-DQB10301 DQA10505-DQB10301 DQA10505-DQB10309 DQA10505-DQB10319 DQA10505-DQB10402 DQA10508-DQB10301 DQA10509-DQB10301
VLPQGWKGSPAIFQS

SEQ ID NO: 5845 - protein, 16 aa, Human immunodeficiency virus 1
  source 1..16: note = HLAs: DRB1_0901 DRB1_1001 DQA10102-DQB10601 DQA10103-DQB10601 DQA10201-DQB10301 DQA10301-DQB10301 DQA10302-DQB10301 DQA10303-DQB10301 DQA10501-DQB10301 DQA10501-DQB10319 DQA10503-DQB10301 DQA10505-DQB10301 DQA10505-DQB10309 DQA10505-DQB10319 DQA10505-DQB10402 DQA10508-DQB10301 DQA10509-DQB10301 DQA10601-DQB10301
VLPQGWKGSPAIFQSS

SEQ ID NO: 5846 - protein, 17 aa, Human immunodeficiency virus 1
  source 1..17: note = HLAs: DRB1_0101 DRB1_0401 DRB1_0901 DRB1_1001 DQA10102-DQB10601 DQA10103-DQB10601 DQA10201-DQB10301 DQA10501-DQB10301 DQA10501-DQB10319 DQA10503-DQB10301 DQA10505-DQB10301 DQA10505-DQB10309 DQA10505-DQB10319 DQA10505-DQB10402 DQA10508-DQB10301 DQA10509-DQB10301
VLPQGWKGSPAIFQSSM

SEQ ID NO: 5847 - protein, 14 aa, Human immunodeficiency virus 1
  source 1..14: note = HLAs: DRB1_0101 DRB1_0102 DRB1_1001
VNDIQKLVGKLNWA

SEQ ID NO: 5848 - protein, 15 aa, Human immunodeficiency virus 1
  source 1..15: note = HLAs: DRB1_0101 DRB1_0102 DRB1_0404 DRB1_0801 DRB1_0802 DRB1_0804 DRB1_0806 DRB1_0809 DRB1_1001 DRB1_1101 DRB1_1102 DRB1_1103 DRB1_1104 DRB1_1202 DRB1_1301 DRB1_1304 DRB1_1305 DRB1_1406 DRB1_1501 DRB1_1503 DRB1_1601
VNDIQKLVGKLNWAS

SEQ ID NO: 5849 - protein, 16 aa, Human immunodeficiency virus 1
  source 1..16: note = HLAs: DRB1_0101 DRB1_0102 DRB1_0804 DRB1_0806 DRB1_1001 DRB1_1102 DRB1_1103 DRB1_1104 DRB1_1301 DRB1_1304 DQA10102-DQB10501
VNDIQKLVGKLNWASQ

SEQ ID NO: 5850 - protein, 17 aa, Human immunodeficiency virus 1
  source 1..17: note = HLAs: DRB1_0101 DRB1_0102 DRB1_0404 DRB1_0801 DRB1_0802 DRB1_0804 DRB1_0806 DRB1_0809 DRB1_0813 DRB1_1001 DRB1_1101 DRB1_1102 DRB1_1103 DRB1_1104 DRB1_1114 DRB1_1202 DRB1_1301 DRB1_1302 DRB1_1304 DRB1_1305 DRB1_1406 DRB1_1501 DRB1_1503 DQA10102-DQB10501
VNDIQKLVGKLNWASQI

SEQ ID NO: 5851 - protein, 18 aa, Human immunodeficiency virus 1
  source 1..18: note = HLAs: DRB1_0101 DRB1_1001 DQA10102-DQB10501
VNDIQKLVGKLNWASQIY

SEQ ID NO: 5852 - protein, 19 aa, Human immunodeficiency virus 1
  source 1..19: note = HLAs: DRB1_0101 DRB1_0102 DRB1_0804 DRB1_0806 DRB1_1001 DRB1_1102 DRB1_1104 DRB1_1114 DRB1_1301 DRB1_1302 DRB1_1304 DRB1_1406 DRB1_1501 DQA10102-DQB10501 DQA10103-DQB10501
VNDIQKLVGKLNWASQIYP

SEQ ID NO: 5853 - protein, 20 aa, Human immunodeficiency virus 1
  source 1..20: note = HLAs: DRB1_0101 DRB1_0102 DRB1_0404 DRB1_0410 DRB1_0801 DRB1_0802 DRB1_0804 DRB1_0806 DRB1_0809 DRB1_0813 DRB1_1001 DRB1_1101 DRB1_1102 DRB1_1103 DRB1_1104 DRB1_1114 DRB1_1301 DRB1_1302 DRB1_1304 DRB1_1305 DRB1_1406 DRB1_1501 DRB1_1502 DRB1_1503 DRB1_1601 DRB1_1602 DPA10202-DPB110601 DPA10202-DPB11901 DPA10301-DPB10101 DPA10301-DPB10201 DPA10301-DPB10202 DPA10301-DPB110601 DPA10301-DPB11801 DPA10401-DPB10101 DPA10401-DPB10201 DPA10401-DPB10202 DPA10401-DPB10501 DQA10101-DQB10601 DQA10102-DQB10501 DQA10102-DQB10503 DQA10102-DQB10601 DQA10102-DQB10602 DQA10102-DQB10609 DQA10102-DQB10610 DQA10102-DQB10611 DQA10103-DQB10501 DQA10103-DQB10503 DQA10103-DQB10601 DQA10103-DQB10602 DQA10103-DQB10609 DQA10201-DQB10301
VNDIQKLVGKLNWASQIYPG

SEQ ID NO: 5854 - protein, 21 aa, Human immunodeficiency virus 1
  source 1..21: note = HLAs: DRB1_0101 DRB1_0102 DRB1_0801 DRB1_0804 DRB1_0806 DRB1_1001 DRB1_1102 DRB1_1104 DRB1_1114 DRB1_1301 DRB1_1302 DRB1_1304 DRB1_1406 DRB1_1501 DPA10103-DPB11501 DPA10104-DPB11501 DPA10301-DPB10101 DPA10301-DPB10201 DPA10301-DPB10202 DPA10301-DPB110601 DPA10301-DPB11801 DPA10401-DPB10101 DQA10101-DQB10601 DQA10102-DQB10501 DQA10102-DQB10503 DQA10102-DQB10601 DQA10102-DQB10602 DQA10102-DQB10609 DQA10102-DQB10610 DQA10102-DQB10611 DQA10103-DQB10501 DQA10103-DQB10601 DQA10103-DQB10602 DQA10103-DQB10609 DQA10201-DQB10301
VNDIQKLVGKLNWASQIYPGI

SEQ ID NO: 5855 - protein, 22 aa, Human immunodeficiency virus 1
  source 1..22: note = HLAs: DRB1_0101 DRB1_0102 DRB1_0404 DRB1_0410 DRB1_0801 DRB1_0804 DRB1_0806 DRB1_0813 DRB1_1001 DRB1_1102 DRB1_1103 DRB1_1104 DRB1_1114 DRB1_1301 DRB1_1302 DRB1_1304 DRB1_1406 DRB1_1501 DRB1_1602 DPA10103-DPB11501 DPA10104-DPB11501 DPA10202-DPB10101 DPA10301-DPB10101 DPA10301-DPB10201 DPA10301-DPB10202 DPA10301-DPB10401 DPA10301-DPB110601 DPA10301-DPB11801 DPA10301-DPB12301 DPA10301-DPB13901 DPA10301-DPB14001 DPA10301-DPB16501 DPA10401-DPB10101 DPA10401-DPB10201 DPA10401-DPB10202 DQA10101-DQB10601 DQA10102-DQB10501 DQA10102-DQB10503 DQA10102-DQB10601 DQA10102-DQB10602 DQA10102-DQB10609 DQA10102-DQB10610 DQA10102-DQB10611 DQA10103-DQB10501 DQA10103-DQB10601 DQA10103-DQB10602 DQA10103-DQB10603 DQA10103-DQB10609 DQA10201-DQB10301
VNDIQKLVGKLNWASQIYPGIK

SEQ ID NO: 5856 - protein, 23 aa, Human immunodeficiency virus 1
  source 1..23: note = HLAs: DRB1_0101 DRB1_0102 DRB1_0404 DRB1_0410 DRB1_0801 DRB1_0802 DRB1_0804 DRB1_0806 DRB1_0809 DRB1_0813 DRB1_0901 DRB1_1001 DRB1_1101 DRB1_1102 DRB1_1103 DRB1_1104 DRB1_1114 DRB1_1301 DRB1_1302 DRB1_1304 DRB1_1305 DRB1_1406 DRB1_1501 DRB1_1502 DRB1_1503 DRB1_1601 DRB1_1602 DPA10103-DPB10101 DPA10103-DPB11501 DPA10104-DPB10101 DPA10104-DPB11501 DPA10105-DPB10101 DPA10202-DPB10101 DPA10202-DPB10202 DPA10202-DPB110601 DPA10202-DPB11901 DPA10301-DPB10101 DPA10301-DPB10201 DPA10301-DPB10202 DPA10301-DPB10401 DPA10301-DPB110601 DPA10301-DPB11801 DPA10301-DPB12301 DPA10301-DPB13901 DPA10301-DPB14001 DPA10301-DPB16501 DPA10401-DPB10101 DPA10401-DPB10201 DPA10401-DPB10202 DQA10101-DQB10601 DQA10101-DQB10602 DQA10102-DQB10501 DQA10102-DQB10503 DQA10102-DQB10601 DQA10102-DQB10602 DQA10102-DQB10603 DQA10102-DQB10609 DQA10102-DQB10610 DQA10102-DQB10611 DQA10102-DQB10614 DQA10103-DQB10501 DQA10103-DQB10503 DQA10103-DQB10601 DQA10103-DQB10602 DQA10103-DQB10603 DQA10103-DQB10608 DQA10103-DQB10609; note = HLAs: DQA10103-DQB10614 DQA10104-DQB10602 DQA10105-DQB10602 DQA10201-DQB10301 DQA10501-DQB10301 DQA10501-DQB10319 DQA10503-DQB10301 DQA10505-DQB10301 DQA10505-DQB10309 DQA10505-DQB10319 DQA10508-DQB10301 DQA10509-DQB10301
VNDIQKLVGKLNWASQIYPGIKV

SEQ ID NO: 5857 - protein, 13 aa, Human immunodeficiency virus 1
  source 1..13: note = HLAs: DRB1_0301
VNIVTDSQYALGI

SEQ ID NO: 5858 - protein, 14 aa, Human immunodeficiency virus 1
  source 1..14: note = HLAs: DRB1_0301 DQA10102-DQB10501
VNIVTDSQYALGII

SEQ ID NO: 5859 - protein, 15 aa, Human immunodeficiency virus 1
  source 1..15: note = HLAs: DRB1_0101 DRB1_0301 DRB1_1114 DRB1_1302 DRB1_1406 DPA10301-DPB10101 DQA10102-DQB10501 DQA10102-DQB10609
VNIVTDSQYALGIIQ

SEQ ID NO: 5860 - protein, 16 aa, Human immunodeficiency virus 1
  source 1..16: note = HLAs: DRB1_0301 DPA10301-DPB10101 DPA10401-DPB10101 DQA10102-DQB10501 DQA10102-DQB10503 DQA10102-DQB10601 DQA10102-DQB10602 DQA10102-DQB10609 DQA10102-DQB10611 DQA10103-DQB10501 DQA10103-DQB10609 DQA10201-DQB10303
VNIVTDSQYALGIIQA

SEQ ID NO: 5861 - protein, 17 aa, Human immunodeficiency virus 1
  source 1..17: note = HLAs: DRB1_0101 DRB1_0301 DRB1_1001 DPA10103-DPB11501 DPA10104-DPB11501 DPA10301-DPB10101 DPA10301-DPB10201 DPA10301-DPB10202 DPA10301-DPB11801 DPA10401-DPB10101 DQA10102-DQB10501 DQA10102-DQB10503 DQA10102-DQB10601 DQA10102-DQB10602 DQA10102-DQB10609 DQA10102-DQB10611 DQA10103-DQB10501 DQA10103-DQB10601 DQA10103-DQB10602 DQA10103-DQB10609 DQA10201-DQB10301 DQA10201-DQB10303 DQA10301-DQB10301 DQA10302-DQB10301 DQA10303-DQB10301 DQA10401-DQB10301 DQA10401-DQB10319 DQA10501-DQB10301 DQA10501-DQB10319 DQA10503-DQB10301 DQA10505-DQB10301 DQA10505-DQB10309 DQA10505-DQB10319 DQA10506-DQB10303 DQA10508-DQB10301 DQA10509-DQB10301 DQA10601-DQB10301
VNIVTDSQYALGIIQAQ

SEQ ID NO: 5862 - protein, 18 aa, Human immunodeficiency virus 1
  source 1..18: note = HLAs: DRB1_1001 DQA10102-DQB10501 DQA10102-DQB10503 DQA10102-DQB10601 DQA10102-DQB10602 DQA10102-DQB10609 DQA10102-DQB10611 DQA10201-DQB10301 DQA10401-DQB10301 DQA10401-DQB10319 DQA10501-DQB10301 DQA10501-DQB10319 DQA10503-DQB10301 DQA10505-DQB10301 DQA10505-DQB10309 DQA10505-DQB10319 DQA10508-DQB10301 DQA10509-DQB10301
VNIVTDSQYALGIIQAQP

SEQ ID NO: 5863 - protein, 19 aa, Human immunodeficiency virus 1
  source 1..19: note = HLAs: DRB1_1001 DPA10103-DPB11501 DPA10104-DPB11501 DPA10301-DPB10101 DPA10301-DPB10201 DPA10301-DPB10202 DPA10301-DPB110601 DPA10301-DPB11801 DPA10301-DPB14001 DPA10301-DPB16501 DPA10401-DPB10101 DQA10102-DQB10501 DQA10102-DQB10503 DQA10102-DQB10601 DQA10102-DQB10602 DQA10102-DQB10609 DQA10102-DQB10610 DQA10102-DQB10611 DQA10103-DQB10501 DQA10103-DQB10601 DQA10103-DQB10602 DQA10103-DQB10609 DQA10201-DQB10301 DQA10201-DQB10302 DQA10201-DQB10303 DQA10301-DQB10301 DQA10302-DQB10301 DQA10303-DQB10301 DQA10401-DQB10301 DQA10401-DQB10319 DQA10501-DQB10301 DQA10501-DQB10319 DQA10503-DQB10301 DQA10505-DQB10301 DQA10505-DQB10302 DQA10505-DQB10309 DQA10505-DQB10319 DQA10506-DQB10303 DQA10508-DQB10301 DQA10509-DQB10301 DQA10601-DQB10301
VNIVTDSQYALGIIQAQPD

SEQ ID NO: 5864 - protein, 20 aa, Human immunodeficiency virus 1
  source 1..20: note = HLAs: DRB1_0101 DRB1_0401 DRB1_0404 DRB1_0405 DRB1_0408 DRB1_0410 DRB1_0901 DRB1_1001 DPA10103-DPB10101 DPA10103-DPB11501 DPA10103-DPB15001 DPA10104-DPB10101 DPA10104-DPB11501 DPA10105-DPB10101 DPA10105-DPB15001 DPA10202-DPB10101 DPA10301-DPB10101 DPA10301-DPB10201 DPA10301-DPB10202 DPA10301-DPB10401 DPA10301-DPB110601 DPA10301-DPB11801 DPA10301-DPB12301 DPA10301-DPB13901 DPA10301-DPB14001 DPA10301-DPB16501 DPA10401-DPB10101 DPA10401-DPB10201 DPA10401-DPB10202 DPA10401-DPB10501 DQA10101-DQB10601 DQA10102-DQB10501 DQA10102-DQB10503 DQA10102-DQB10601 DQA10102-DQB10602 DQA10102-DQB10604 DQA10102-DQB10609 DQA10102-DQB10610 DQA10102-DQB10611 DQA10103-DQB10501 DQA10103-DQB10503 DQA10103-DQB10601 DQA10103-DQB10602 DQA10103-DQB10609 DQA10201-DQB10301 DQA10201-DQB10302 DQA10201-DQB10303 DQA10301-DQB10301 DQA10301-DQB10304 DQA10302-DQB10301 DQA10302-DQB10304 DQA10303-DQB10301 DQA10303-DQB10304 DQA10401-DQB10301 DQA10401-DQB10319 DQA10501-DQB10301 DQA10501-DQB10319 DQA10503-DQB10301; note = HLAs: DQA10505-DQB10301 DQA10505-DQB10302 DQA10505-DQB10309 DQA10505-DQB10319 DQA10505-DQB10402 DQA10506-DQB10303 DQA10508-DQB10301 DQA10509-DQB10301 DQA10601-DQB10301
VNIVTDSQYALGIIQAQPDK

SEQ ID NO: 5865 - protein, 21 aa, Human immunodeficiency virus 1
  source 1..21: note = HLAs: DRB1_0101 DRB1_0404 DRB1_0405 DRB1_0408 DRB1_0410 DRB1_1001 DPA10103-DPB11501 DPA10104-DPB11501 DPA10301-DPB10101 DPA10301-DPB10201 DPA10301-DPB10202 DPA10301-DPB110601 DPA10301-DPB11801 DPA10301-DPB16501 DPA10401-DPB10101 DQA10102-DQB10501 DQA10102-DQB10503 DQA10102-DQB10601 DQA10102-DQB10602 DQA10102-DQB10609 DQA10102-DQB10611 DQA10103-DQB10501 DQA10103-DQB10601 DQA10103-DQB10602 DQA10103-DQB10609 DQA10201-DQB10301 DQA10201-DQB10303 DQA10301-DQB10301 DQA10302-DQB10301 DQA10303-DQB10301 DQA10401-DQB10301 DQA10401-DQB10319 DQA10501-DQB10301 DQA10501-DQB10319 DQA10503-DQB10301 DQA10505-DQB10301 DQA10505-DQB10309 DQA10505-DQB10319 DQA10506-DQB10303 DQA10508-DQB10301 DQA10509-DQB10301 DQA10601-DQB10301
VNIVTDSQYALGIIQAQPDKS

SEQ ID NO: 5866 - protein, 22 aa, Human immunodeficiency virus 1
  source 1..22: note = HLAs: DRB1_0101 DRB1_0401 DRB1_0404 DRB1_0405 DRB1_0408 DRB1_0410 DRB1_1001 DPA10103-DPB11501 DPA10104-DPB11501 DPA10301-DPB10101 DPA10301-DPB10201 DPA10301-DPB10202 DPA10301-DPB110601 DPA10301-DPB11801 DPA10301-DPB16501 DPA10401-DPB10101 DQA10102-DQB10501 DQA10102-DQB10503 DQA10102-DQB10601 DQA10102-DQB10602 DQA10102-DQB10609 DQA10102-DQB10611 DQA10103-DQB10501 DQA10103-DQB10601 DQA10103-DQB10602 DQA10103-DQB10609 DQA10201-DQB10301 DQA10201-DQB10303 DQA10301-DQB10301 DQA10302-DQB10301 DQA10303-DQB10301 DQA10401-DQB10301 DQA10401-DQB10319 DQA10501-DQB10301 DQA10501-DQB10319 DQA10503-DQB10301 DQA10505-DQB10301 DQA10505-DQB10309 DQA10505-DQB10319 DQA10506-DQB10303 DQA10508-DQB10301 DQA10509-DQB10301 DQA10601-DQB10301
VNIVTDSQYALGIIQAQPDKSE

SEQ ID NO: 5867 - protein, 23 aa, Human immunodeficiency virus 1
  source 1..23: note = HLAs: DRB1_0101 DRB1_0401 DRB1_0404 DRB1_0405 DRB1_0408 DRB1_0410 DRB1_1001 DPA10103-DPB11501 DPA10104-DPB11501 DPA10301-DPB10101 DPA10301-DPB10201 DPA10301-DPB10202 DPA10301-DPB110601 DPA10301-DPB11801 DPA10301-DPB14001 DPA10301-DPB16501 DPA10401-DPB10101 DQA10102-DQB10501 DQA10102-DQB10503 DQA10102-DQB10601 DQA10102-DQB10602 DQA10102-DQB10609 DQA10102-DQB10611 DQA10103-DQB10501 DQA10103-DQB10601 DQA10103-DQB10602 DQA10103-DQB10609 DQA10201-DQB10301 DQA10201-DQB10303 DQA10301-DQB10301 DQA10302-DQB10301 DQA10303-DQB10301 DQA10401-DQB10301 DQA10401-DQB10319 DQA10501-DQB10301 DQA10501-DQB10319 DQA10503-DQB10301 DQA10505-DQB10301 DQA10505-DQB10309 DQA10505-DQB10319 DQA10506-DQB10303 DQA10508-DQB10301 DQA10509-DQB10301 DQA10601-DQB10301
VNIVTDSQYALGIIQAQPDKSES

SEQ ID NO: 5868 - protein, 24 aa, Human immunodeficiency virus 1
  source 1..24: note = HLAs: DRB1_0101 DRB1_0401 DRB1_0404 DRB1_0405 DRB1_0408 DRB1_0410 DRB1_1001 DPA10103-DPB11501 DPA10104-DPB11501 DPA10301-DPB10101 DPA10301-DPB10201 DPA10301-DPB10202 DPA10301-DPB110601 DPA10301-DPB11801 DPA10301-DPB14001 DPA10301-DPB16501 DPA10401-DPB10101 DQA10102-DQB10501 DQA10102-DQB10503 DQA10102-DQB10601 DQA10102-DQB10602 DQA10102-DQB10609 DQA10102-DQB10611 DQA10103-DQB10501 DQA10103-DQB10601 DQA10103-DQB10602 DQA10103-DQB10609 DQA10201-DQB10301 DQA10201-DQB10303 DQA10301-DQB10301 DQA10302-DQB10301 DQA10303-DQB10301 DQA10401-DQB10301 DQA10401-DQB10319 DQA10501-DQB10301 DQA10501-DQB10319 DQA10503-DQB10301 DQA10505-DQB10301 DQA10505-DQB10302 DQA10505-DQB10309 DQA10505-DQB10319 DQA10506-DQB10303 DQA10508-DQB10301 DQA10509-DQB10301 DQA10601-DQB10301
VNIVTDSQYALGIIQAQPDKSESE

SEQ ID NO: 5869 - protein, 25 aa, Human immunodeficiency virus 1
  source 1..25: note = HLAs: DRB1_0101 DRB1_0401 DRB1_0404 DRB1_0405 DRB1_0408 DRB1_0410 DRB1_1001 DPA10103-DPB11501 DPA10104-DPB11501 DPA10202-DPB10101 DPA10301-DPB10101 DPA10301-DPB10201 DPA10301-DPB10202 DPA10301-DPB110601 DPA10301-DPB11801 DPA10301-DPB14001 DPA10301-DPB16501 DPA10401-DPB10101 DQA10102-DQB10501 DQA10102-DQB10503 DQA10102-DQB10601 DQA10102-DQB10602 DQA10102-DQB10609 DQA10102-DQB10611 DQA10103-DQB10501 DQA10103-DQB10601 DQA10103-DQB10602 DQA10103-DQB10609 DQA10201-DQB10301 DQA10201-DQB10303 DQA10301-DQB10301 DQA10302-DQB10301 DQA10303-DQB10301 DQA10401-DQB10301 DQA10401-DQB10319 DQA10501-DQB10301 DQA10501-DQB10319 DQA10503-DQB10301 DQA10505-DQB10301 DQA10505-DQB10302 DQA10505-DQB10309 DQA10505-DQB10319 DQA10506-DQB10303 DQA10508-DQB10301 DQA10509-DQB10301 DQA10601-DQB10301
VNIVTDSQYALGIIQAQPDKSESEL

SEQ ID NO: 5870 - protein, 14 aa, Human immunodeficiency virus 1
  source 1..14: note = HLAs: DPA10103-DPB11501 DPA10104-DPB11501 DPA10201-DPB11501 DPA10301-DPB10201 DPA10301-DPB10202 DPA10301-DPB10401 DPA10301-DPB11801 DPA10301-DPB12301 DPA10301-DPB13901 DPA10301-DPB14001
VNTPPLVKLWYQLE

SEQ ID NO: 5871 - protein, 23 aa, Human immunodeficiency virus 1
  source 1..23: note = HLAs: DRB1_0101
VPAHKGIGGNEQVDKLVSSGIRK

SEQ ID NO: 5872 - protein, 24 aa, Human immunodeficiency virus 1
  source 1..24: note = HLAs: DRB1_0101 DRB1_0102 DRB1_0701 DRB1_0901 DRB1_1001 DRB1_1102 DRB1_1114 DRB1_1301 DRB1_1302 DRB1_1304 DRB1_1406 DPA10202-DPB10101 DPA10301-DPB10101 DPA10301-DPB10201 DPA10301-DPB10202 DPA10301-DPB10401 DPA10301-DPB110601 DPA10301-DPB11801 DPA10301-DPB12301 DPA10301-DPB13901 DPA10301-DPB14001 DPA10401-DPB10101 DPA10401-DPB10201 DPA10401-DPB10202 DQA10102-DQB10501 DQA10103-DQB10601 DQA10103-DQB10609
VPAHKGIGGNEQVDKLVSSGIRKV

SEQ ID NO: 5873 - protein, 25 aa, Human immunodeficiency virus 1
  source 1..25: note = HLAs: DRB1_0101 DRB1_0102 DRB1_0701 DRB1_0806 DRB1_0901 DRB1_1001 DRB1_1102 DRB1_1103 DRB1_1104 DRB1_1114 DRB1_1301 DRB1_1302 DRB1_1304 DRB1_1401 DRB1_1406 DRB1_1454 DRB1_1501 DRB1_1602 DPA10103-DPB10201 DPA10103-DPB10202 DPA10103-DPB11501 DPA10103-DPB14801 DPA10104-DPB11501 DPA10202-DPB10101 DPA10202-DPB10201 DPA10202-DPB10202 DPA10202-DPB110601 DPA10202-DPB11901 DPA10301-DPB10101 DPA10301-DPB10201 DPA10301-DPB10202 DPA10301-DPB10401 DPA10301-DPB10402 DPA10301-DPB110501 DPA10301-DPB110601 DPA10301-DPB11801 DPA10301-DPB12301 DPA10301-DPB13901 DPA10301-DPB14001 DPA10301-DPB14901 DPA10301-DPB16501 DPA10301-DPB18001 DPA10401-DPB10101 DPA10401-DPB10201 DPA10401-DPB10202 DQA10102-DQB10501 DQA10102-DQB10601 DQA10103-DQB10501 DQA10103-DQB10601 DQA10103-DQB10602 DQA10103-DQB10609
VPAHKGIGGNEQVDKLVSSGIRKVL

SEQ ID NO: 5874 - protein, 15 aa, Human immunodeficiency virus 1
  source 1..15: note = HLAs: DRB1_1103 DRB1_1104
VPRRKAKIIRDYGKQ

SEQ ID NO: 5875 - protein, 16 aa, Human immunodeficiency virus 1
  source 1..16: note = HLAs: DRB1_0301
VPRRKAKIIRDYGKQM

SEQ ID NO: 5876 - protein, 17 aa, Human immunodeficiency virus 1
  source 1..17: note = HLAs: DRB1_0301 DRB1_0806 DRB1_1102 DRB1_1103 DRB1_1104 DRB1_1114 DRB1_1301 DRB1_1302 DRB1_1304 DRB1_1406 DPA10103-DPB15001 DPA10105-DPB15001
VPRRKAKIIRDYGKQMA

SEQ ID NO: 5877 - protein, 18 aa, Human immunodeficiency virus 1
  source 1..18: note = HLAs: DRB1_0301 DRB1_1103
VPRRKAKIIRDYGKQMAG

SEQ ID NO: 5878 - protein, 19 aa, Human immunodeficiency virus 1
  source 1..19: note = HLAs: DRB1_0301 DRB1_0806 DRB1_1102 DRB1_1103 DRB1_1104 DRB1_1114 DRB1_1301 DRB1_1302 DRB1_1304 DRB1_1406
VPRRKAKIIRDYGKQMAGD

SEQ ID NO: 5879 - protein, 20 aa, Human immunodeficiency virus 1
  source 1..20: note = HLAs: DRB1_0301 DRB1_0804 DRB1_0806 DRB1_1102 DRB1_1103 DRB1_1104 DRB1_1114 DRB1_1301 DRB1_1302 DRB1_1304 DRB1_1406 DRB1_1501 DPA10103-DPB15001 DPA10105-DPB15001 DPA10401-DPB10101 DPA10401-DPB10301 DPA10401-DPB10501 DPA10401-DPB11401 DQA10102-DQB10501
VPRRKAKIIRDYGKQMAGDD

SEQ ID NO: 5880 - protein, 21 aa, Human immunodeficiency virus 1
  source 1..21: note = HLAs: DRB1_0301 DRB1_0806 DRB1_1102 DRB1_1103 DRB1_1104 DRB1_1114 DRB1_1301 DRB1_1302 DRB1_1304 DRB1_1406
VPRRKAKIIRDYGKQMAGDDC

SEQ ID NO: 5881 - protein, 22 aa, Human immunodeficiency virus 1
  source 1..22: note = HLAs: DRB1_0301 DRB1_0806 DRB1_1102 DRB1_1103 DRB1_1104 DRB1_1114 DRB1_1301 DRB1_1302 DRB1_1304 DRB1_1406 DQA10102-DQB10501
VPRRKAKIIRDYGKQMAGDDCV

SEQ ID NO: 5882 - protein, 23 aa, Human immunodeficiency virus 1
  source 1..23: note = HLAs: DRB1_0301 DRB1_0806 DRB1_1102 DRB1_1103 DRB1_1104 DRB1_1114 DRB1_1301 DRB1_1302 DRB1_1304 DRB1_1406 DQA10102-DQB10501
VPRRKAKIIRDYGKQMAGDDCVA

SEQ ID NO: 5883 - protein, 13 aa, Human immunodeficiency virus 1
  source 1..13: note = HLAs: DQA10201-DQB10301 DQA10501-DQB10301 DQA10501-DQB10319 DQA10503-DQB10301 DQA10505-DQB10301 DQA10505-DQB10309 DQA10505-DQB10319 DQA10508-DQB10301 DQA10509-DQB10301
VQLGIPHPAGLKK

SEQ ID NO: 5884 - protein, 14 aa, Human immunodeficiency virus 1
  source 1..14: note = HLAs: DQA10103-DQB10601 DQA10201-DQB10301 DQA10501-DQB10301 DQA10501-DQB10319 DQA10503-DQB10301 DQA10505-DQB10301 DQA10505-DQB10309 DQA10505-DQB10319 DQA10508-DQB10301 DQA10509-DQB10301 DQA10601-DQB10301
VQLGIPHPAGLKKK

SEQ ID NO: 5885 - protein, 15 aa, Human immunodeficiency virus 1
  source 1..15: note = HLAs: DRB1_0101 DQA10102-DQB10601 DQA10103-DQB10601 DQA10201-DQB10301 DQA10301-DQB10301 DQA10302-DQB10301 DQA10303-DQB10301 DQA10501-DQB10301 DQA10501-DQB10319 DQA10503-DQB10301 DQA10505-DQB10301 DQA10505-DQB10309 DQA10505-DQB10319 DQA10508-DQB10301 DQA10509-DQB10301 DQA10601-DQB10301
VQLGIPHPAGLKKKK

SEQ ID NO: 5886 - protein, 16 aa, Human immunodeficiency virus 1
  source 1..16: note = HLAs: DQA10103-DQB10601 DQA10201-DQB10301 DQA10501-DQB10301 DQA10501-DQB10319 DQA10503-DQB10301 DQA10505-DQB10301 DQA10505-DQB10309 DQA10505-DQB10319 DQA10508-DQB10301 DQA10509-DQB10301 DQA10601-DQB10301
VQLGIPHPAGLKKKKS

SEQ ID NO: 5887 - protein, 17 aa, Human immunodeficiency virus 1
  source 1..17: note = HLAs: DQA10103-DQB10601 DQA10201-DQB10301 DQA10501-DQB10301 DQA10501-DQB10319 DQA10503-DQB10301 DQA10505-DQB10301 DQA10505-DQB10309 DQA10505-DQB10319 DQA10508-DQB10301 DQA10509-DQB10301
VQLGIPHPAGLKKKKSV

SEQ ID NO: 5888 - protein, 18 aa, Human immunodeficiency virus 1
  source 1..18: note = HLAs: DQA10201-DQB10301
VQLGIPHPAGLKKKKSVT

SEQ ID NO: 5889 - protein, 19 aa, Human immunodeficiency virus 1
  source 1..19: note = HLAs: DQA10201-DQB10301 DQA10501-DQB10301 DQA10501-DQB10319 DQA10503-DQB10301 DQA10505-DQB10301 DQA10505-DQB10309 DQA10505-DQB10319 DQA10508-DQB10301 DQA10509-DQB10301
VQLGIPHPAGLKKKKSVTV

SEQ ID NO: 5890 - protein, 20 aa, Human immunodeficiency virus 1
  source 1..20: note = HLAs: DRB1_0101 DRB1_1102 DRB1_1103 DRB1_1104 DRB1_1301 DRB1_1304 DQA10103-DQB10601 DQA10201-DQB10301 DQA10501-DQB10301 DQA10501-DQB10319 DQA10503-DQB10301 DQA10505-DQB10301 DQA10505-DQB10309 DQA10505-DQB10319 DQA10508-DQB10301 DQA10509-DQB10301
VQLGIPHPAGLKKKKSVTVL

SEQ ID NO: 5891 - protein, 21 aa, Human immunodeficiency virus 1
  source 1..21: note = HLAs: DRB1_1102 DRB1_1301 DRB1_1304
VQLGIPHPAGLKKKKSVTVLD

SEQ ID NO: 5892 - protein, 22 aa, Human immunodeficiency virus 1
  source 1..22: note = HLAs: DRB1_0101 DRB1_1102 DRB1_1103 DRB1_1104 DRB1_1301 DRB1_1304 DPA10301-DPB10101 DPA10301-DPB110601 DPA10301-DPB11801 DPA10301-DPB16501 DPA10401-DPB10101
VQLGIPHPAGLKKKKSVTVLDV

SEQ ID NO: 5893 - protein, 23 aa, Human immunodeficiency virus 1
  source 1..23: note = HLAs: DRB1_0101 DRB1_0806 DRB1_1102 DRB1_1103 DRB1_1104 DRB1_1301 DRB1_1304 DPA10103-DPB15001 DPA10105-DPB15001 DPA10301-DPB10101 DPA10301-DPB10201 DPA10301-DPB10202 DPA10301-DPB110601 DPA10301-DPB11801 DPA10301-DPB16501 DPA10401-DPB10101
VQLGIPHPAGLKKKKSVTVLDVG

SEQ ID NO: 5894 - protein, 24 aa, Human immunodeficiency virus 1
  source 1..24: note = HLAs: DRB1_0101 DRB1_0806 DRB1_1102 DRB1_1103 DRB1_1104 DRB1_1301 DRB1_1304 DPA10103-DPB10101 DPA10103-DPB15001 DPA10104-DPB10101 DPA10105-DPB10101 DPA10105-DPB15001 DPA10301-DPB10101 DPA10301-DPB10201 DPA10301-DPB10202 DPA10301-DPB110601 DPA10301-DPB11801 DPA10301-DPB16501 DPA10401-DPB10101
VQLGIPHPAGLKKKKSVTVLDVGD

SEQ ID NO: 5895 - protein, 25 aa, Human immunodeficiency virus 1
  source 1..25: note = HLAs: DRB1_0101 DRB1_0701 DRB1_0806 DRB1_1001 DRB1_1102 DRB1_1103 DRB1_1104 DRB1_1301 DRB1_1304 DRB1_1406 DPA10103-DPB10101 DPA10103-DPB11501 DPA10103-DPB15001 DPA10104-DPB10101 DPA10104-DPB11501 DPA10105-DPB10101 DPA10105-DPB15001 DPA10202-DPB10101 DPA10202-DPB110601 DPA10202-DPB11901 DPA10301-DPB10101 DPA10301-DPB10201 DPA10301-DPB10202 DPA10301-DPB110601 DPA10301-DPB11801 DPA10301-DPB16501 DPA10401-DPB10101 DPA10401-DPB10501 DPA10401-DPB11401 DQA10102-DQB10501 DQA10201-DQB10301
VQLGIPHPAGLKKKKSVTVLDVGDA

SEQ ID NO: 5896 - protein, 13 aa, Human immunodeficiency virus 1
  source 1..13: note = HLAs: DPA10103-DPB11501 DPA10104-DPB11501 DPA10301-DPB10101 DPA10301-DPB10201 DPA10301-DPB10202 DPA10301-DPB11801 DPA10301-DPB14001 DPA10401-DPB10101 DQA10102-DQB10501
VQMAVFIHNFKRK

SEQ ID NO: 5897 - protein, 14 aa, Human immunodeficiency virus 1
  source 1..14: note = HLAs: DRB1_0804 DRB1_0806 DRB1_1101 DRB1_1102 DRB1_1103 DRB1_1104 DRB1_1301 DRB1_1304 DRB1_1305 DRB1_1406 DRB1_1501 DRB1_1601 DPA10103-DPB11501 DPA10103-DPB11601 DPA10104-DPB11501 DPA10201-DPB11501 DPA10202-DPB10101 DPA10202-DPB110601 DPA10202-DPB11901 DPA10301-DPB10101 DPA10301-DPB10201 DPA10301-DPB10202 DPA10301-DPB10401 DPA10301-DPB110601 DPA10301-DPB11801 DPA10301-DPB12301 DPA10301-DPB13901 DPA10301-DPB14001 DPA10301-DPB16501 DPA10401-DPB10101 DPA10401-DPB10201 DPA10401-DPB10202 DQA10102-DQB10501
VQMAVFIHNFKRKG

SEQ ID NO: 5898 - protein, 15 aa, Human immunodeficiency virus 1
  source 1..15: note = HLAs: DRB1_0101 DRB1_0102 DRB1_0410 DRB1_0801 DRB1_0802 DRB1_0804 DRB1_0806 DRB1_0809 DRB1_1001 DRB1_1101 DRB1_1102 DRB1_1103 DRB1_1104 DRB1_1114 DRB1_1202 DRB1_1301 DRB1_1302 DRB1_1303 DRB1_1304 DRB1_1305 DRB1_1312 DRB1_1402 DRB1_1406 DRB1_1501 DRB1_1503 DRB1_1601 DRB1_1602 DPA10103-DPB10101 DPA10103-DPB11501 DPA10103-DPB11601 DPA10103-DPB11801 DPA10103-DPB11901 DPA10103-DPB13101 DPA10103-DPB13401 DPA10103-DPB14001 DPA10103-DPB14101 DPA10103-DPB15001 DPA10104-DPB10101 DPA10104-DPB11501 DPA10105-DPB10101 DPA10105-DPB11801 DPA10105-DPB15001 DPA10201-DPB11501 DPA10201-DPB11601 DPA10202-DPB10101 DPA10202-DPB10201 DPA10202-DPB10202 DPA10202-DPB10501 DPA10202-DPB110601 DPA10202-DPB11801 DPA10202-DPB11901 DPA10202-DPB13101 DPA10202-DPB13801 DPA10202-DPB16501 DPA10301-DPB10101 DPA10301-DPB10201 DPA10301-DPB10202 DPA10301-DPB10401 DPA10301-DPB110601 DPA10301-DPB11801 DPA10301-DPB12301 DPA10301-DPB13901 DPA10301-DPB14001 DPA10301-DPB16501 DPA10401-DPB10101 DPA10401-DPB10201 DPA10401-DPB10202; note = HLAs: DPA10401-DPB10501 DQA10102-DQB10501 DQA10103-DQB10501
VQMAVFIHNFKRKGG

SEQ ID NO: 5899 - protein, 16 aa, Human immunodeficiency virus 1
  source 1..16: note = HLAs: DRB1_0801 DRB1_0802 DRB1_0804 DRB1_0806 DRB1_0809 DRB1_1001 DRB1_1101 DRB1_1102 DRB1_1103 DRB1_1104 DRB1_1301 DRB1_1304 DRB1_1305 DRB1_1406 DRB1_1501 DRB1_1503 DRB1_1601 DRB1_1602 DPA10103-DPB11501 DPA10103-DPB11601 DPA10103-DPB11901 DPA10103-DPB13401 DPA10103-DPB14101 DPA10103-DPB15001 DPA10104-DPB11501 DPA10105-DPB15001 DPA10201-DPB110601 DPA10201-DPB11501 DPA10201-DPB11901 DPA10202-DPB10101 DPA10202-DPB10201 DPA10202-DPB10202 DPA10202-DPB10501 DPA10202-DPB110601 DPA10202-DPB11801 DPA10202-DPB11901 DPA10202-DPB13101 DPA10202-DPB13801 DPA10301-DPB10101 DPA10301-DPB10201 DPA10301-DPB10202 DPA10301-DPB10401 DPA10301-DPB110601 DPA10301-DPB11801 DPA10301-DPB12301 DPA10301-DPB13901 DPA10301-DPB14001 DPA10301-DPB16501 DPA10401-DPB10101 DPA10401-DPB10201 DPA10401-DPB10202 DPA10401-DPB10501 DQA10102-DQB10501 DQA10103-DQB10501
VQMAVFIHNFKRKGGI

SEQ ID NO: 5900 - protein, 17 aa, Human immunodeficiency virus 1
  source 1..17: note = HLAs: DRB1_0101 DRB1_0801 DRB1_0802 DRB1_0804 DRB1_0806 DRB1_0809 DRB1_1001 DRB1_1101 DRB1_1102 DRB1_1103 DRB1_1104 DRB1_1301 DRB1_1304 DRB1_1305 DRB1_1406 DRB1_1501 DRB1_1503 DRB1_1601 DPA10103-DPB11501 DPA10103-DPB11601 DPA10103-DPB11901 DPA10103-DPB13401 DPA10103-DPB14101 DPA10103-DPB15001 DPA10104-DPB11501 DPA10105-DPB15001 DPA10201-DPB11501 DPA10202-DPB10101 DPA10202-DPB10201 DPA10202-DPB10202 DPA10202-DPB10501 DPA10202-DPB110601 DPA10202-DPB11801 DPA10202-DPB11901 DPA10202-DPB13101 DPA10202-DPB13801 DPA10301-DPB10101 DPA10301-DPB10201 DPA10301-DPB10202 DPA10301-DPB10401 DPA10301-DPB110601 DPA10301-DPB11801 DPA10301-DPB12301 DPA10301-DPB13901 DPA10301-DPB14001 DPA10301-DPB16501 DPA10401-DPB10101 DPA10401-DPB10201 DPA10401-DPB10202 DPA10401-DPB10501 DQA10102-DQB10501 DQA10103-DQB10501
VQMAVFIHNFKRKGGIG

SEQ ID NO: 5901 - protein, 18 aa, Human immunodeficiency virus 1
  source 1..18: note = HLAs: DRB1_0806 DRB1_1101 DRB1_1102 DRB1_1103 DRB1_1104 DRB1_1301 DRB1_1304 DRB1_1305 DPA10301-DPB10201 DPA10301-DPB10202 DPA10301-DPB11801 DPA10301-DPB14001
VQMAVFIHNFKRKGGIGG

SEQ ID NO: 5902 - protein, 19 aa, Human immunodeficiency virus 1
  source 1..19: note = HLAs: DRB1_0801 DRB1_0802 DRB1_0804 DRB1_0806 DRB1_0809 DRB1_1101 DRB1_1102 DRB1_1103 DRB1_1104 DRB1_1301 DRB1_1304 DRB1_1305 DRB1_1406 DRB1_1501 DRB1_1601 DPA10103-DPB11501 DPA10104-DPB11501 DPA10202-DPB110601 DPA10202-DPB11901 DPA10301-DPB10101 DPA10301-DPB10201 DPA10301-DPB10202 DPA10301-DPB110601 DPA10301-DPB11801 DPA10301-DPB14001 DPA10301-DPB16501 DPA10401-DPB10101 DQA10102-DQB10501
VQMAVFIHNFKRKGGIGGY

SEQ ID NO: 5903 - protein, 20 aa, Human immunodeficiency virus 1
  source 1..20: note = HLAs: DRB1_0101 DRB1_0801 DRB1_0802 DRB1_0804 DRB1_0806 DRB1_0809 DRB1_1001 DRB1_1101 DRB1_1102 DRB1_1103 DRB1_1104 DRB1_1301 DRB1_1304 DRB1_1305 DRB1_1406 DRB1_1501 DRB1_1503 DRB1_1601 DPA10103-DPB11501 DPA10103-DPB11601 DPA10103-DPB11901 DPA10103-DPB15001 DPA10104-DPB11501 DPA10105-DPB15001 DPA10202-DPB10101 DPA10202-DPB10202 DPA10202-DPB10501 DPA10202-DPB110601 DPA10202-DPB11801 DPA10202-DPB11901 DPA10202-DPB13101 DPA10202-DPB13801 DPA10301-DPB10101 DPA10301-DPB10201 DPA10301-DPB10202 DPA10301-DPB110601 DPA10301-DPB11801 DPA10301-DPB14001 DPA10301-DPB16501 DPA10401-DPB10101 DPA10401-DPB10201 DPA10401-DPB10202 DPA10401-DPB10501 DQA10102-DQB10501 DQA10103-DQB10501
VQMAVFIHNFKRKGGIGGYS

SEQ ID NO: 5904 - protein, 21 aa, Human immunodeficiency virus 1
  source 1..21: note = HLAs: DRB1_0801 DRB1_0802 DRB1_0804 DRB1_0806 DRB1_0809 DRB1_1101 DRB1_1102 DRB1_1103 DRB1_1104 DRB1_1301 DRB1_1304 DRB1_1305 DRB1_1406 DRB1_1501 DRB1_1601 DPA10301-DPB10201 DPA10301-DPB10202 DPA10301-DPB11801 DPA10301-DPB14001 DQA10102-DQB10501
VQMAVFIHNFKRKGGIGGYSA

SEQ ID NO: 5905 - protein, 22 aa, Human immunodeficiency virus 1
  source 1..22: note = HLAs: DRB1_0101 DRB1_0801 DRB1_0802 DRB1_0804 DRB1_0806 DRB1_0809 DRB1_1101 DRB1_1102 DRB1_1103 DRB1_1104 DRB1_1301 DRB1_1304 DRB1_1305 DRB1_1406 DRB1_1501 DRB1_1601 DPA10301-DPB10201 DPA10301-DPB10202 DPA10301-DPB11801 DPA10301-DPB14001 DQA10102-DQB10501
VQMAVFIHNFKRKGGIGGYSAG

SEQ ID NO: 5906 - protein, 23 aa, Human immunodeficiency virus 1
  source 1..23: note = HLAs: DRB1_0101 DRB1_0801 DRB1_0802 DRB1_0804 DRB1_0806 DRB1_0809 DRB1_1101 DRB1_1102 DRB1_1103 DRB1_1104 DRB1_1301 DRB1_1304 DRB1_1305 DRB1_1406 DRB1_1501 DRB1_1601 DPA10301-DPB10201 DPA10301-DPB10202 DPA10301-DPB11801 DPA10301-DPB14001 DQA10102-DQB10501
VQMAVFIHNFKRKGGIGGYSAGE

SEQ ID NO: 5907 - protein, 24 aa, Human immunodeficiency virus 1
  source 1..24: note = HLAs: DRB1_0101 DRB1_0801 DRB1_0802 DRB1_0804 DRB1_0806 DRB1_0809 DRB1_1001 DRB1_1101 DRB1_1102 DRB1_1103 DRB1_1104 DRB1_1301 DRB1_1304 DRB1_1305 DRB1_1406 DRB1_1501 DRB1_1601 DPA10301-DPB10201 DPA10301-DPB10202 DPA10301-DPB11801 DPA10301-DPB14001 DQA10102-DQB10501
VQMAVFIHNFKRKGGIGGYSAGER

SEQ ID NO: 5908 - protein, 25 aa, Human immunodeficiency virus 1
  source 1..25: note = HLAs: DRB1_0101 DRB1_0801 DRB1_0802 DRB1_0804 DRB1_0806 DRB1_0809 DRB1_1001 DRB1_1101 DRB1_1102 DRB1_1103 DRB1_1104 DRB1_1301 DRB1_1304 DRB1_1305 DRB1_1406 DRB1_1501 DRB1_1601 DPA10301-DPB10201 DPA10301-DPB10202 DPA10301-DPB11801 DPA10301-DPB14001 DPA10401-DPB10101 DQA10102-DQB10501
VQMAVFIHNFKRKGGIGGYSAGERI

SEQ ID NO: 5909 - protein, 15 aa, Human immunodeficiency virus 1
  source 1..15: note = HLAs: DRB1_1001
VRDQAEHLKTAVQMA

SEQ ID NO: 5910 - protein, 16 aa, Human immunodeficiency virus 1
  source 1..16: note = HLAs: DRB1_1001 DPA10401-DPB10101 DQA10102-DQB10501 DQA10102-DQB10601 DQA10102-DQB10609 DQA10103-DQB10601 DQA10103-DQB10609 DQA10201-DQB10301
VRDQAEHLKTAVQMAV

SEQ ID NO: 5911 - protein, 17 aa, Human immunodeficiency virus 1
  source 1..17: note = HLAs: DRB1_0101 DRB1_0701 DRB1_0901 DRB1_1001 DRB1_1406 DPA10103-DPB11501 DPA10104-DPB11501 DPA10202-DPB10101 DPA10301-DPB10101 DPA10301-DPB10201 DPA10301-DPB10202 DPA10301-DPB10401 DPA10301-DPB110601 DPA10301-DPB11801 DPA10301-DPB12301 DPA10301-DPB13901 DPA10301-DPB14001 DPA10301-DPB16501 DPA10401-DPB10101 DQA10102-DQB10501 DQA10102-DQB10601 DQA10102-DQB10602 DQA10102-DQB10609 DQA10102-DQB10611 DQA10103-DQB10601 DQA10103-DQB10602 DQA10103-DQB10609 DQA10201-DQB10301
VRDQAEHLKTAVQMAVF

SEQ ID NO: 5912 - protein, 18 aa, Human immunodeficiency virus 1
  source 1..18: note = HLAs: DPA10301-DPB10101 DPA10301-DPB10202 DPA10401-DPB10101 DQA10102-DQB10501 DQA10102-DQB10609
VRDQAEHLKTAVQMAVFI

SEQ ID NO: 5913 - protein, 19 aa, Human immunodeficiency virus 1
  source 1..19: note = HLAs: DRB1_0101 DRB1_1001 DPA10103-DPB10101 DPA10103-DPB11501 DPA10104-DPB10101 DPA10104-DPB11501 DPA10105-DPB10101 DPA10202-DPB10101 DPA10301-DPB10101 DPA10301-DPB10201 DPA10301-DPB10202 DPA10301-DPB10401 DPA10301-DPB110601 DPA10301-DPB11801 DPA10301-DPB12301 DPA10301-DPB13901 DPA10301-DPB14001 DPA10301-DPB16501 DPA10401-DPB10101 DQA10102-DQB10501 DQA10102-DQB10601 DQA10102-DQB10602 DQA10102-DQB10609 DQA10102-DQB10611 DQA10103-DQB10501 DQA10103-DQB10601 DQA10103-DQB10609
VRDQAEHLKTAVQMAVFIH

SEQ ID NO: 5914 - protein, 20 aa, Human immunodeficiency virus 1
  source 1..20: note = HLAs: DRB1_0101 DRB1_0701 DRB1_0813 DRB1_0901 DRB1_1001 DRB1_1406 DPA10103-DPB10101 DPA10103-DPB10201 DPA10103-DPB10202 DPA10103-DPB10501 DPA10103-DPB11101 DPA10103-DPB11501 DPA10103-DPB11601 DPA10103-DPB11901 DPA10103-DPB13101 DPA10103-DPB14801 DPA10103-DPB15001 DPA10104-DPB10101 DPA10104-DPB11501 DPA10105-DPB10101 DPA10105-DPB15001 DPA10106-DPB10101 DPA10201-DPB10101 DPA10201-DPB11501 DPA10202-DPB10101 DPA10202-DPB10202 DPA10202-DPB10501 DPA10202-DPB10901 DPA10202-DPB110601 DPA10202-DPB11101 DPA10202-DPB11901 DPA10202-DPB13801 DPA10202-DPB15501 DPA10202-DPB16501 DPA10301-DPB10101 DPA10301-DPB10201 DPA10301-DPB10202 DPA10301-DPB10401 DPA10301-DPB10402 DPA10301-DPB10901 DPA10301-DPB110501 DPA10301-DPB110601 DPA10301-DPB11101 DPA10301-DPB11301 DPA10301-DPB11701 DPA10301-DPB11801 DPA10301-DPB12301 DPA10301-DPB13901 DPA10301-DPB14001 DPA10301-DPB14901 DPA10301-DPB15501 DPA10301-DPB16501 DPA10301-DPB17501 DPA10301-DPB18001 DPA10401-DPB10101 DPA10401-DPB10201 DPA10401-DPB10202; note = HLAs: DPA10401-DPB10301 DPA10401-DPB10402 DPA10401-DPB10501 DPA10401-DPB110501 DPA10401-DPB11301 DPA10401-DPB113301 DPA10401-DPB11401 DPA10401-DPB14901 DQA10102-DQB10501 DQA10102-DQB10503 DQA10102-DQB10601 DQA10102-DQB10602 DQA10102-DQB10609 DQA10102-DQB10611 DQA10103-DQB10501 DQA10103-DQB10601 DQA10103-DQB10602 DQA10103-DQB10609 DQA10201-DQB10301
VRDQAEHLKTAVQMAVFIHN

SEQ ID NO: 5915 - protein, 21 aa, Human immunodeficiency virus 1
  source 1..21: note = HLAs: DRB1_0101 DRB1_1001 DPA10103-DPB10101 DPA10103-DPB10202 DPA10103-DPB11501 DPA10103-DPB11901 DPA10103-DPB15001 DPA10104-DPB10101 DPA10104-DPB11501 DPA10105-DPB10101 DPA10105-DPB15001 DPA10202-DPB10101 DPA10301-DPB10101 DPA10301-DPB10201 DPA10301-DPB10202 DPA10301-DPB10401 DPA10301-DPB10402 DPA10301-DPB110501 DPA10301-DPB110601 DPA10301-DPB11801 DPA10301-DPB12301 DPA10301-DPB13901 DPA10301-DPB14001 DPA10301-DPB14901 DPA10301-DPB15501 DPA10301-DPB16501 DPA10301-DPB17501 DPA10301-DPB18001 DPA10401-DPB10101 DPA10401-DPB10201 DPA10401-DPB10202 DPA10401-DPB10501 DQA10102-DQB10501 DQA10102-DQB10609 DQA10103-DQB10501 DQA10103-DQB10601 DQA10103-DQB10609
VRDQAEHLKTAVQMAVFIHNF

SEQ ID NO: 5916 - protein, 22 aa, Human immunodeficiency virus 1
  source 1..22: note = HLAs: DRB1_0101 DRB1_0701 DRB1_1001 DRB1_1406 DPA10103-DPB10101 DPA10103-DPB10201 DPA10103-DPB10202 DPA10103-DPB10501 DPA10103-DPB11501 DPA10103-DPB11601 DPA10103-DPB11801 DPA10103-DPB11901 DPA10103-DPB13101 DPA10103-DPB13401 DPA10103-DPB14001 DPA10103-DPB14801 DPA10103-DPB15001 DPA10104-DPB10101 DPA10104-DPB11501 DPA10105-DPB10101 DPA10105-DPB11801 DPA10105-DPB15001 DPA10106-DPB10101 DPA10201-DPB10101 DPA10201-DPB11501 DPA10202-DPB10101 DPA10202-DPB110601 DPA10202-DPB11901 DPA10301-DPB10101 DPA10301-DPB10201 DPA10301-DPB10202 DPA10301-DPB10401 DPA10301-DPB10402 DPA10301-DPB110501 DPA10301-DPB110601 DPA10301-DPB11101 DPA10301-DPB11801 DPA10301-DPB12301 DPA10301-DPB13901 DPA10301-DPB14001 DPA10301-DPB14901 DPA10301-DPB15501 DPA10301-DPB16501 DPA10301-DPB17501 DPA10301-DPB18001 DPA10401-DPB10101 DPA10401-DPB10201 DPA10401-DPB10202 DPA10401-DPB10301 DPA10401-DPB10501 DPA10401-DPB11301 DPA10401-DPB113301 DPA10401-DPB11401 DQA10102-DQB10501 DQA10102-DQB10601 DQA10102-DQB10609; note = HLAs: DQA10102-DQB10611 DQA10103-DQB10501 DQA10103-DQB10601 DQA10103-DQB10609
VRDQAEHLKTAVQMAVFIHNFK

SEQ ID NO: 5917 - protein, 23 aa, Human immunodeficiency virus 1
  source 1..23: note = HLAs: DRB1_0101 DRB1_0410 DRB1_0701 DRB1_1001 DRB1_1304 DRB1_1406 DRB1_1602 DPA10103-DPB10101 DPA10103-DPB10201 DPA10103-DPB10202 DPA10103-DPB10401 DPA10103-DPB10501 DPA10103-DPB11101 DPA10103-DPB112601 DPA10103-DPB11501 DPA10103-DPB11601 DPA10103-DPB11801 DPA10103-DPB11901 DPA10103-DPB12301 DPA10103-DPB13101 DPA10103-DPB13401 DPA10103-DPB13901 DPA10103-DPB14001 DPA10103-DPB14101 DPA10103-DPB14801 DPA10103-DPB15001 DPA10103-DPB15501 DPA10104-DPB10101 DPA10104-DPB11501 DPA10105-DPB10101 DPA10105-DPB10401 DPA10105-DPB11801 DPA10105-DPB15001 DPA10106-DPB10101 DPA10201-DPB10101 DPA10201-DPB110601 DPA10201-DPB11501 DPA10201-DPB11601 DPA10201-DPB11901 DPA10202-DPB10101 DPA10202-DPB10201 DPA10202-DPB10202 DPA10202-DPB10501 DPA10202-DPB110601 DPA10202-DPB11801 DPA10202-DPB11901 DPA10202-DPB13101 DPA10202-DPB13801 DPA10202-DPB15501 DPA10202-DPB16501 DPA10301-DPB10101 DPA10301-DPB10201 DPA10301-DPB10202 DPA10301-DPB10401 DPA10301-DPB10402 DPA10301-DPB110501 DPA10301-DPB110601 DPA10301-DPB11101; note = HLAs: DPA10301-DPB11301 DPA10301-DPB11801 DPA10301-DPB12301 DPA10301-DPB13901 DPA10301-DPB14001 DPA10301-DPB14901 DPA10301-DPB15501 DPA10301-DPB16501 DPA10301-DPB17501 DPA10301-DPB18001 DPA10401-DPB10101 DPA10401-DPB10201 DPA10401-DPB10202 DPA10401-DPB10301 DPA10401-DPB10402 DPA10401-DPB10501 DPA10401-DPB110501 DPA10401-DPB11301 DPA10401-DPB113301 DPA10401-DPB11401 DPA10401-DPB14901 DQA10102-DQB10501 DQA10102-DQB10503 DQA10102-DQB10601 DQA10102-DQB10602 DQA10102-DQB10609 DQA10102-DQB10611 DQA10103-DQB10501 DQA10103-DQB10601 DQA10103-DQB10602 DQA10103-DQB10609
VRDQAEHLKTAVQMAVFIHNFKR

SEQ ID NO: 5918 - protein, 24 aa, Human immunodeficiency virus 1
  source 1..24: note = HLAs: DRB1_0101 DRB1_0404 DRB1_0410 DRB1_0701 DRB1_0804 DRB1_0806 DRB1_0813 DRB1_1001 DRB1_1102 DRB1_1103 DRB1_1104 DRB1_1301 DRB1_1304 DRB1_1406 DRB1_1501 DRB1_1601 DRB1_1602 DPA10103-DPB10101 DPA10103-DPB10201 DPA10103-DPB10202 DPA10103-DPB10401 DPA10103-DPB10501 DPA10103-DPB11101 DPA10103-DPB112601 DPA10103-DPB11501 DPA10103-DPB11601 DPA10103-DPB11801 DPA10103-DPB11901 DPA10103-DPB12301 DPA10103-DPB13101 DPA10103-DPB13401 DPA10103-DPB13901 DPA10103-DPB14001 DPA10103-DPB14101 DPA10103-DPB14801 DPA10103-DPB15001 DPA10103-DPB15501 DPA10103-DPB15901 DPA10104-DPB10101 DPA10104-DPB11501 DPA10105-DPB10101 DPA10105-DPB10401 DPA10105-DPB11801 DPA10105-DPB15001 DPA10106-DPB10101 DPA10201-DPB10101 DPA10201-DPB10202 DPA10201-DPB110601 DPA10201-DPB11501 DPA10201-DPB11601 DPA10201-DPB11901 DPA10202-DPB10101 DPA10202-DPB10201 DPA10202-DPB10202 DPA10202-DPB10401 DPA10202-DPB10501 DPA10202-DPB110601 DPA10202-DPB11101 DPA10202-DPB11801 DPA10202-DPB11901 DPA10202-DPB13101 DPA10202-DPB13801; note = HLAs: DPA10202-DPB15501 DPA10202-DPB16501 DPA10301-DPB10101 DPA10301-DPB10201 DPA10301-DPB10202 DPA10301-DPB10401 DPA10301-DPB10402 DPA10301-DPB110501 DPA10301-DPB110601 DPA10301-DPB11101 DPA10301-DPB11301 DPA10301-DPB11801 DPA10301-DPB12301 DPA10301-DPB13901 DPA10301-DPB14001 DPA10301-DPB14901 DPA10301-DPB15501 DPA10301-DPB16501 DPA10301-DPB17501 DPA10301-DPB18001 DPA10401-DPB10101 DPA10401-DPB10201 DPA10401-DPB10202 DPA10401-DPB10301 DPA10401-DPB10402 DPA10401-DPB10501 DPA10401-DPB110501 DPA10401-DPB11301 DPA10401-DPB113301 DPA10401-DPB11401 DPA10401-DPB14901 DQA10102-DQB10501 DQA10102-DQB10503 DQA10102-DQB10601 DQA10102-DQB10602 DQA10102-DQB10609 DQA10102-DQB10611 DQA10103-DQB10501 DQA10103-DQB10601 DQA10103-DQB10602 DQA10103-DQB10609
VRDQAEHLKTAVQMAVFIHNFKRK

SEQ ID NO: 5919 - protein, 25 aa, Human immunodeficiency virus 1
  source 1..25: note = HLAs: DRB1_0101 DRB1_0404 DRB1_0410 DRB1_0701 DRB1_0801 DRB1_0804 DRB1_0806 DRB1_0813 DRB1_0901 DRB1_1001 DRB1_1101 DRB1_1102 DRB1_1103 DRB1_1104 DRB1_1301 DRB1_1304 DRB1_1305 DRB1_1406 DRB1_1501 DRB1_1601 DRB1_1602 DPA10103-DPB10101 DPA10103-DPB10201 DPA10103-DPB10202 DPA10103-DPB10401 DPA10103-DPB10501 DPA10103-DPB11101 DPA10103-DPB112601 DPA10103-DPB11501 DPA10103-DPB11601 DPA10103-DPB11801 DPA10103-DPB11901 DPA10103-DPB12301 DPA10103-DPB13101 DPA10103-DPB13401 DPA10103-DPB13901 DPA10103-DPB14001 DPA10103-DPB14101 DPA10103-DPB14801 DPA10103-DPB15001 DPA10103-DPB15501 DPA10103-DPB15901 DPA10104-DPB10101 DPA10104-DPB11501 DPA10105-DPB10101 DPA10105-DPB10401 DPA10105-DPB11801 DPA10105-DPB15001 DPA10106-DPB10101 DPA10201-DPB10101 DPA10201-DPB10202 DPA10201-DPB110601 DPA10201-DPB11501 DPA10201-DPB11601 DPA10201-DPB11901 DPA10202-DPB10101 DPA10202-DPB10201 DPA10202-DPB10202 DPA10202-DPB10401 DPA10202-DPB10501 DPA10202-DPB110601 DPA10202-DPB11101 DPA10202-DPB11801 DPA10202-DPB11901; note = HLAs: DPA10202-DPB13101 DPA10202-DPB13801 DPA10202-DPB15501 DPA10202-DPB16501 DPA10301-DPB10101 DPA10301-DPB10201 DPA10301-DPB10202 DPA10301-DPB10401 DPA10301-DPB10402 DPA10301-DPB110501 DPA10301-DPB110601 DPA10301-DPB11101 DPA10301-DPB11301 DPA10301-DPB11701 DPA10301-DPB11801 DPA10301-DPB12301 DPA10301-DPB13901 DPA10301-DPB14001 DPA10301-DPB14901 DPA10301-DPB15501 DPA10301-DPB16501 DPA10301-DPB17501 DPA10301-DPB18001 DPA10401-DPB10101 DPA10401-DPB10201 DPA10401-DPB10202 DPA10401-DPB10301 DPA10401-DPB10402 DPA10401-DPB10501 DPA10401-DPB110501 DPA10401-DPB11301 DPA10401-DPB113301 DPA10401-DPB11401 DPA10401-DPB14901 DQA10102-DQB10501 DQA10102-DQB10503 DQA10102-DQB10601 DQA10102-DQB10602 DQA10102-DQB10609 DQA10102-DQB10611 DQA10103-DQB10501 DQA10103-DQB10601 DQA10103-DQB10602 DQA10103-DQB10609
VRDQAEHLKTAVQMAVFIHNFKRKG

SEQ ID NO: 5920 - protein, 13 aa, Human immunodeficiency virus 1
  source 1..13: note = HLAs: DPA10103-DPB11501 DPA10104-DPB11501 DPA10301-DPB10201 DPA10301-DPB10202 DPA10301-DPB11801 DPA10301-DPB14001
VSSGIRKVLFLDG

SEQ ID NO: 5921 - protein, 14 aa, Human immunodeficiency virus 1
  source 1..14: note = HLAs: DPA10103-DPB10201 DPA10103-DPB10202 DPA10103-DPB11501 DPA10103-DPB14001 DPA10103-DPB14801 DPA10104-DPB11501 DPA10201-DPB11501 DPA10202-DPB10101 DPA10301-DPB10101 DPA10301-DPB10201 DPA10301-DPB10202 DPA10301-DPB10401 DPA10301-DPB110601 DPA10301-DPB11801 DPA10301-DPB12301 DPA10301-DPB13901 DPA10301-DPB14001 DPA10301-DPB16501 DPA10401-DPB10101 DPA10401-DPB10201 DPA10401-DPB10202
VSSGIRKVLFLDGI

SEQ ID NO: 5922 - protein, 14 aa, Human immunodeficiency virus 1
  source 1..14: note = HLAs: DRB1_1001 DQA10102-DQB10501 DQA10102-DQB10503 DQA10102-DQB10601 DQA10102-DQB10602 DQA10102-DQB10609 DQA10102-DQB10611 DQA10201-DQB10301 DQA10201-DQB10303 DQA10301-DQB10301 DQA10302-DQB10301 DQA10303-DQB10301 DQA10401-DQB10301 DQA10401-DQB10319 DQA10501-DQB10301 DQA10501-DQB10319 DQA10503-DQB10301 DQA10505-DQB10301 DQA10505-DQB10309 DQA10505-DQB10319 DQA10506-DQB10303 DQA10508-DQB10301 DQA10509-DQB10301 DQA10601-DQB10301
VTDSQYALGIIQAQ

SEQ ID NO: 5923 - protein, 15 aa, Human immunodeficiency virus 1
  source 1..15: note = HLAs: DRB1_0101 DRB1_0401 DRB1_0408 DRB1_0901 DRB1_1001 DPA10301-DPB10101 DPA10401-DPB10101 DQA10102-DQB10501 DQA10102-DQB10503 DQA10102-DQB10601 DQA10102-DQB10602 DQA10102-DQB10609 DQA10102-DQB10610 DQA10102-DQB10611 DQA10103-DQB10501 DQA10103-DQB10601 DQA10103-DQB10602 DQA10103-DQB10609 DQA10201-DQB10301 DQA10201-DQB10303 DQA10301-DQB10301 DQA10301-DQB10304 DQA10302-DQB10301 DQA10302-DQB10304 DQA10303-DQB10301 DQA10303-DQB10304 DQA10401-DQB10301 DQA10401-DQB10319 DQA10501-DQB10301 DQA10501-DQB10319 DQA10503-DQB10301 DQA10505-DQB10301 DQA10505-DQB10302 DQA10505-DQB10309 DQA10505-DQB10319 DQA10505-DQB10402 DQA10506-DQB10303 DQA10508-DQB10301 DQA10509-DQB10301 DQA10601-DQB10301
VTDSQYALGIIQAQP

SEQ ID NO: 5924 - protein, 16 aa, Human immunodeficiency virus 1
  source 1..16: note = HLAs: DRB1_0408 DRB1_1001 DPA10301-DPB10101 DPA10401-DPB10101 DQA10101-DQB10601 DQA10102-DQB10501 DQA10102-DQB10503 DQA10102-DQB10601 DQA10102-DQB10602 DQA10102-DQB10604 DQA10102-DQB10609 DQA10102-DQB10610 DQA10102-DQB10611 DQA10103-DQB10501 DQA10103-DQB10601 DQA10103-DQB10602 DQA10103-DQB10609 DQA10201-DQB10301 DQA10201-DQB10302 DQA10201-DQB10303 DQA10301-DQB10301 DQA10301-DQB10302 DQA10301-DQB10303 DQA10301-DQB10304 DQA10301-DQB10305 DQA10302-DQB10301 DQA10302-DQB10302 DQA10302-DQB10303 DQA10302-DQB10304 DQA10303-DQB10301 DQA10303-DQB10302 DQA10303-DQB10303 DQA10303-DQB10304 DQA10401-DQB10301 DQA10401-DQB10319 DQA10401-DQB10402 DQA10402-DQB10402 DQA10501-DQB10201 DQA10501-DQB10203 DQA10501-DQB10301 DQA10501-DQB10319 DQA10503-DQB10301 DQA10505-DQB10201 DQA10505-DQB10202 DQA10505-DQB10301 DQA10505-DQB10302 DQA10505-DQB10309 DQA10505-DQB10319 DQA10505-DQB10402 DQA10506-DQB10303 DQA10508-DQB10301 DQA10509-DQB10301 DQA10601-DQB10301
VTDSQYALGIIQAQPD

SEQ ID NO: 5925 - protein, 17 aa, Human immunodeficiency virus 1
  source 1..17: note = HLAs: DRB1_0101 DRB1_0405 DRB1_0408 DRB1_0410 DRB1_1001 DPA10301-DPB10101 DPA10401-DPB10101 DQA10101-DQB10601 DQA10102-DQB10501 DQA10102-DQB10503 DQA10102-DQB10601 DQA10102-DQB10602 DQA10102-DQB10609 DQA10102-DQB10610 DQA10102-DQB10611 DQA10103-DQB10501 DQA10103-DQB10601 DQA10103-DQB10602 DQA10103-DQB10609 DQA10201-DQB10301 DQA10201-DQB10302 DQA10201-DQB10303 DQA10301-DQB10301 DQA10301-DQB10304 DQA10302-DQB10301 DQA10302-DQB10304 DQA10303-DQB10301 DQA10303-DQB10304 DQA10401-DQB10301 DQA10401-DQB10319 DQA10501-DQB10301 DQA10501-DQB10319 DQA10503-DQB10301 DQA10505-DQB10301 DQA10505-DQB10302 DQA10505-DQB10309 DQA10505-DQB10319 DQA10506-DQB10303 DQA10508-DQB10301 DQA10509-DQB10301 DQA10601-DQB10301
VTDSQYALGIIQAQPDK

SEQ ID NO: 5926 - protein, 18 aa, Human immunodeficiency virus 1
  source 1..18: note = HLAs: DRB1_1001 DQA10102-DQB10501 DQA10102-DQB10503 DQA10102-DQB10601 DQA10102-DQB10602 DQA10102-DQB10609 DQA10102-DQB10611 DQA10103-DQB10601 DQA10201-DQB10301 DQA10301-DQB10301 DQA10301-DQB10304 DQA10302-DQB10301 DQA10302-DQB10304 DQA10303-DQB10301 DQA10303-DQB10304 DQA10401-DQB10301 DQA10401-DQB10319 DQA10501-DQB10301 DQA10501-DQB10319 DQA10503-DQB10301 DQA10505-DQB10301 DQA10505-DQB10302 DQA10505-DQB10309 DQA10505-DQB10319 DQA10508-DQB10301 DQA10509-DQB10301 DQA10601-DQB10301
VTDSQYALGIIQAQPDKS

SEQ ID NO: 5927 - protein, 19 aa, Human immunodeficiency virus 1
  source 1..19: note = HLAs: DRB1_0101 DRB1_0405 DRB1_0408 DRB1_0410 DRB1_1001 DPA10301-DPB10101 DPA10401-DPB10101 DQA10101-DQB10601 DQA10102-DQB10501 DQA10102-DQB10503 DQA10102-DQB10601 DQA10102-DQB10602 DQA10102-DQB10609 DQA10102-DQB10610 DQA10102-DQB10611 DQA10103-DQB10501 DQA10103-DQB10601 DQA10103-DQB10602 DQA10103-DQB10609 DQA10201-DQB10301 DQA10201-DQB10302 DQA10201-DQB10303 DQA10301-DQB10301 DQA10301-DQB10304 DQA10302-DQB10301 DQA10302-DQB10304 DQA10303-DQB10301 DQA10303-DQB10304 DQA10401-DQB10301 DQA10401-DQB10319 DQA10501-DQB10301 DQA10501-DQB10319 DQA10503-DQB10301 DQA10505-DQB10301 DQA10505-DQB10302 DQA10505-DQB10309 DQA10505-DQB10319 DQA10506-DQB10303 DQA10508-DQB10301 DQA10509-DQB10301 DQA10601-DQB10301
VTDSQYALGIIQAQPDKSE

SEQ ID NO: 5928 - protein, 20 aa, Human immunodeficiency virus 1
  source 1..20: note = HLAs: DRB1_0101 DRB1_0102 DRB1_0401 DRB1_0404 DRB1_0405 DRB1_0408 DRB1_0410 DRB1_0813 DRB1_0901 DRB1_1001 DPA10103-DPB11501 DPA10103-DPB15001 DPA10104-DPB11501 DPA10105-DPB15001 DPA10202-DPB10101 DPA10301-DPB10101 DPA10301-DPB10201 DPA10301-DPB10202 DPA10301-DPB110601 DPA10301-DPB11801 DPA10301-DPB16501 DPA10401-DPB10101 DPA10401-DPB10301 DPA10401-DPB10501 DQA10101-DQB10601 DQA10102-DQB10501 DQA10102-DQB10503 DQA10102-DQB10601 DQA10102-DQB10602 DQA10102-DQB10604 DQA10102-DQB10609 DQA10102-DQB10610 DQA10102-DQB10611 DQA10103-DQB10501 DQA10103-DQB10503 DQA10103-DQB10601 DQA10103-DQB10602 DQA10103-DQB10609 DQA10201-DQB10301 DQA10201-DQB10303 DQA10301-DQB10301 DQA10301-DQB10304 DQA10302-DQB10301 DQA10302-DQB10304 DQA10303-DQB10301 DQA10303-DQB10304 DQA10401-DQB10301 DQA10401-DQB10319 DQA10501-DQB10301 DQA10501-DQB10319 DQA10503-DQB10301 DQA10505-DQB10301 DQA10505-DQB10302 DQA10505-DQB10309 DQA10505-DQB10319 DQA10505-DQB10402 DQA10506-DQB10303 DQA10508-DQB10301 DQA10509-DQB10301; note = HLAs: DQA10601-DQB10301
VTDSQYALGIIQAQPDKSES

SEQ ID NO: 5929 - protein, 21 aa, Human immunodeficiency virus 1
  source 1..21: note = HLAs: DRB1_0101 DRB1_0401 DRB1_0404 DRB1_0405 DRB1_0408 DRB1_0410 DRB1_1001 DPA10301-DPB10101 DPA10401-DPB10101 DQA10102-DQB10501 DQA10102-DQB10503 DQA10102-DQB10601 DQA10102-DQB10602 DQA10102-DQB10609 DQA10102-DQB10611 DQA10103-DQB10501 DQA10103-DQB10601 DQA10103-DQB10609 DQA10201-DQB10301 DQA10201-DQB10303 DQA10301-DQB10301 DQA10302-DQB10301 DQA10303-DQB10301 DQA10401-DQB10301 DQA10401-DQB10319 DQA10501-DQB10301 DQA10501-DQB10319 DQA10503-DQB10301 DQA10505-DQB10301 DQA10505-DQB10309 DQA10505-DQB10319 DQA10506-DQB10303 DQA10508-DQB10301 DQA10509-DQB10301 DQA10601-DQB10301
VTDSQYALGIIQAQPDKSESE

SEQ ID NO: 5930 - protein, 22 aa, Human immunodeficiency virus 1
  source 1..22: note = HLAs: DRB1_0101 DRB1_0401 DRB1_0404 DRB1_0405 DRB1_0408 DRB1_0410 DRB1_1001 DPA10301-DPB10101 DPA10301-DPB16501 DPA10401-DPB10101 DQA10102-DQB10501 DQA10102-DQB10503 DQA10102-DQB10601 DQA10102-DQB10602 DQA10102-DQB10609 DQA10102-DQB10611 DQA10103-DQB10501 DQA10103-DQB10601 DQA10103-DQB10609 DQA10201-DQB10301 DQA10201-DQB10303 DQA10301-DQB10301 DQA10302-DQB10301 DQA10303-DQB10301 DQA10401-DQB10301 DQA10401-DQB10319 DQA10501-DQB10301 DQA10501-DQB10319 DQA10503-DQB10301 DQA10505-DQB10301 DQA10505-DQB10309 DQA10505-DQB10319 DQA10506-DQB10303 DQA10508-DQB10301 DQA10509-DQB10301 DQA10601-DQB10301
VTDSQYALGIIQAQPDKSESEL

SEQ ID NO: 5931 - protein, 23 aa, Human immunodeficiency virus 1
  source 1..23: note = HLAs: DRB1_0101 DRB1_0401 DRB1_0404 DRB1_0405 DRB1_0408 DRB1_0410 DRB1_1001 DPA10301-DPB10101 DPA10301-DPB16501 DPA10401-DPB10101 DQA10102-DQB10501 DQA10102-DQB10503 DQA10102-DQB10601 DQA10102-DQB10602 DQA10102-DQB10609 DQA10102-DQB10611 DQA10103-DQB10501 DQA10103-DQB10601 DQA10103-DQB10609 DQA10201-DQB10301 DQA10201-DQB10303 DQA10301-DQB10301 DQA10302-DQB10301 DQA10303-DQB10301 DQA10401-DQB10301 DQA10401-DQB10319 DQA10501-DQB10301 DQA10501-DQB10319 DQA10503-DQB10301 DQA10505-DQB10301 DQA10505-DQB10309 DQA10505-DQB10319 DQA10506-DQB10303 DQA10508-DQB10301 DQA10509-DQB10301 DQA10601-DQB10301
VTDSQYALGIIQAQPDKSESELV

SEQ ID NO: 5932 - protein, 13 aa, Human immunodeficiency virus 1
  source 1..13: note = HLAs: DQA10102-DQB10501 DQA10501-DQB10201 DQA10505-DQB10201 DQA10505-DQB10202
VTVLDVGDAYFSV

SEQ ID NO: 5933 - protein, 14 aa, Human immunodeficiency virus 1
  source 1..14: note = HLAs: DQA10102-DQB10501 DQA10102-DQB10609 DQA10201-DQB10301 DQA10501-DQB10201 DQA10505-DQB10201 DQA10505-DQB10202
VTVLDVGDAYFSVP

SEQ ID NO: 5934 - protein, 15 aa, Human immunodeficiency virus 1
  source 1..15: note = HLAs: DRB1_0101 DRB1_1001 DPA10301-DPB10101 DPA10301-DPB10201 DPA10301-DPB10202 DPA10401-DPB10101 DQA10102-DQB10501 DQA10102-DQB10503 DQA10102-DQB10604 DQA10102-DQB10609 DQA10103-DQB10501 DQA10103-DQB10609 DQA10201-DQB10301 DQA10501-DQB10201 DQA10501-DQB10301 DQA10501-DQB10319 DQA10503-DQB10301 DQA10505-DQB10201 DQA10505-DQB10202 DQA10505-DQB10301 DQA10505-DQB10309 DQA10505-DQB10319 DQA10508-DQB10301 DQA10509-DQB10301
VTVLDVGDAYFSVPL

SEQ ID NO: 5935 - protein, 16 aa, Human immunodeficiency virus 1
  source 1..16: note = HLAs: DPA10301-DPB10101 DPA10301-DPB10202 DQA10101-DQB10501 DQA10102-DQB10501 DQA10102-DQB10502 DQA10102-DQB10503 DQA10102-DQB10604 DQA10102-DQB10609 DQA10103-DQB10501 DQA10103-DQB10609 DQA10104-DQB10501 DQA10105-DQB10501 DQA10201-DQB10301 DQA10301-DQB10305 DQA10501-DQB10201 DQA10501-DQB10301 DQA10501-DQB10319 DQA10503-DQB10301 DQA10505-DQB10201 DQA10505-DQB10202 DQA10505-DQB10301 DQA10505-DQB10309 DQA10505-DQB10319 DQA10508-DQB10301 DQA10509-DQB10301
VTVLDVGDAYFSVPLD

SEQ ID NO: 5936 - protein, 17 aa, Human immunodeficiency virus 1
  source 1..17: note = HLAs: DPA10301-DPB10101 DPA10401-DPB10101 DQA10101-DQB10501 DQA10102-DQB10501 DQA10102-DQB10502 DQA10102-DQB10503 DQA10102-DQB10604 DQA10102-DQB10609 DQA10103-DQB10501 DQA10104-DQB10501 DQA10105-DQB10501 DQA10201-DQB10301
VTVLDVGDAYFSVPLDK

SEQ ID NO: 5937 - protein, 15 aa, Human immunodeficiency virus 1
  source 1..15: note = HLAs: DRB1_0101 DRB1_0701 DRB1_0901 DRB1_1001 DPA10103-DPB10101 DPA10103-DPB11501 DPA10104-DPB10101 DPA10104-DPB11501 DPA10105-DPB10101 DPA10202-DPB10101 DPA10301-DPB10101 DPA10301-DPB10201 DPA10301-DPB10202 DPA10301-DPB10401 DPA10301-DPB110601 DPA10301-DPB11801 DPA10301-DPB12301 DPA10301-DPB13901 DPA10301-DPB14001 DPA10301-DPB16501 DPA10401-DPB10101 DQA10102-DQB10501 DQA10102-DQB10503 DQA10501-DQB10201 DQA10505-DQB10201 DQA10505-DQB10202 DQA10505-DQB10402
VVEEKAFSPEVIPMF

SEQ ID NO: 5938 - protein, 14 aa, Human immunodeficiency virus 1
  source 1..14: note = HLAs: DRB1_1104
VVESMNKELKKIIG

SEQ ID NO: 5939 - protein, 15 aa, Human immunodeficiency virus 1
  source 1..15: note = HLAs: DRB1_0804 DRB1_0806 DRB1_1101 DRB1_1102 DRB1_1103 DRB1_1104 DRB1_1301 DRB1_1304 DRB1_1305 DRB1_1406
VVESMNKELKKIIGQ

SEQ ID NO: 5940 - protein, 16 aa, Human immunodeficiency virus 1
  source 1..16: note = HLAs: DRB1_1103 DRB1_1104 DRB1_1304
VVESMNKELKKIIGQV

SEQ ID NO: 5941 - protein, 17 aa, Human immunodeficiency virus 1
  source 1..17: note = HLAs: DRB1_0804 DRB1_0806 DRB1_1101 DRB1_1102 DRB1_1103 DRB1_1104 DRB1_1301 DRB1_1304 DRB1_1305 DRB1_1406
VVESMNKELKKIIGQVR

SEQ ID NO: 5942 - protein, 15 aa, Human immunodeficiency virus 1
  source 1..15: note = HLAs: DRB1_0806 DRB1_1102 DRB1_1103 DRB1_1104 DRB1_1301 DRB1_1304 DPA10103-DPB15001 DPA10105-DPB15001 DPA10401-DPB10301
VVPRRKAKIIRDYGK

SEQ ID NO: 5943 - protein, 16 aa, Human immunodeficiency virus 1
  source 1..16: note = HLAs: DRB1_1103 DPA10401-DPB10301
VVPRRKAKIIRDYGKQ

SEQ ID NO: 5944 - protein, 17 aa, Human immunodeficiency virus 1
  source 1..17: note = HLAs: DRB1_0301 DRB1_1102 DRB1_1103 DRB1_1104 DRB1_1301 DRB1_1304 DPA10103-DPB15001 DPA10105-DPB15001
VVPRRKAKIIRDYGKQM

SEQ ID NO: 5945 - protein, 18 aa, Human immunodeficiency virus 1
  source 1..18: note = HLAs: DRB1_0301
VVPRRKAKIIRDYGKQMA

SEQ ID NO: 5946 - protein, 19 aa, Human immunodeficiency virus 1
  source 1..19: note = HLAs: DRB1_0301 DRB1_0806 DRB1_1102 DRB1_1103 DRB1_1104 DRB1_1114 DRB1_1301 DRB1_1302 DRB1_1304 DRB1_1406 DPA10103-DPB15001 DPA10105-DPB15001 DQA10102-DQB10501
VVPRRKAKIIRDYGKQMAG

SEQ ID NO: 5947 - protein, 20 aa, Human immunodeficiency virus 1
  source 1..20: note = HLAs: DRB1_0301 DRB1_0804 DRB1_0806 DRB1_1101 DRB1_1102 DRB1_1103 DRB1_1104 DRB1_1114 DRB1_1301 DRB1_1302 DRB1_1304 DRB1_1305 DRB1_1406 DRB1_1501 DRB1_1503 DPA10103-DPB10301 DPA10103-DPB10601 DPA10103-DPB112401 DPA10103-DPB12001 DPA10103-DPB15001 DPA10104-DPB10301 DPA10105-DPB10301 DPA10105-DPB15001 DPA10202-DPB110601 DPA10202-DPB11901 DPA10401-DPB10101 DPA10401-DPB10301 DPA10401-DPB10501 DPA10401-DPB11401 DQA10102-DQB10501
VVPRRKAKIIRDYGKQMAGD

SEQ ID NO: 5948 - protein, 21 aa, Human immunodeficiency virus 1
  source 1..21: note = HLAs: DRB1_0301 DRB1_0806 DRB1_1102 DRB1_1103 DRB1_1104 DRB1_1114 DRB1_1301 DRB1_1302 DRB1_1304 DRB1_1406 DPA10103-DPB15001 DPA10105-DPB15001
VVPRRKAKIIRDYGKQMAGDD

SEQ ID NO: 5949 - protein, 22 aa, Human immunodeficiency virus 1
  source 1..22: note = HLAs: DRB1_0301 DRB1_0806 DRB1_1102 DRB1_1103 DRB1_1104 DRB1_1114 DRB1_1301 DRB1_1302 DRB1_1304 DRB1_1406 DPA10103-DPB15001 DPA10105-DPB15001
VVPRRKAKIIRDYGKQMAGDDC

SEQ ID NO: 5950 - protein, 23 aa, Human immunodeficiency virus 1
  source 1..23: note = HLAs: DRB1_0301 DRB1_0806 DRB1_1102 DRB1_1103 DRB1_1104 DRB1_1114 DRB1_1301 DRB1_1302 DRB1_1304 DRB1_1406 DPA10103-DPB15001 DPA10105-DPB15001 DQA10102-DQB10501
VVPRRKAKIIRDYGKQMAGDDCV

SEQ ID NO: 5951 - protein, 24 aa, Human immunodeficiency virus 1
  source 1..24: note = HLAs: DRB1_0301 DRB1_0806 DRB1_1102 DRB1_1103 DRB1_1104 DRB1_1114 DRB1_1301 DRB1_1302 DRB1_1304 DRB1_1406 DRB1_1501 DPA10103-DPB15001 DPA10105-DPB15001 DQA10102-DQB10501
VVPRRKAKIIRDYGKQMAGDDCVA

SEQ ID NO: 5952 - protein, 13 aa, Human immunodeficiency virus 1
  source 1..13: note = HLAs: DRB1_0101 DRB1_1001 DRB1_1601 DQA10102-DQB10501
VYLSWVPAHKGIG

SEQ ID NO: 5953 - protein, 14 aa, Human immunodeficiency virus 1
  source 1..14: note = HLAs: DRB1_0101 DRB1_0102 DRB1_0801 DRB1_0802 DRB1_0804 DRB1_0806 DRB1_0809 DRB1_0901 DRB1_1001 DRB1_1101 DRB1_1103 DRB1_1104 DRB1_1305 DRB1_1501 DRB1_1601 DQA10102-DQB10501 DQA10102-DQB10601 DQA10103-DQB10501 DQA10103-DQB10601 DQA10201-DQB10301 DQA10505-DQB10402
VYLSWVPAHKGIGG

SEQ ID NO: 5954 - protein, 15 aa, Human immunodeficiency virus 1
  source 1..15: note = HLAs: DRB1_0101 DRB1_0102 DRB1_0103 DRB1_0401 DRB1_0404 DRB1_0405 DRB1_0408 DRB1_0410 DRB1_0701 DRB1_0801 DRB1_0802 DRB1_0804 DRB1_0806 DRB1_0809 DRB1_0813 DRB1_0901 DRB1_1001 DRB1_1101 DRB1_1102 DRB1_1103 DRB1_1104 DRB1_1301 DRB1_1304 DRB1_1305 DRB1_1406 DRB1_1501 DRB1_1503 DRB1_1601 DRB1_1602 DPA10103-DPB15001 DPA10105-DPB15001 DQA10102-DQB10501 DQA10102-DQB10601 DQA10103-DQB10501 DQA10103-DQB10601 DQA10201-DQB10301 DQA10505-DQB10402
VYLSWVPAHKGIGGN

SEQ ID NO: 5955 - protein, 16 aa, Human immunodeficiency virus 1
  source 1..16: note = HLAs: DRB1_0101 DRB1_0102 DRB1_0404 DRB1_0410 DRB1_0701 DRB1_0801 DRB1_0802 DRB1_0804 DRB1_0806 DRB1_0809 DRB1_0901 DRB1_1001 DRB1_1101 DRB1_1102 DRB1_1103 DRB1_1104 DRB1_1301 DRB1_1304 DRB1_1305 DRB1_1406 DRB1_1501 DRB1_1601 DRB1_1602 DQA10102-DQB10501 DQA10102-DQB10601 DQA10103-DQB10501 DQA10103-DQB10601 DQA10201-DQB10301 DQA10505-DQB10402
VYLSWVPAHKGIGGNE

SEQ ID NO: 5956 - protein, 17 aa, Human immunodeficiency virus 1
  source 1..17: note = HLAs: DRB1_0101 DRB1_0102 DRB1_0404 DRB1_0410 DRB1_0701 DRB1_0801 DRB1_0802 DRB1_0804 DRB1_0806 DRB1_0809 DRB1_0901 DRB1_1001 DRB1_1101 DRB1_1102 DRB1_1103 DRB1_1104 DRB1_1301 DRB1_1304 DRB1_1305 DRB1_1406 DRB1_1501 DRB1_1601 DRB1_1602 DQA10102-DQB10501 DQA10102-DQB10601 DQA10103-DQB10501 DQA10103-DQB10601 DQA10201-DQB10301 DQA10505-DQB10402
VYLSWVPAHKGIGGNEQ

SEQ ID NO: 5957 - protein, 18 aa, Human immunodeficiency virus 1
  source 1..18: note = HLAs: DRB1_1001 DRB1_1101 DRB1_1305
VYLSWVPAHKGIGGNEQV

SEQ ID NO: 5958 - protein, 19 aa, Human immunodeficiency virus 1
  source 1..19: note = HLAs: DRB1_0101 DRB1_0801 DRB1_0802 DRB1_0804 DRB1_0806 DRB1_0809 DRB1_1001 DRB1_1101 DRB1_1103 DRB1_1104 DRB1_1305 DRB1_1601 DQA10102-DQB10501 DQA10103-DQB10601 DQA10505-DQB10402
VYLSWVPAHKGIGGNEQVD

SEQ ID NO: 5959 - protein, 20 aa, Human immunodeficiency virus 1
  source 1..20: note = HLAs: DRB1_0101 DRB1_0102 DRB1_0410 DRB1_0701 DRB1_0801 DRB1_0802 DRB1_0804 DRB1_0806 DRB1_0809 DRB1_0901 DRB1_1001 DRB1_1101 DRB1_1102 DRB1_1103 DRB1_1104 DRB1_1301 DRB1_1304 DRB1_1305 DRB1_1501 DRB1_1601 DRB1_1602 DPA10103-DPB15001 DPA10105-DPB15001 DQA10102-DQB10501 DQA10102-DQB10601 DQA10103-DQB10501 DQA10103-DQB10601 DQA10505-DQB10402
VYLSWVPAHKGIGGNEQVDK

SEQ ID NO: 5960 - protein, 21 aa, Human immunodeficiency virus 1
  source 1..21: note = HLAs: DRB1_0101 DRB1_0801 DRB1_0802 DRB1_0804 DRB1_0806 DRB1_0809 DRB1_1001 DRB1_1101 DRB1_1102 DRB1_1103 DRB1_1104 DRB1_1301 DRB1_1304 DRB1_1305 DRB1_1601 DQA10102-DQB10501
VYLSWVPAHKGIGGNEQVDKL

SEQ ID NO: 5961 - protein, 22 aa, Human immunodeficiency virus 1
  source 1..22: note = HLAs: DRB1_0101 DRB1_0801 DRB1_0802 DRB1_0804 DRB1_0806 DRB1_0809 DRB1_1001 DRB1_1101 DRB1_1102 DRB1_1103 DRB1_1104 DRB1_1301 DRB1_1304 DRB1_1305 DRB1_1601 DQA10102-DQB10501
VYLSWVPAHKGIGGNEQVDKLV

SEQ ID NO: 5962 - protein, 23 aa, Human immunodeficiency virus 1
  source 1..23: note = HLAs: DRB1_0101 DRB1_0801 DRB1_0802 DRB1_0804 DRB1_0806 DRB1_0809 DRB1_1001 DRB1_1101 DRB1_1102 DRB1_1103 DRB1_1104 DRB1_1301 DRB1_1304 DRB1_1305 DRB1_1601 DQA10102-DQB10501
VYLSWVPAHKGIGGNEQVDKLVS

SEQ ID NO: 5963 - protein, 24 aa, Human immunodeficiency virus 1
  source 1..24: note = HLAs: DRB1_0101 DRB1_0801 DRB1_0802 DRB1_0804 DRB1_0806 DRB1_0809 DRB1_1001 DRB1_1101 DRB1_1102 DRB1_1103 DRB1_1104 DRB1_1301 DRB1_1304 DRB1_1305 DRB1_1601 DQA10102-DQB10501
VYLSWVPAHKGIGGNEQVDKLVSS

SEQ ID NO: 5964 - protein, 25 aa, Human immunodeficiency virus 1
  source 1..25: note = HLAs: DRB1_0101 DRB1_0801 DRB1_0802 DRB1_0804 DRB1_0806 DRB1_0809 DRB1_1001 DRB1_1101 DRB1_1102 DRB1_1103 DRB1_1104 DRB1_1301 DRB1_1304 DRB1_1305 DRB1_1601 DQA10102-DQB10501
VYLSWVPAHKGIGGNEQVDKLVSSG

SEQ ID NO: 5965 - protein, 13 aa, Human immunodeficiency virus 1
  source 1..13: note = HLAs: DRB1_1001
WEFVNTPPLVKLW

SEQ ID NO: 5966 - protein, 14 aa, Human immunodeficiency virus 1
  source 1..14: note = HLAs: DRB1_0101 DRB1_0701 DRB1_0901 DRB1_1001 DRB1_1602 DPA10103-DPB10101 DPA10103-DPB11501 DPA10103-DPB13101 DPA10103-DPB15001 DPA10104-DPB10101 DPA10104-DPB11501 DPA10105-DPB10101 DPA10105-DPB15001 DPA10202-DPB10101 DPA10202-DPB110601 DPA10202-DPB11901 DPA10202-DPB13101 DPA10301-DPB10101 DPA10301-DPB10201 DPA10301-DPB10202 DPA10301-DPB10401 DPA10301-DPB10402 DPA10301-DPB110501 DPA10301-DPB110601 DPA10301-DPB11801 DPA10301-DPB12301 DPA10301-DPB13901 DPA10301-DPB14001 DPA10301-DPB14901 DPA10301-DPB16501 DPA10301-DPB18001 DPA10401-DPB10101 DPA10401-DPB10201 DQA10102-DQB10501
WEFVNTPPLVKLWY

SEQ ID NO: 5967 - protein, 15 aa, Human immunodeficiency virus 1
  source 1..15: note = HLAs: DRB1_0101 DRB1_0102 DRB1_0401 DRB1_0404 DRB1_0405 DRB1_0408 DRB1_0410 DRB1_0701 DRB1_0801 DRB1_0802 DRB1_0804 DRB1_0806 DRB1_0809 DRB1_0813 DRB1_0901 DRB1_1001 DRB1_1101 DRB1_1102 DRB1_1103 DRB1_1104 DRB1_1114 DRB1_1301 DRB1_1302 DRB1_1303 DRB1_1304 DRB1_1305 DRB1_1312 DRB1_1402 DRB1_1406 DRB1_1601 DRB1_1602 DPA10103-DPB10101 DPA10103-DPB10201 DPA10103-DPB11501 DPA10103-DPB13101 DPA10103-DPB13401 DPA10103-DPB14801 DPA10103-DPB15001 DPA10104-DPB10101 DPA10104-DPB11501 DPA10105-DPB10101 DPA10105-DPB15001 DPA10106-DPB10101 DPA10201-DPB10101 DPA10201-DPB11501 DPA10202-DPB10101 DPA10202-DPB10201 DPA10202-DPB10202 DPA10202-DPB10501 DPA10202-DPB110601 DPA10202-DPB11801 DPA10202-DPB11901 DPA10202-DPB13101 DPA10202-DPB13801 DPA10202-DPB16501 DPA10301-DPB10101 DPA10301-DPB10201 DPA10301-DPB10202 DPA10301-DPB10401 DPA10301-DPB10402 DPA10301-DPB110501 DPA10301-DPB110601 DPA10301-DPB11801 DPA10301-DPB12301 DPA10301-DPB13901 DPA10301-DPB14001 DPA10301-DPB14901 DPA10301-DPB16501; note = HLAs: DPA10301-DPB17501 DPA10301-DPB18001 DPA10401-DPB10101 DPA10401-DPB10201 DPA10401-DPB10202 DPA10401-DPB10501 DQA10102-DQB10501
WEFVNTPPLVKLWYQ

SEQ ID NO: 5968 - protein, 16 aa, Human immunodeficiency virus 1
  source 1..16: note = HLAs: DRB1_0101 DRB1_0701 DRB1_0901 DRB1_1001 DRB1_1101 DRB1_1114 DRB1_1302 DRB1_1304 DRB1_1305 DRB1_1602 DPA10103-DPB10101 DPA10103-DPB11501 DPA10103-DPB13101 DPA10103-DPB15001 DPA10104-DPB10101 DPA10104-DPB11501 DPA10105-DPB10101 DPA10105-DPB15001 DPA10201-DPB11501 DPA10202-DPB10101 DPA10202-DPB10501 DPA10202-DPB110601 DPA10202-DPB11901 DPA10202-DPB13101 DPA10202-DPB13801 DPA10301-DPB10101 DPA10301-DPB10201 DPA10301-DPB10202 DPA10301-DPB10401 DPA10301-DPB10402 DPA10301-DPB110501 DPA10301-DPB110601 DPA10301-DPB11801 DPA10301-DPB12301 DPA10301-DPB13901 DPA10301-DPB14001 DPA10301-DPB14901 DPA10301-DPB16501 DPA10301-DPB18001 DPA10401-DPB10101 DPA10401-DPB10201 DPA10401-DPB10202 DPA10401-DPB10501 DPA10401-DPB11401 DQA10102-DQB10501
WEFVNTPPLVKLWYQL

SEQ ID NO: 5969 - protein, 17 aa, Human immunodeficiency virus 1
  source 1..17: note = HLAs: DRB1_0101 DRB1_0405 DRB1_0701 DRB1_0901 DRB1_1001 DRB1_1101 DRB1_1102 DRB1_1301 DRB1_1304 DRB1_1305 DRB1_1406 DRB1_1602 DPA10103-DPB10101 DPA10103-DPB10201 DPA10103-DPB10202 DPA10103-DPB11501 DPA10103-DPB11601 DPA10103-DPB13101 DPA10103-DPB13401 DPA10103-DPB14001 DPA10103-DPB14101 DPA10103-DPB14801 DPA10103-DPB15001 DPA10104-DPB10101 DPA10104-DPB11501 DPA10105-DPB10101 DPA10105-DPB15001 DPA10106-DPB10101 DPA10201-DPB10101 DPA10201-DPB11501 DPA10202-DPB10101 DPA10202-DPB10201 DPA10202-DPB10202 DPA10202-DPB10501 DPA10202-DPB110601 DPA10202-DPB11801 DPA10202-DPB11901 DPA10202-DPB13101 DPA10202-DPB13801 DPA10202-DPB16501 DPA10301-DPB10101 DPA10301-DPB10201 DPA10301-DPB10202 DPA10301-DPB10401 DPA10301-DPB10402 DPA10301-DPB110501 DPA10301-DPB110601 DPA10301-DPB11801 DPA10301-DPB12301 DPA10301-DPB13901 DPA10301-DPB14001 DPA10301-DPB14901 DPA10301-DPB16501 DPA10301-DPB17501 DPA10301-DPB18001 DPA10401-DPB10101 DPA10401-DPB10201 DPA10401-DPB10202 DPA10401-DPB10501 DQA10102-DQB10501
WEFVNTPPLVKLWYQLE

SEQ ID NO: 5970 - protein, 13 aa, Human immunodeficiency virus 1
  source 1..13: note = HLAs: DQA10102-DQB10601 DQA10103-DQB10601 DQA10201-DQB10301 DQA10301-DQB10301 DQA10302-DQB10301 DQA10303-DQB10301 DQA10401-DQB10301 DQA10401-DQB10319 DQA10501-DQB10301 DQA10501-DQB10319 DQA10503-DQB10301 DQA10505-DQB10301 DQA10505-DQB10309 DQA10505-DQB10319 DQA10506-DQB10303 DQA10508-DQB10301 DQA10509-DQB10301 DQA10601-DQB10301
WEVQLGIPHPAGL

SEQ ID NO: 5971 - protein, 14 aa, Human immunodeficiency virus 1
  source 1..14: note = HLAs: DRB1_0101 DRB1_1001 DQA10102-DQB10601 DQA10103-DQB10601 DQA10201-DQB10301 DQA10201-DQB10303 DQA10301-DQB10301 DQA10302-DQB10301 DQA10303-DQB10301 DQA10401-DQB10301 DQA10401-DQB10319 DQA10501-DQB10301 DQA10501-DQB10319 DQA10503-DQB10301 DQA10505-DQB10301 DQA10505-DQB10309 DQA10505-DQB10319 DQA10505-DQB10402 DQA10506-DQB10303 DQA10508-DQB10301 DQA10509-DQB10301 DQA10601-DQB10301
WEVQLGIPHPAGLK

SEQ ID NO: 5972 - protein, 15 aa, Human immunodeficiency virus 1
  source 1..15: note = HLAs: DRB1_0101 DRB1_0102 DRB1_0901 DRB1_1001 DRB1_1102 DRB1_1301 DQA10102-DQB10501 DQA10102-DQB10601 DQA10103-DQB10601 DQA10103-DQB10602 DQA10201-DQB10301 DQA10201-DQB10303 DQA10301-DQB10301 DQA10302-DQB10301 DQA10303-DQB10301 DQA10401-DQB10301 DQA10401-DQB10319 DQA10501-DQB10301 DQA10501-DQB10319 DQA10503-DQB10301 DQA10505-DQB10301 DQA10505-DQB10309 DQA10505-DQB10319 DQA10505-DQB10402 DQA10506-DQB10303 DQA10508-DQB10301 DQA10509-DQB10301 DQA10601-DQB10301
WEVQLGIPHPAGLKK

SEQ ID NO: 5973 - protein, 16 aa, Human immunodeficiency virus 1
  source 1..16: note = HLAs: DRB1_0101 DRB1_0102 DRB1_1001 DQA10102-DQB10501 DQA10102-DQB10601 DQA10103-DQB10601 DQA10201-DQB10301 DQA10201-DQB10303 DQA10301-DQB10301 DQA10302-DQB10301 DQA10303-DQB10301 DQA10401-DQB10301 DQA10401-DQB10319 DQA10501-DQB10301 DQA10501-DQB10319 DQA10503-DQB10301 DQA10505-DQB10301 DQA10505-DQB10309 DQA10505-DQB10319 DQA10505-DQB10402 DQA10506-DQB10303 DQA10508-DQB10301 DQA10509-DQB10301 DQA10601-DQB10301
WEVQLGIPHPAGLKKK

SEQ ID NO: 5974 - protein, 17 aa, Human immunodeficiency virus 1
  source 1..17: note = HLAs: DRB1_0101 DRB1_0102 DRB1_1001 DQA10102-DQB10601 DQA10103-DQB10601 DQA10201-DQB10301 DQA10201-DQB10303 DQA10301-DQB10301 DQA10302-DQB10301 DQA10303-DQB10301 DQA10401-DQB10301 DQA10401-DQB10319 DQA10501-DQB10301 DQA10501-DQB10319 DQA10503-DQB10301 DQA10505-DQB10301 DQA10505-DQB10309 DQA10505-DQB10319 DQA10505-DQB10402 DQA10506-DQB10303 DQA10508-DQB10301 DQA10509-DQB10301 DQA10601-DQB10301
WEVQLGIPHPAGLKKKK

SEQ ID NO: 5975 - protein, 18 aa, Human immunodeficiency virus 1
  source 1..18: note = HLAs: DQA10102-DQB10601 DQA10103-DQB10601 DQA10201-DQB10301 DQA10301-DQB10301 DQA10302-DQB10301 DQA10303-DQB10301 DQA10501-DQB10301 DQA10501-DQB10319 DQA10503-DQB10301 DQA10505-DQB10301 DQA10505-DQB10309 DQA10505-DQB10319 DQA10508-DQB10301 DQA10509-DQB10301 DQA10601-DQB10301
WEVQLGIPHPAGLKKKKS

SEQ ID NO: 5976 - protein, 19 aa, Human immunodeficiency virus 1
  source 1..19: note = HLAs: DRB1_0101 DQA10102-DQB10601 DQA10103-DQB10601 DQA10201-DQB10301 DQA10301-DQB10301 DQA10302-DQB10301 DQA10303-DQB10301 DQA10501-DQB10301 DQA10501-DQB10319 DQA10503-DQB10301 DQA10505-DQB10301 DQA10505-DQB10309 DQA10505-DQB10319 DQA10506-DQB10303 DQA10508-DQB10301 DQA10509-DQB10301 DQA10601-DQB10301
WEVQLGIPHPAGLKKKKSV

SEQ ID NO: 5977 - protein, 20 aa, Human immunodeficiency virus 1
  source 1..20: note = HLAs: DRB1_0101 DRB1_1001 DQA10102-DQB10501 DQA10102-DQB10601 DQA10103-DQB10601 DQA10201-DQB10301 DQA10201-DQB10303 DQA10301-DQB10301 DQA10302-DQB10301 DQA10303-DQB10301 DQA10501-DQB10301 DQA10501-DQB10319 DQA10503-DQB10301 DQA10505-DQB10301 DQA10505-DQB10309 DQA10505-DQB10319 DQA10505-DQB10402 DQA10506-DQB10303 DQA10508-DQB10301 DQA10509-DQB10301 DQA10601-DQB10301
WEVQLGIPHPAGLKKKKSVT

SEQ ID NO: 5978 - protein, 21 aa, Human immunodeficiency virus 1
  source 1..21: note = HLAs: DRB1_0101 DQA10102-DQB10601 DQA10103-DQB10601 DQA10201-DQB10301 DQA10301-DQB10301 DQA10302-DQB10301 DQA10303-DQB10301 DQA10501-DQB10301 DQA10501-DQB10319 DQA10503-DQB10301 DQA10505-DQB10301 DQA10505-DQB10309 DQA10505-DQB10319 DQA10508-DQB10301 DQA10509-DQB10301 DQA10601-DQB10301
WEVQLGIPHPAGLKKKKSVTV

SEQ ID NO: 5979 - protein, 22 aa, Human immunodeficiency virus 1
  source 1..22: note = HLAs: DRB1_0101 DRB1_1102 DRB1_1103 DRB1_1104 DRB1_1301 DRB1_1304 DQA10102-DQB10601 DQA10103-DQB10601 DQA10201-DQB10301 DQA10301-DQB10301 DQA10302-DQB10301 DQA10303-DQB10301 DQA10501-DQB10301 DQA10501-DQB10319 DQA10503-DQB10301 DQA10505-DQB10301 DQA10505-DQB10309 DQA10505-DQB10319 DQA10508-DQB10301 DQA10509-DQB10301 DQA10601-DQB10301
WEVQLGIPHPAGLKKKKSVTVL

SEQ ID NO: 5980 - protein, 23 aa, Human immunodeficiency virus 1
  source 1..23: note = HLAs: DRB1_0101 DRB1_1102 DRB1_1103 DRB1_1104 DRB1_1301 DRB1_1304 DQA10102-DQB10601 DQA10103-DQB10601 DQA10201-DQB10301 DQA10301-DQB10301 DQA10302-DQB10301 DQA10303-DQB10301 DQA10501-DQB10301 DQA10501-DQB10319 DQA10503-DQB10301 DQA10505-DQB10301 DQA10505-DQB10309 DQA10505-DQB10319 DQA10508-DQB10301 DQA10509-DQB10301 DQA10601-DQB10301
WEVQLGIPHPAGLKKKKSVTVLD

SEQ ID NO: 5981 - protein, 24 aa, Human immunodeficiency virus 1
  source 1..24: note = HLAs: DRB1_0101 DRB1_0701 DRB1_0806 DRB1_1001 DRB1_1102 DRB1_1103 DRB1_1104 DRB1_1114 DRB1_1301 DRB1_1302 DRB1_1304 DRB1_1406 DPA10202-DPB10101 DPA10301-DPB10101 DPA10301-DPB10201 DPA10301-DPB10202 DPA10301-DPB110601 DPA10301-DPB11801 DPA10301-DPB16501 DPA10401-DPB10101 DQA10102-DQB10501 DQA10102-DQB10601 DQA10103-DQB10601 DQA10201-DQB10301 DQA10301-DQB10301 DQA10302-DQB10301 DQA10303-DQB10301 DQA10501-DQB10301 DQA10501-DQB10319 DQA10503-DQB10301 DQA10505-DQB10301 DQA10505-DQB10309 DQA10505-DQB10319 DQA10508-DQB10301 DQA10509-DQB10301 DQA10601-DQB10301
WEVQLGIPHPAGLKKKKSVTVLDV

SEQ ID NO: 5982 - protein, 25 aa, Human immunodeficiency virus 1
  source 1..25: note = HLAs: DRB1_0101 DRB1_0701 DRB1_0806 DRB1_1001 DRB1_1102 DRB1_1103 DRB1_1104 DRB1_1114 DRB1_1301 DRB1_1302 DRB1_1304 DRB1_1406 DPA10103-DPB10101 DPA10103-DPB15001 DPA10104-DPB10101 DPA10105-DPB10101 DPA10105-DPB15001 DPA10202-DPB10101 DPA10301-DPB10101 DPA10301-DPB10201 DPA10301-DPB10202 DPA10301-DPB110601 DPA10301-DPB11801 DPA10301-DPB16501 DPA10401-DPB10101 DPA10401-DPB10501 DQA10102-DQB10501 DQA10102-DQB10601 DQA10103-DQB10601 DQA10201-DQB10301 DQA10301-DQB10301 DQA10302-DQB10301 DQA10303-DQB10301 DQA10501-DQB10301 DQA10501-DQB10319 DQA10503-DQB10301 DQA10505-DQB10301 DQA10505-DQB10309 DQA10505-DQB10319 DQA10508-DQB10301 DQA10509-DQB10301 DQA10601-DQB10301
WEVQLGIPHPAGLKKKKSVTVLDVG

SEQ ID NO: 5983 - protein, 24 aa, Human immunodeficiency virus 1
  source 1..24: note = HLAs: DPA10103-DPB10101 DPA10103-DPB10201 DPA10103-DPB10202 DPA10103-DPB10401 DPA10103-DPB112601 DPA10103-DPB11501 DPA10103-DPB11601 DPA10103-DPB12301 DPA10103-DPB13101 DPA10103-DPB13401 DPA10103-DPB13901 DPA10103-DPB14801 DPA10104-DPB10101 DPA10104-DPB11501 DPA10105-DPB10101 DPA10105-DPB10401 DPA10106-DPB10101 DPA10201-DPB10101 DPA10202-DPB10101 DPA10301-DPB10101 DPA10301-DPB10201 DPA10301-DPB10202 DPA10301-DPB10401 DPA10301-DPB10402 DPA10301-DPB110501 DPA10301-DPB110601 DPA10301-DPB11801 DPA10301-DPB12301 DPA10301-DPB13901 DPA10301-DPB14001 DPA10301-DPB14901 DPA10301-DPB16501 DPA10301-DPB18001 DPA10401-DPB10101 DPA10401-DPB10201 DPA10401-DPB10202
WGFTTPDKKHQKEPPFLWMGYELH

SEQ ID NO: 5984 - protein, 25 aa, Human immunodeficiency virus 1
  source 1..25: note = HLAs: DRB1_1001 DPA10103-DPB10101 DPA10103-DPB10201 DPA10103-DPB10202 DPA10103-DPB10401 DPA10103-DPB112601 DPA10103-DPB11501 DPA10103-DPB11601 DPA10103-DPB11901 DPA10103-DPB12301 DPA10103-DPB13101 DPA10103-DPB13401 DPA10103-DPB13901 DPA10103-DPB14001 DPA10103-DPB14101 DPA10103-DPB14801 DPA10103-DPB15001 DPA10104-DPB10101 DPA10104-DPB11501 DPA10105-DPB10101 DPA10105-DPB10401 DPA10105-DPB15001 DPA10106-DPB10101 DPA10201-DPB10101 DPA10201-DPB11501 DPA10202-DPB10101 DPA10202-DPB13101 DPA10301-DPB10101 DPA10301-DPB10201 DPA10301-DPB10202 DPA10301-DPB10401 DPA10301-DPB10402 DPA10301-DPB110501 DPA10301-DPB110601 DPA10301-DPB11801 DPA10301-DPB12301 DPA10301-DPB13901 DPA10301-DPB14001 DPA10301-DPB14901 DPA10301-DPB16501 DPA10301-DPB18001 DPA10401-DPB10101 DPA10401-DPB10201 DPA10401-DPB10202 DPA10401-DPB10501 DQA10102-DQB10501
WGFTTPDKKHQKEPPFLWMGYELHP

SEQ ID NO: 5985 - protein, 13 aa, Human immunodeficiency virus 1
  source 1..13: note = HLAs: DRB1_0101 DRB1_0102 DRB1_0404 DRB1_0701 DRB1_0804 DRB1_0806 DRB1_0813 DRB1_0901 DRB1_1001 DRB1_1101 DRB1_1102 DRB1_1103 DRB1_1104 DRB1_1114 DRB1_1201 DRB1_1301 DRB1_1302 DRB1_1304 DRB1_1305 DRB1_1401 DRB1_1402 DRB1_1404 DRB1_1406 DRB1_1454 DRB1_1501 DRB1_1502 DRB1_1602 DPA10103-DPB11501 DPA10104-DPB11501 DPA10301-DPB10101 DPA10301-DPB10201 DPA10301-DPB10202 DPA10301-DPB10401 DPA10301-DPB110601 DPA10301-DPB11801 DPA10301-DPB12301 DPA10301-DPB13901 DPA10301-DPB14001 DPA10401-DPB10201 DQA10102-DQB10501 DQA10103-DQB10501
WIILGLNKIVRMY

SEQ ID NO: 5986 - protein, 14 aa, Human immunodeficiency virus 1
  source 1..14: note = HLAs: DRB1_0101 DRB1_0102 DRB1_0404 DRB1_0408 DRB1_0410 DRB1_0701 DRB1_0801 DRB1_0802 DRB1_0803 DRB1_0804 DRB1_0806 DRB1_0809 DRB1_0813 DRB1_0901 DRB1_1001 DRB1_1101 DRB1_1102 DRB1_1103 DRB1_1104 DRB1_1114 DRB1_1201 DRB1_1202 DRB1_1301 DRB1_1302 DRB1_1303 DRB1_1304 DRB1_1305 DRB1_1312 DRB1_1401 DRB1_1402 DRB1_1403 DRB1_1404 DRB1_1405 DRB1_1406 DRB1_1407 DRB1_1418 DRB1_1454 DRB1_1501 DRB1_1502 DRB1_1503 DRB1_1601 DRB1_1602 DPA10103-DPB11501 DPA10104-DPB11501 DPA10202-DPB10101 DPA10202-DPB10202 DPA10202-DPB10501 DPA10202-DPB110601 DPA10202-DPB11801 DPA10202-DPB11901 DPA10202-DPB13801 DPA10301-DPB10101 DPA10301-DPB10201 DPA10301-DPB10202 DPA10301-DPB10401 DPA10301-DPB10402 DPA10301-DPB110501 DPA10301-DPB110601 DPA10301-DPB11801 DPA10301-DPB12301 DPA10301-DPB13901 DPA10301-DPB14001 DPA10301-DPB14901 DPA10301-DPB16501 DPA10301-DPB18001 DPA10401-DPB10101 DPA10401-DPB10201 DPA10401-DPB10202 DQA10102-DQB10501 DQA10102-DQB10503 DQA10103-DQB10501 DQA10103-DQB10601 DQA10103-DQB10609
WIILGLNKIVRMYS

SEQ ID NO: 5987 - protein, 15 aa, Human immunodeficiency virus 1
  source 1..15: note = HLAs: DRB1_0101 DRB1_0102 DRB1_0103 DRB1_0301 DRB1_0401 DRB1_0402 DRB1_0404 DRB1_0408 DRB1_0410 DRB1_0701 DRB1_0801 DRB1_0802 DRB1_0803 DRB1_0804 DRB1_0806 DRB1_0809 DRB1_0813 DRB1_0901 DRB1_1001 DRB1_1101 DRB1_1102 DRB1_1103 DRB1_1104 DRB1_1114 DRB1_1201 DRB1_1202 DRB1_1301 DRB1_1302 DRB1_1303 DRB1_1304 DRB1_1305 DRB1_1312 DRB1_1401 DRB1_1402 DRB1_1403 DRB1_1404 DRB1_1405 DRB1_1406 DRB1_1407 DRB1_1418 DRB1_1454 DRB1_1501 DRB1_1502 DRB1_1503 DRB1_1601 DRB1_1602 DPA10103-DPB11501 DPA10103-DPB11801 DPA10103-DPB13401 DPA10103-DPB14001 DPA10103-DPB15001 DPA10104-DPB11501 DPA10105-DPB11801 DPA10105-DPB15001 DPA10201-DPB11501 DPA10202-DPB10101 DPA10202-DPB10201 DPA10202-DPB10202 DPA10202-DPB10501 DPA10202-DPB110601 DPA10202-DPB11801 DPA10202-DPB11901 DPA10202-DPB13101 DPA10202-DPB13801 DPA10202-DPB16501 DPA10301-DPB10101 DPA10301-DPB10201 DPA10301-DPB10202 DPA10301-DPB10401 DPA10301-DPB10402 DPA10301-DPB110501 DPA10301-DPB110601 DPA10301-DPB11801 DPA10301-DPB12301 DPA10301-DPB13901; note = HLAs: DPA10301-DPB14001 DPA10301-DPB14901 DPA10301-DPB16501 DPA10301-DPB17501 DPA10301-DPB18001 DPA10401-DPB10101 DPA10401-DPB10201 DPA10401-DPB10202 DPA10401-DPB10501 DQA10102-DQB10501 DQA10102-DQB10503 DQA10102-DQB10601 DQA10102-DQB10609 DQA10103-DQB10501 DQA10103-DQB10601 DQA10103-DQB10602 DQA10103-DQB10608 DQA10103-DQB10609 DQA10505-DQB10402
WIILGLNKIVRMYSP

SEQ ID NO: 5988 - protein, 16 aa, Human immunodeficiency virus 1
  source 1..16: note = HLAs: DRB1_0101 DRB1_0102 DRB1_0404 DRB1_0408 DRB1_0410 DRB1_0701 DRB1_0801 DRB1_0802 DRB1_0803 DRB1_0804 DRB1_0806 DRB1_0809 DRB1_0813 DRB1_0901 DRB1_1001 DRB1_1101 DRB1_1102 DRB1_1103 DRB1_1104 DRB1_1114 DRB1_1201 DRB1_1202 DRB1_1301 DRB1_1302 DRB1_1303 DRB1_1304 DRB1_1305 DRB1_1312 DRB1_1401 DRB1_1402 DRB1_1403 DRB1_1404 DRB1_1405 DRB1_1406 DRB1_1407 DRB1_1418 DRB1_1454 DRB1_1501 DRB1_1502 DRB1_1503 DRB1_1601 DRB1_1602 DPA10103-DPB11501 DPA10103-DPB11801 DPA10104-DPB11501 DPA10105-DPB11801 DPA10201-DPB11501 DPA10202-DPB10101 DPA10202-DPB10201 DPA10202-DPB10202 DPA10202-DPB10501 DPA10202-DPB110601 DPA10202-DPB11801 DPA10202-DPB11901 DPA10202-DPB13101 DPA10202-DPB13801 DPA10202-DPB16501 DPA10301-DPB10101 DPA10301-DPB10201 DPA10301-DPB10202 DPA10301-DPB10401 DPA10301-DPB10402 DPA10301-DPB110501 DPA10301-DPB110601 DPA10301-DPB11801 DPA10301-DPB12301 DPA10301-DPB13901 DPA10301-DPB14001 DPA10301-DPB14901 DPA10301-DPB16501 DPA10301-DPB17501 DPA10301-DPB18001 DPA10401-DPB10101; note = HLAs: DPA10401-DPB10201 DPA10401-DPB10202 DPA10401-DPB10501 DQA10102-DQB10501 DQA10102-DQB10503 DQA10102-DQB10601 DQA10102-DQB10602 DQA10102-DQB10609 DQA10102-DQB10611 DQA10103-DQB10501 DQA10103-DQB10503 DQA10103-DQB10601 DQA10103-DQB10602 DQA10103-DQB10608 DQA10103-DQB10609
WIILGLNKIVRMYSPV

SEQ ID NO: 5989 - protein, 17 aa, Human immunodeficiency virus 1
  source 1..17: note = HLAs: DRB1_0101 DRB1_0102 DRB1_0301 DRB1_0401 DRB1_0404 DRB1_0405 DRB1_0408 DRB1_0410 DRB1_0701 DRB1_0801 DRB1_0802 DRB1_0803 DRB1_0804 DRB1_0806 DRB1_0809 DRB1_0813 DRB1_0901 DRB1_1001 DRB1_1101 DRB1_1102 DRB1_1103 DRB1_1104 DRB1_1114 DRB1_1201 DRB1_1202 DRB1_1301 DRB1_1302 DRB1_1303 DRB1_1304 DRB1_1305 DRB1_1312 DRB1_1401 DRB1_1402 DRB1_1403 DRB1_1404 DRB1_1405 DRB1_1406 DRB1_1407 DRB1_1418 DRB1_1454 DRB1_1501 DRB1_1502 DRB1_1503 DRB1_1601 DRB1_1602 DPA10103-DPB11501 DPA10103-DPB11801 DPA10103-DPB13401 DPA10103-DPB15001 DPA10104-DPB11501 DPA10105-DPB11801 DPA10105-DPB15001 DPA10201-DPB11501 DPA10202-DPB10101 DPA10202-DPB10201 DPA10202-DPB10202 DPA10202-DPB10501 DPA10202-DPB110601 DPA10202-DPB11801 DPA10202-DPB11901 DPA10202-DPB13101 DPA10202-DPB13801 DPA10202-DPB16501 DPA10301-DPB10101 DPA10301-DPB10201 DPA10301-DPB10202 DPA10301-DPB10401 DPA10301-DPB10402 DPA10301-DPB110501 DPA10301-DPB110601 DPA10301-DPB11801 DPA10301-DPB12301 DPA10301-DPB13901 DPA10301-DPB14001 DPA10301-DPB14901; note = HLAs: DPA10301-DPB16501 DPA10301-DPB17501 DPA10301-DPB18001 DPA10401-DPB10101 DPA10401-DPB10201 DPA10401-DPB10202 DPA10401-DPB10501 DQA10102-DQB10501 DQA10102-DQB10503 DQA10102-DQB10601 DQA10102-DQB10602 DQA10102-DQB10609 DQA10103-DQB10501 DQA10103-DQB10503 DQA10103-DQB10601 DQA10103-DQB10602 DQA10103-DQB10608 DQA10103-DQB10609
WIILGLNKIVRMYSPVS

SEQ ID NO: 5990 - protein, 18 aa, Human immunodeficiency virus 1
  source 1..18: note = HLAs: DRB1_0101 DRB1_0102 DRB1_0401 DRB1_0404 DRB1_0405 DRB1_0408 DRB1_0410 DRB1_0701 DRB1_0801 DRB1_0802 DRB1_0804 DRB1_0806 DRB1_0809 DRB1_0813 DRB1_0901 DRB1_1001 DRB1_1101 DRB1_1102 DRB1_1103 DRB1_1104 DRB1_1114 DRB1_1301 DRB1_1302 DRB1_1304 DRB1_1305 DRB1_1401 DRB1_1402 DRB1_1404 DRB1_1406 DRB1_1454 DRB1_1501 DRB1_1502 DRB1_1503 DRB1_1601 DRB1_1602 DPA10103-DPB11501 DPA10104-DPB11501 DPA10202-DPB10101 DPA10202-DPB110601 DPA10202-DPB11901 DPA10301-DPB10101 DPA10301-DPB10201 DPA10301-DPB10202 DPA10301-DPB10401 DPA10301-DPB110601 DPA10301-DPB11801 DPA10301-DPB12301 DPA10301-DPB13901 DPA10301-DPB14001 DPA10301-DPB16501 DPA10401-DPB10101 DPA10401-DPB10201 DPA10401-DPB10202 DQA10102-DQB10501 DQA10102-DQB10503 DQA10102-DQB10609 DQA10103-DQB10501 DQA10103-DQB10503 DQA10103-DQB10601 DQA10103-DQB10602 DQA10103-DQB10609
WIILGLNKIVRMYSPVSI

SEQ ID NO: 5991 - protein, 19 aa, Human immunodeficiency virus 1
  source 1..19: note = HLAs: DRB1_0101 DRB1_0102 DRB1_0401 DRB1_0402 DRB1_0404 DRB1_0405 DRB1_0407 DRB1_0408 DRB1_0410 DRB1_0701 DRB1_0801 DRB1_0802 DRB1_0803 DRB1_0804 DRB1_0806 DRB1_0809 DRB1_0813 DRB1_0901 DRB1_1001 DRB1_1101 DRB1_1102 DRB1_1103 DRB1_1104 DRB1_1114 DRB1_1201 DRB1_1202 DRB1_1301 DRB1_1302 DRB1_1303 DRB1_1304 DRB1_1305 DRB1_1312 DRB1_1401 DRB1_1402 DRB1_1403 DRB1_1404 DRB1_1405 DRB1_1406 DRB1_1407 DRB1_1454 DRB1_1501 DRB1_1502 DRB1_1503 DRB1_1601 DRB1_1602 DPA10103-DPB10101 DPA10103-DPB10201 DPA10103-DPB10202 DPA10103-DPB10301 DPA10103-DPB10501 DPA10103-DPB10601 DPA10103-DPB10901 DPA10103-DPB11001 DPA10103-DPB11101 DPA10103-DPB112401 DPA10103-DPB11301 DPA10103-DPB113101 DPA10103-DPB113301 DPA10103-DPB11401 DPA10103-DPB11501 DPA10103-DPB11601 DPA10103-DPB11701 DPA10103-DPB11801 DPA10103-DPB11901 DPA10103-DPB12001 DPA10103-DPB12101 DPA10103-DPB12901 DPA10103-DPB13001 DPA10103-DPB13101 DPA10103-DPB13401 DPA10103-DPB14001 DPA10103-DPB14801 DPA10103-DPB15001 DPA10103-DPB15501 DPA10104-DPB10101; note = HLAs: DPA10104-DPB10301 DPA10104-DPB11001 DPA10104-DPB11301 DPA10104-DPB11501 DPA10105-DPB10101 DPA10105-DPB10301 DPA10105-DPB11801 DPA10105-DPB15001 DPA10106-DPB10101 DPA10201-DPB10101 DPA10201-DPB110601 DPA10201-DPB11501 DPA10201-DPB11901 DPA10201-DPB15501 DPA10202-DPB10101 DPA10202-DPB10201 DPA10202-DPB10202 DPA10202-DPB10501 DPA10202-DPB10901 DPA10202-DPB110601 DPA10202-DPB11101 DPA10202-DPB11301 DPA10202-DPB113101 DPA10202-DPB11401 DPA10202-DPB11701 DPA10202-DPB11801 DPA10202-DPB11901 DPA10202-DPB12101 DPA10202-DPB12901 DPA10202-DPB13001 DPA10202-DPB13101 DPA10202-DPB13801 DPA10202-DPB15501 DPA10202-DPB16501 DPA10202-DPB18501 DPA10301-DPB10101 DPA10301-DPB10201 DPA10301-DPB10202 DPA10301-DPB10301 DPA10301-DPB10401 DPA10301-DPB10402 DPA10301-DPB10901 DPA10301-DPB110501 DPA10301-DPB110601 DPA10301-DPB11101 DPA10301-DPB11301 DPA10301-DPB11701 DPA10301-DPB11801 DPA10301-DPB12301 DPA10301-DPB13901 DPA10301-DPB14001 DPA10301-DPB14901 DPA10301-DPB15501 DPA10301-DPB16501; note = HLAs: DPA10301-DPB17501 DPA10301-DPB18001 DPA10401-DPB10101 DPA10401-DPB10201 DPA10401-DPB10202 DPA10401-DPB10301 DPA10401-DPB10402 DPA10401-DPB10501 DPA10401-DPB110501 DPA10401-DPB11301 DPA10401-DPB113301 DPA10401-DPB11401 DPA10401-DPB14901 DQA10102-DQB10501 DQA10102-DQB10503 DQA10102-DQB10601 DQA10102-DQB10602 DQA10102-DQB10609 DQA10102-DQB10611 DQA10103-DQB10501 DQA10103-DQB10503 DQA10103-DQB10601 DQA10103-DQB10602 DQA10103-DQB10603 DQA10103-DQB10604 DQA10103-DQB10608 DQA10103-DQB10609 DQA10501-DQB10501 DQA10505-DQB10402 DQA10505-DQB10501
WIILGLNKIVRMYSPVSIL

SEQ ID NO: 5992 - protein, 20 aa, Human immunodeficiency virus 1
  source 1..20: note = HLAs: DRB1_0101 DRB1_0102 DRB1_0103 DRB1_0401 DRB1_0402 DRB1_0403 DRB1_0404 DRB1_0405 DRB1_0406 DRB1_0407 DRB1_0408 DRB1_0410 DRB1_0701 DRB1_0801 DRB1_0802 DRB1_0803 DRB1_0804 DRB1_0806 DRB1_0809 DRB1_0813 DRB1_0901 DRB1_1001 DRB1_1101 DRB1_1102 DRB1_1103 DRB1_1104 DRB1_1114 DRB1_1201 DRB1_1202 DRB1_1301 DRB1_1302 DRB1_1303 DRB1_1304 DRB1_1305 DRB1_1312 DRB1_1401 DRB1_1402 DRB1_1403 DRB1_1404 DRB1_1405 DRB1_1406 DRB1_1407 DRB1_1418 DRB1_1454 DRB1_1501 DRB1_1502 DRB1_1503 DRB1_1601 DRB1_1602 DPA10103-DPB10101 DPA10103-DPB10201 DPA10103-DPB10202 DPA10103-DPB10301 DPA10103-DPB10501 DPA10103-DPB10601 DPA10103-DPB10901 DPA10103-DPB11001 DPA10103-DPB11101 DPA10103-DPB112401 DPA10103-DPB11301 DPA10103-DPB113101 DPA10103-DPB113301 DPA10103-DPB11401 DPA10103-DPB11501 DPA10103-DPB11601 DPA10103-DPB11701 DPA10103-DPB11801 DPA10103-DPB11901 DPA10103-DPB12001 DPA10103-DPB12101 DPA10103-DPB12901 DPA10103-DPB13001 DPA10103-DPB13101 DPA10103-DPB13401 DPA10103-DPB14001 DPA10103-DPB14101; note = HLAs: DPA10103-DPB14801 DPA10103-DPB15001 DPA10103-DPB15501 DPA10103-DPB15901 DPA10104-DPB10101 DPA10104-DPB10301 DPA10104-DPB11001 DPA10104-DPB11301 DPA10104-DPB11501 DPA10105-DPB10101 DPA10105-DPB10301 DPA10105-DPB11801 DPA10105-DPB15001 DPA10106-DPB10101 DPA10106-DPB11101 DPA10201-DPB10101 DPA10201-DPB10301 DPA10201-DPB10501 DPA10201-DPB10601 DPA10201-DPB10901 DPA10201-DPB110601 DPA10201-DPB11101 DPA10201-DPB11301 DPA10201-DPB113101 DPA10201-DPB113301 DPA10201-DPB11401 DPA10201-DPB11501 DPA10201-DPB11601 DPA10201-DPB11701 DPA10201-DPB11901 DPA10201-DPB12601 DPA10201-DPB13001 DPA10201-DPB14501 DPA10201-DPB15501 DPA10201-DPB19101 DPA10202-DPB10101 DPA10202-DPB10201 DPA10202-DPB10202 DPA10202-DPB10301 DPA10202-DPB10401 DPA10202-DPB10501 DPA10202-DPB10901 DPA10202-DPB110601 DPA10202-DPB11101 DPA10202-DPB11301 DPA10202-DPB113101 DPA10202-DPB11401 DPA10202-DPB11701 DPA10202-DPB11801 DPA10202-DPB11901 DPA10202-DPB12101 DPA10202-DPB12901 DPA10202-DPB13001 DPA10202-DPB13101; note = HLAs: DPA10202-DPB13801 DPA10202-DPB14501 DPA10202-DPB15501 DPA10202-DPB16501 DPA10202-DPB18501 DPA10301-DPB10101 DPA10301-DPB10201 DPA10301-DPB10202 DPA10301-DPB10301 DPA10301-DPB10401 DPA10301-DPB10402 DPA10301-DPB10901 DPA10301-DPB110501 DPA10301-DPB110601 DPA10301-DPB11101 DPA10301-DPB11301 DPA10301-DPB11701 DPA10301-DPB11801 DPA10301-DPB12301 DPA10301-DPB13901 DPA10301-DPB14001 DPA10301-DPB14901 DPA10301-DPB15501 DPA10301-DPB16501 DPA10301-DPB17501 DPA10301-DPB18001 DPA10401-DPB10101 DPA10401-DPB10201 DPA10401-DPB10202 DPA10401-DPB10301 DPA10401-DPB10402 DPA10401-DPB10501 DPA10401-DPB110501 DPA10401-DPB11301 DPA10401-DPB113301 DPA10401-DPB11401 DPA10401-DPB14901 DQA10102-DQB10501 DQA10102-DQB10503 DQA10102-DQB10601 DQA10102-DQB10602 DQA10102-DQB10604 DQA10102-DQB10609 DQA10102-DQB10611 DQA10103-DQB10501 DQA10103-DQB10502 DQA10103-DQB10503 DQA10103-DQB10601 DQA10103-DQB10602 DQA10103-DQB10603 DQA10103-DQB10604 DQA10103-DQB10608 DQA10103-DQB10609 DQA10201-DQB10301 DQA10201-DQB10303; note = HLAs: DQA10501-DQB10501 DQA10505-DQB10402 DQA10505-DQB10501
WIILGLNKIVRMYSPVSILD

SEQ ID NO: 5993 - protein, 21 aa, Human immunodeficiency virus 1
  source 1..21: note = HLAs: DRB1_0101 DRB1_0102 DRB1_0401 DRB1_0402 DRB1_0403 DRB1_0404 DRB1_0405 DRB1_0406 DRB1_0407 DRB1_0408 DRB1_0410 DRB1_0701 DRB1_0801 DRB1_0802 DRB1_0803 DRB1_0804 DRB1_0806 DRB1_0809 DRB1_0813 DRB1_0901 DRB1_1001 DRB1_1101 DRB1_1102 DRB1_1103 DRB1_1104 DRB1_1114 DRB1_1201 DRB1_1202 DRB1_1301 DRB1_1302 DRB1_1303 DRB1_1304 DRB1_1305 DRB1_1312 DRB1_1401 DRB1_1402 DRB1_1403 DRB1_1404 DRB1_1405 DRB1_1406 DRB1_1407 DRB1_1418 DRB1_1454 DRB1_1501 DRB1_1502 DRB1_1503 DRB1_1601 DRB1_1602 DPA10103-DPB10101 DPA10103-DPB10201 DPA10103-DPB10202 DPA10103-DPB10301 DPA10103-DPB10501 DPA10103-DPB10601 DPA10103-DPB10901 DPA10103-DPB11001 DPA10103-DPB11101 DPA10103-DPB112401 DPA10103-DPB11301 DPA10103-DPB113101 DPA10103-DPB113301 DPA10103-DPB11401 DPA10103-DPB11501 DPA10103-DPB11601 DPA10103-DPB11701 DPA10103-DPB11801 DPA10103-DPB11901 DPA10103-DPB12001 DPA10103-DPB12101 DPA10103-DPB12901 DPA10103-DPB13001 DPA10103-DPB13101 DPA10103-DPB13401 DPA10103-DPB14001 DPA10103-DPB14101 DPA10103-DPB14801; note = HLAs: DPA10103-DPB15001 DPA10103-DPB15501 DPA10104-DPB10101 DPA10104-DPB10301 DPA10104-DPB11001 DPA10104-DPB11301 DPA10104-DPB11501 DPA10105-DPB10101 DPA10105-DPB10301 DPA10105-DPB11801 DPA10105-DPB15001 DPA10106-DPB10101 DPA10201-DPB10101 DPA10201-DPB10901 DPA10201-DPB110601 DPA10201-DPB11301 DPA10201-DPB113301 DPA10201-DPB11401 DPA10201-DPB11501 DPA10201-DPB11601 DPA10201-DPB11901 DPA10201-DPB15501 DPA10202-DPB10101 DPA10202-DPB10201 DPA10202-DPB10202 DPA10202-DPB10301 DPA10202-DPB10501 DPA10202-DPB10901 DPA10202-DPB110601 DPA10202-DPB11101 DPA10202-DPB11301 DPA10202-DPB113101 DPA10202-DPB11401 DPA10202-DPB11701 DPA10202-DPB11801 DPA10202-DPB11901 DPA10202-DPB12101 DPA10202-DPB12901 DPA10202-DPB13001 DPA10202-DPB13101 DPA10202-DPB13801 DPA10202-DPB14501 DPA10202-DPB15501 DPA10202-DPB16501 DPA10202-DPB18501 DPA10301-DPB10101 DPA10301-DPB10201 DPA10301-DPB10202 DPA10301-DPB10301 DPA10301-DPB10401 DPA10301-DPB10402 DPA10301-DPB10901 DPA10301-DPB110501 DPA10301-DPB110601; note = HLAs: DPA10301-DPB11101 DPA10301-DPB11301 DPA10301-DPB11701 DPA10301-DPB11801 DPA10301-DPB12301 DPA10301-DPB13901 DPA10301-DPB14001 DPA10301-DPB14901 DPA10301-DPB15501 DPA10301-DPB16501 DPA10301-DPB17501 DPA10301-DPB18001 DPA10401-DPB10101 DPA10401-DPB10201 DPA10401-DPB10202 DPA10401-DPB10301 DPA10401-DPB10402 DPA10401-DPB10501 DPA10401-DPB110501 DPA10401-DPB11301 DPA10401-DPB113301 DPA10401-DPB11401 DPA10401-DPB14901 DQA10102-DQB10501 DQA10102-DQB10503 DQA10102-DQB10601 DQA10102-DQB10609 DQA10103-DQB10501 DQA10103-DQB10503 DQA10103-DQB10601 DQA10103-DQB10602 DQA10103-DQB10604 DQA10103-DQB10608 DQA10103-DQB10609 DQA10505-DQB10402
WIILGLNKIVRMYSPVSILDI

SEQ ID NO: 5994 - protein, 14 aa, Human immunodeficiency virus 1
  source 1..14: note = HLAs: DRB1_0101 DRB1_0405 DRB1_0408 DRB1_0701 DRB1_0901 DRB1_1001 DRB1_1602 DQA10102-DQB10501
WIPEWEFVNTPPLV

SEQ ID NO: 5995 - protein, 15 aa, Human immunodeficiency virus 1
  source 1..15: note = HLAs: DRB1_0101 DRB1_0102 DRB1_0401 DRB1_0404 DRB1_0405 DRB1_0408 DRB1_0410 DRB1_0701 DRB1_0801 DRB1_0813 DRB1_0901 DRB1_1001 DRB1_1102 DRB1_1114 DRB1_1301 DRB1_1302 DRB1_1303 DRB1_1304 DRB1_1312 DRB1_1402 DRB1_1406 DRB1_1502 DRB1_1601 DRB1_1602 DPA10103-DPB10101 DPA10103-DPB11501 DPA10103-DPB15001 DPA10104-DPB10101 DPA10104-DPB11501 DPA10105-DPB10101 DPA10105-DPB15001 DPA10202-DPB10101 DPA10202-DPB13101 DPA10301-DPB10101 DPA10301-DPB10201 DPA10301-DPB10202 DPA10301-DPB10401 DPA10301-DPB11801 DPA10301-DPB12301 DPA10301-DPB13901 DPA10301-DPB14001 DPA10401-DPB10101 DQA10102-DQB10501
WIPEWEFVNTPPLVK

SEQ ID NO: 5996 - protein, 16 aa, Human immunodeficiency virus 1
  source 1..16: note = HLAs: DRB1_0101 DRB1_0401 DRB1_0405 DRB1_0408 DRB1_0701 DRB1_0813 DRB1_0901 DRB1_1001 DRB1_1114 DRB1_1302 DRB1_1402 DRB1_1502 DRB1_1601 DRB1_1602 DPA10103-DPB10101 DPA10103-DPB11501 DPA10103-DPB13101 DPA10103-DPB15001 DPA10104-DPB10101 DPA10104-DPB11501 DPA10105-DPB10101 DPA10105-DPB15001 DPA10106-DPB10101 DPA10201-DPB10101 DPA10201-DPB11501 DPA10202-DPB10101 DPA10202-DPB10202 DPA10202-DPB110601 DPA10202-DPB11901 DPA10202-DPB13101 DPA10202-DPB15501 DPA10202-DPB16501 DPA10301-DPB10101 DPA10301-DPB10201 DPA10301-DPB10202 DPA10301-DPB10401 DPA10301-DPB10402 DPA10301-DPB110501 DPA10301-DPB110601 DPA10301-DPB11801 DPA10301-DPB12301 DPA10301-DPB13901 DPA10301-DPB14001 DPA10301-DPB14901 DPA10301-DPB15501 DPA10301-DPB16501 DPA10301-DPB18001 DPA10401-DPB10101 DPA10401-DPB10201 DPA10401-DPB10202 DPA10401-DPB10501 DQA10102-DQB10501 DQA10102-DQB10609 DQA10103-DQB10501 DQA10103-DQB10609
WIPEWEFVNTPPLVKL

SEQ ID NO: 5997 - protein, 17 aa, Human immunodeficiency virus 1
  source 1..17: note = HLAs: DRB1_0101 DRB1_0401 DRB1_0405 DRB1_0408 DRB1_0410 DRB1_0701 DRB1_0801 DRB1_0813 DRB1_0901 DRB1_1001 DRB1_1101 DRB1_1102 DRB1_1114 DRB1_1301 DRB1_1302 DRB1_1303 DRB1_1304 DRB1_1305 DRB1_1312 DRB1_1402 DRB1_1406 DRB1_1502 DRB1_1601 DRB1_1602 DPA10103-DPB10101 DPA10103-DPB11501 DPA10103-DPB13101 DPA10103-DPB13401 DPA10103-DPB15001 DPA10104-DPB10101 DPA10104-DPB11501 DPA10105-DPB10101 DPA10105-DPB15001 DPA10106-DPB10101 DPA10201-DPB10101 DPA10201-DPB11501 DPA10202-DPB10101 DPA10202-DPB10201 DPA10202-DPB10202 DPA10202-DPB10501 DPA10202-DPB110601 DPA10202-DPB11901 DPA10202-DPB13101 DPA10202-DPB13801 DPA10202-DPB15501 DPA10202-DPB16501 DPA10301-DPB10101 DPA10301-DPB10201 DPA10301-DPB10202 DPA10301-DPB10401 DPA10301-DPB10402 DPA10301-DPB110501 DPA10301-DPB110601 DPA10301-DPB11801 DPA10301-DPB12301 DPA10301-DPB13901 DPA10301-DPB14001 DPA10301-DPB14901 DPA10301-DPB16501 DPA10301-DPB17501 DPA10301-DPB18001 DPA10401-DPB10101 DPA10401-DPB10201 DPA10401-DPB10202 DPA10401-DPB10501; note = HLAs: DPA10401-DPB11401 DQA10102-DQB10501 DQA10102-DQB10609 DQA10103-DQB10501
WIPEWEFVNTPPLVKLW

SEQ ID NO: 5998 - protein, 18 aa, Human immunodeficiency virus 1
  source 1..18: note = HLAs: DRB1_0101 DRB1_0405 DRB1_0408 DRB1_0701 DRB1_0901 DRB1_1001 DRB1_1602 DPA10103-DPB10101 DPA10103-DPB11501 DPA10104-DPB10101 DPA10104-DPB11501 DPA10105-DPB10101 DPA10202-DPB10101 DPA10202-DPB13101 DPA10301-DPB10101 DPA10301-DPB10201 DPA10301-DPB10202 DPA10301-DPB10401 DPA10301-DPB110601 DPA10301-DPB11801 DPA10301-DPB12301 DPA10301-DPB13901 DPA10301-DPB14001 DPA10301-DPB16501 DPA10401-DPB10101 DQA10102-DQB10501
WIPEWEFVNTPPLVKLWY

SEQ ID NO: 5999 - protein, 19 aa, Human immunodeficiency virus 1
  source 1..19: note = HLAs: DRB1_0101 DRB1_0401 DRB1_0405 DRB1_0408 DRB1_0701 DRB1_0801 DRB1_0813 DRB1_0901 DRB1_1001 DRB1_1101 DRB1_1114 DRB1_1302 DRB1_1304 DRB1_1305 DRB1_1312 DRB1_1402 DRB1_1406 DRB1_1502 DRB1_1601 DRB1_1602 DPA10103-DPB10101 DPA10103-DPB10201 DPA10103-DPB11501 DPA10103-DPB13101 DPA10103-DPB13401 DPA10103-DPB14801 DPA10103-DPB15001 DPA10104-DPB10101 DPA10104-DPB11501 DPA10105-DPB10101 DPA10105-DPB15001 DPA10106-DPB10101 DPA10201-DPB10101 DPA10201-DPB11501 DPA10202-DPB10101 DPA10202-DPB10201 DPA10202-DPB10202 DPA10202-DPB10501 DPA10202-DPB110601 DPA10202-DPB11901 DPA10202-DPB13101 DPA10202-DPB13801 DPA10202-DPB15501 DPA10202-DPB16501 DPA10301-DPB10101 DPA10301-DPB10201 DPA10301-DPB10202 DPA10301-DPB10401 DPA10301-DPB10402 DPA10301-DPB110501 DPA10301-DPB110601 DPA10301-DPB11801 DPA10301-DPB12301 DPA10301-DPB13901 DPA10301-DPB14001 DPA10301-DPB14901 DPA10301-DPB15501 DPA10301-DPB16501 DPA10301-DPB17501 DPA10301-DPB18001 DPA10401-DPB10101 DPA10401-DPB10201 DPA10401-DPB10202; note = HLAs: DPA10401-DPB10501 DPA10401-DPB11401 DQA10102-DQB10501 DQA10102-DQB10609 DQA10103-DQB10501
WIPEWEFVNTPPLVKLWYQ

SEQ ID NO: 6000 - protein, 20 aa, Human immunodeficiency virus 1
  source 1..20: note = HLAs: DRB1_0101 DRB1_0401 DRB1_0404 DRB1_0405 DRB1_0408 DRB1_0410 DRB1_0701 DRB1_0801 DRB1_0802 DRB1_0803 DRB1_0809 DRB1_0813 DRB1_0901 DRB1_1001 DRB1_1101 DRB1_1102 DRB1_1114 DRB1_1301 DRB1_1302 DRB1_1303 DRB1_1304 DRB1_1305 DRB1_1312 DRB1_1402 DRB1_1406 DRB1_1501 DRB1_1502 DRB1_1601 DRB1_1602 DPA10103-DPB10101 DPA10103-DPB10201 DPA10103-DPB10202 DPA10103-DPB10501 DPA10103-DPB11501 DPA10103-DPB11601 DPA10103-DPB11901 DPA10103-DPB13101 DPA10103-DPB13401 DPA10103-DPB14001 DPA10103-DPB14101 DPA10103-DPB14801 DPA10103-DPB15001 DPA10103-DPB15901 DPA10104-DPB10101 DPA10104-DPB11501 DPA10105-DPB10101 DPA10105-DPB15001 DPA10106-DPB10101 DPA10201-DPB10101 DPA10201-DPB10501 DPA10201-DPB110601 DPA10201-DPB11501 DPA10201-DPB11601 DPA10201-DPB11901 DPA10202-DPB10101 DPA10202-DPB10201 DPA10202-DPB10202 DPA10202-DPB10401 DPA10202-DPB10501 DPA10202-DPB110601 DPA10202-DPB11101 DPA10202-DPB11301 DPA10202-DPB11401 DPA10202-DPB11801 DPA10202-DPB11901 DPA10202-DPB12101 DPA10202-DPB13001 DPA10202-DPB13101; note = HLAs: DPA10202-DPB13801 DPA10202-DPB15501 DPA10202-DPB16501 DPA10202-DPB18501 DPA10301-DPB10101 DPA10301-DPB10201 DPA10301-DPB10202 DPA10301-DPB10401 DPA10301-DPB10402 DPA10301-DPB110501 DPA10301-DPB110601 DPA10301-DPB11101 DPA10301-DPB11801 DPA10301-DPB12301 DPA10301-DPB13901 DPA10301-DPB14001 DPA10301-DPB14901 DPA10301-DPB15501 DPA10301-DPB16501 DPA10301-DPB17501 DPA10301-DPB18001 DPA10401-DPB10101 DPA10401-DPB10201 DPA10401-DPB10202 DPA10401-DPB10301 DPA10401-DPB10402 DPA10401-DPB10501 DPA10401-DPB110501 DPA10401-DPB11301 DPA10401-DPB113301 DPA10401-DPB11401 DPA10401-DPB14901 DQA10102-DQB10501 DQA10102-DQB10609 DQA10103-DQB10501 DQA10103-DQB10609
WIPEWEFVNTPPLVKLWYQL

SEQ ID NO: 6001 - protein, 21 aa, Human immunodeficiency virus 1
  source 1..21: note = HLAs: DRB1_0101 DRB1_0401 DRB1_0405 DRB1_0408 DRB1_0410 DRB1_0701 DRB1_0801 DRB1_0813 DRB1_0901 DRB1_1001 DRB1_1101 DRB1_1114 DRB1_1302 DRB1_1303 DRB1_1304 DRB1_1305 DRB1_1312 DRB1_1402 DRB1_1406 DRB1_1502 DRB1_1601 DRB1_1602 DPA10103-DPB10101 DPA10103-DPB10201 DPA10103-DPB11501 DPA10103-DPB11601 DPA10103-DPB13101 DPA10103-DPB13401 DPA10103-DPB14001 DPA10103-DPB14801 DPA10103-DPB15001 DPA10104-DPB10101 DPA10104-DPB11501 DPA10105-DPB10101 DPA10105-DPB15001 DPA10106-DPB10101 DPA10201-DPB10101 DPA10201-DPB11501 DPA10202-DPB10101 DPA10202-DPB10202 DPA10202-DPB10501 DPA10202-DPB110601 DPA10202-DPB11901 DPA10202-DPB13101 DPA10202-DPB13801 DPA10202-DPB16501 DPA10301-DPB10101 DPA10301-DPB10201 DPA10301-DPB10202 DPA10301-DPB10401 DPA10301-DPB10402 DPA10301-DPB110501 DPA10301-DPB110601 DPA10301-DPB11801 DPA10301-DPB12301 DPA10301-DPB13901 DPA10301-DPB14001 DPA10301-DPB14901 DPA10301-DPB15501 DPA10301-DPB16501 DPA10301-DPB17501 DPA10301-DPB18001 DPA10401-DPB10101 DPA10401-DPB10201; note = HLAs: DPA10401-DPB10202 DPA10401-DPB10501 DQA10102-DQB10501 DQA10103-DQB10501
WIPEWEFVNTPPLVKLWYQLE

SEQ ID NO: 6002 - protein, 15 aa, Human immunodeficiency virus 1
  source 1..15: note = HLAs: DRB1_0806 DRB1_1103 DRB1_1104
WKGPAKLLWKGEGAV

SEQ ID NO: 6003 - protein, 16 aa, Human immunodeficiency virus 1
  source 1..16: note = HLAs: DRB1_0901 DRB1_1104
WKGPAKLLWKGEGAVV

SEQ ID NO: 6004 - protein, 17 aa, Human immunodeficiency virus 1
  source 1..17: note = HLAs: DRB1_0101 DRB1_0701 DRB1_0901 DRB1_1001 DRB1_1104 DRB1_1114 DRB1_1302 DPA10301-DPB10201 DPA10301-DPB10202 DPA10401-DPB10101 DQA10102-DQB10501 DQA10201-DQB10301
WKGPAKLLWKGEGAVVI

SEQ ID NO: 6005 - protein, 18 aa, Human immunodeficiency virus 1
  source 1..18: note = HLAs: DRB1_0101 DRB1_0901 DRB1_1001 DQA10102-DQB10501
WKGPAKLLWKGEGAVVIQ

SEQ ID NO: 6006 - protein, 19 aa, Human immunodeficiency virus 1
  source 1..19: note = HLAs: DRB1_0101 DRB1_0701 DRB1_0901 DRB1_1001 DRB1_1114 DRB1_1302 DPA10301-DPB10101 DPA10301-DPB10201 DPA10301-DPB10202 DPA10401-DPB10101 DQA10102-DQB10501 DQA10201-DQB10301
WKGPAKLLWKGEGAVVIQD

SEQ ID NO: 6007 - protein, 20 aa, Human immunodeficiency virus 1
  source 1..20: note = HLAs: DRB1_0101 DRB1_0102 DRB1_0701 DRB1_0806 DRB1_0813 DRB1_0901 DRB1_1001 DRB1_1102 DRB1_1104 DRB1_1114 DRB1_1301 DRB1_1302 DRB1_1304 DRB1_1501 DRB1_1502 DRB1_1602 DPA10103-DPB11501 DPA10104-DPB11501 DPA10202-DPB10101 DPA10301-DPB10101 DPA10301-DPB10201 DPA10301-DPB10202 DPA10301-DPB10401 DPA10301-DPB110601 DPA10301-DPB11801 DPA10301-DPB12301 DPA10301-DPB13901 DPA10301-DPB16501 DPA10401-DPB10101 DPA10401-DPB10201 DPA10401-DPB10202 DQA10102-DQB10501 DQA10102-DQB10601 DQA10102-DQB10609 DQA10103-DQB10501 DQA10103-DQB10601 DQA10201-DQB10301 DQA10501-DQB10301 DQA10501-DQB10319 DQA10503-DQB10301 DQA10505-DQB10301 DQA10505-DQB10309 DQA10505-DQB10319 DQA10508-DQB10301 DQA10509-DQB10301
WKGPAKLLWKGEGAVVIQDN

SEQ ID NO: 6008 - protein, 21 aa, Human immunodeficiency virus 1
  source 1..21: note = HLAs: DRB1_0101 DRB1_0701 DRB1_0901 DRB1_1001 DRB1_1104 DRB1_1114 DRB1_1302 DPA10301-DPB10101 DPA10301-DPB10201 DPA10301-DPB10202 DPA10401-DPB10101 DQA10102-DQB10501 DQA10102-DQB10601 DQA10102-DQB10609 DQA10201-DQB10301
WKGPAKLLWKGEGAVVIQDNS

SEQ ID NO: 6009 - protein, 14 aa, Human immunodeficiency virus 1
  source 1..14: note = HLAs: DRB1_0101 DRB1_0901 DQA10201-DQB10301 DQA10501-DQB10301 DQA10501-DQB10319 DQA10503-DQB10301 DQA10505-DQB10301 DQA10505-DQB10309 DQA10505-DQB10319 DQA10508-DQB10301 DQA10509-DQB10301
WKPKMIGGIGGFIK

SEQ ID NO: 6010 - protein, 15 aa, Human immunodeficiency virus 1
  source 1..15: note = HLAs: DRB1_0101 DRB1_0102 DRB1_0701 DRB1_0901 DRB1_1001 DRB1_1102 DRB1_1301 DRB1_1304 DRB1_1406 DRB1_1501 DQA10102-DQB10601 DQA10103-DQB10601 DQA10201-DQB10301 DQA10501-DQB10301 DQA10501-DQB10319 DQA10503-DQB10301 DQA10505-DQB10301 DQA10505-DQB10309 DQA10505-DQB10319 DQA10505-DQB10402 DQA10508-DQB10301 DQA10509-DQB10301 DQA10601-DQB10301
WKPKMIGGIGGFIKV

SEQ ID NO: 6011 - protein, 16 aa, Human immunodeficiency virus 1
  source 1..16: note = HLAs: DRB1_0101 DRB1_0102 DRB1_0701 DRB1_0901 DRB1_1001 DRB1_1501 DQA10102-DQB10501 DQA10102-DQB10601 DQA10103-DQB10601 DQA10201-DQB10301 DQA10501-DQB10301 DQA10501-DQB10319 DQA10503-DQB10301 DQA10505-DQB10301 DQA10505-DQB10309 DQA10505-DQB10319 DQA10506-DQB10303 DQA10508-DQB10301 DQA10509-DQB10301 DQA10601-DQB10301
WKPKMIGGIGGFIKVR

SEQ ID NO: 6012 - protein, 17 aa, Human immunodeficiency virus 1
  source 1..17: note = HLAs: DRB1_0101 DRB1_0102 DRB1_0701 DRB1_0806 DRB1_0901 DRB1_1001 DRB1_1102 DRB1_1103 DRB1_1104 DRB1_1301 DRB1_1304 DRB1_1406 DRB1_1501 DRB1_1503 DQA10102-DQB10501 DQA10102-DQB10601 DQA10103-DQB10601 DQA10201-DQB10301 DQA10501-DQB10301 DQA10501-DQB10319 DQA10503-DQB10301 DQA10505-DQB10301 DQA10505-DQB10309 DQA10505-DQB10319 DQA10508-DQB10301 DQA10509-DQB10301
WKPKMIGGIGGFIKVRQ

SEQ ID NO: 6013 - protein, 18 aa, Human immunodeficiency virus 1
  source 1..18: note = HLAs: DRB1_0901 DQA10201-DQB10301 DQA10501-DQB10301 DQA10501-DQB10319 DQA10503-DQB10301 DQA10505-DQB10301 DQA10505-DQB10309 DQA10505-DQB10319 DQA10508-DQB10301 DQA10509-DQB10301
WKPKMIGGIGGFIKVRQY

SEQ ID NO: 6014 - protein, 19 aa, Human immunodeficiency virus 1
  source 1..19: note = HLAs: DRB1_0101 DRB1_0806 DRB1_0901 DRB1_1102 DRB1_1103 DRB1_1104 DRB1_1301 DRB1_1304 DRB1_1501 DQA10102-DQB10501 DQA10102-DQB10601 DQA10103-DQB10601 DQA10201-DQB10301 DQA10501-DQB10301 DQA10501-DQB10319 DQA10503-DQB10301 DQA10505-DQB10301 DQA10505-DQB10309 DQA10505-DQB10319 DQA10508-DQB10301 DQA10509-DQB10301
WKPKMIGGIGGFIKVRQYD

SEQ ID NO: 6015 - protein, 20 aa, Human immunodeficiency virus 1
  source 1..20: note = HLAs: DRB1_0101 DRB1_0102 DRB1_0804 DRB1_0806 DRB1_0901 DRB1_1001 DRB1_1102 DRB1_1103 DRB1_1104 DRB1_1301 DRB1_1304 DRB1_1406 DRB1_1501 DRB1_1503 DRB1_1601 DQA10102-DQB10501 DQA10102-DQB10601 DQA10103-DQB10501 DQA10103-DQB10601 DQA10201-DQB10301 DQA10501-DQB10301 DQA10501-DQB10319 DQA10503-DQB10301 DQA10505-DQB10301 DQA10505-DQB10309 DQA10505-DQB10319 DQA10505-DQB10402 DQA10508-DQB10301 DQA10509-DQB10301
WKPKMIGGIGGFIKVRQYDQ

SEQ ID NO: 6016 - protein, 16 aa, Human immunodeficiency virus 1
  source 1..16: note = HLAs: DQA10102-DQB10501
WMGYELHPDKWTVQPI

SEQ ID NO: 6017 - protein, 19 aa, Human immunodeficiency virus 1
  source 1..19: note = HLAs: DPA10301-DPB10101 DPA10401-DPB10101 DQA10102-DQB10501
WMGYELHPDKWTVQPIQLP

SEQ ID NO: 6018 - protein, 14 aa, Human immunodeficiency virus 1
  source 1..14: note = HLAs: DPA10301-DPB10101 DPA10401-DPB10101
WMTDTLLVQNANPD

SEQ ID NO: 6019 - protein, 15 aa, Human immunodeficiency virus 1
  source 1..15: note = HLAs: DRB1_0405 DPA10301-DPB10101 DPA10301-DPB11801 DPA10401-DPB10101 DQA10102-DQB10501
WMTDTLLVQNANPDC

SEQ ID NO: 6020 - protein, 16 aa, Human immunodeficiency virus 1
  source 1..16: note = HLAs: DPA10301-DPB10101 DPA10401-DPB10101 DQA10102-DQB10501
WMTDTLLVQNANPDCK

SEQ ID NO: 6021 - protein, 17 aa, Human immunodeficiency virus 1
  source 1..17: note = HLAs: DPA10301-DPB10101 DPA10401-DPB10101 DQA10102-DQB10501
WMTDTLLVQNANPDCKT

SEQ ID NO: 6022 - protein, 19 aa, Human immunodeficiency virus 1
  source 1..19: note = HLAs: DPA10301-DPB10101 DPA10401-DPB10101 DQA10102-DQB10501
WMTDTLLVQNANPDCKTIL

SEQ ID NO: 6023 - protein, 15 aa, Human immunodeficiency virus 1
  source 1..15: note = HLAs: DPA10103-DPB11501 DPA10104-DPB11501 DPA10301-DPB10101 DPA10301-DPB10201 DPA10301-DPB10202 DQA10102-DQB10501
WQATWIPEWEFVNTP

SEQ ID NO: 6024 - protein, 16 aa, Human immunodeficiency virus 1
  source 1..16: note = HLAs: DPA10301-DPB10101 DQA10102-DQB10501
WQATWIPEWEFVNTPP

SEQ ID NO: 6025 - protein, 17 aa, Human immunodeficiency virus 1
  source 1..17: note = HLAs: DRB1_0701 DPA10301-DPB10101 DPA10301-DPB10201 DQA10102-DQB10501
WQATWIPEWEFVNTPPL

SEQ ID NO: 6026 - protein, 18 aa, Human immunodeficiency virus 1
  source 1..18: note = HLAs: DQA10102-DQB10501
WQATWIPEWEFVNTPPLV

SEQ ID NO: 6027 - protein, 19 aa, Human immunodeficiency virus 1
  source 1..19: note = HLAs: DRB1_0101 DRB1_0401 DRB1_0405 DRB1_0408 DRB1_0701 DRB1_0901 DRB1_1001 DRB1_1602 DPA10103-DPB10101 DPA10103-DPB11501 DPA10104-DPB10101 DPA10104-DPB11501 DPA10105-DPB10101 DPA10202-DPB10101 DPA10202-DPB13101 DPA10301-DPB10101 DPA10301-DPB10201 DPA10301-DPB10202 DPA10301-DPB10401 DPA10301-DPB110601 DPA10301-DPB11801 DPA10301-DPB12301 DPA10301-DPB13901 DPA10301-DPB14001 DPA10301-DPB16501 DPA10401-DPB10101 DQA10102-DQB10501 DQA10102-DQB10609 DQA10103-DQB10501
WQATWIPEWEFVNTPPLVK

SEQ ID NO: 6028 - protein, 20 aa, Human immunodeficiency virus 1
  source 1..20: note = HLAs: DRB1_0101 DRB1_0401 DRB1_0405 DRB1_0408 DRB1_0410 DRB1_0701 DRB1_0801 DRB1_0803 DRB1_0813 DRB1_0901 DRB1_1001 DRB1_1101 DRB1_1102 DRB1_1114 DRB1_1301 DRB1_1302 DRB1_1303 DRB1_1304 DRB1_1305 DRB1_1312 DRB1_1402 DRB1_1406 DRB1_1502 DRB1_1601 DRB1_1602 DPA10103-DPB10101 DPA10103-DPB10201 DPA10103-DPB10202 DPA10103-DPB10501 DPA10103-DPB11501 DPA10103-DPB11601 DPA10103-DPB11901 DPA10103-DPB13101 DPA10103-DPB13401 DPA10103-DPB14801 DPA10103-DPB15001 DPA10104-DPB10101 DPA10104-DPB11501 DPA10105-DPB10101 DPA10105-DPB15001 DPA10106-DPB10101 DPA10201-DPB10101 DPA10201-DPB11501 DPA10202-DPB10101 DPA10202-DPB10201 DPA10202-DPB10202 DPA10202-DPB10501 DPA10202-DPB110601 DPA10202-DPB11101 DPA10202-DPB11901 DPA10202-DPB13101 DPA10202-DPB13801 DPA10202-DPB15501 DPA10202-DPB16501 DPA10301-DPB10101 DPA10301-DPB10201 DPA10301-DPB10202 DPA10301-DPB10401 DPA10301-DPB10402 DPA10301-DPB110501 DPA10301-DPB110601 DPA10301-DPB11101 DPA10301-DPB11301 DPA10301-DPB11801 DPA10301-DPB12301 DPA10301-DPB13901; note = HLAs: DPA10301-DPB14001 DPA10301-DPB14901 DPA10301-DPB15501 DPA10301-DPB16501 DPA10301-DPB17501 DPA10301-DPB18001 DPA10401-DPB10101 DPA10401-DPB10201 DPA10401-DPB10202 DPA10401-DPB10301 DPA10401-DPB10501 DPA10401-DPB11401 DQA10102-DQB10501 DQA10102-DQB10503 DQA10102-DQB10604 DQA10102-DQB10609 DQA10103-DQB10501 DQA10103-DQB10609
WQATWIPEWEFVNTPPLVKL

SEQ ID NO: 6029 - protein, 21 aa, Human immunodeficiency virus 1
  source 1..21: note = HLAs: DRB1_0101 DRB1_0401 DRB1_0405 DRB1_0408 DRB1_0410 DRB1_0701 DRB1_0813 DRB1_0901 DRB1_1001 DRB1_1114 DRB1_1302 DRB1_1303 DRB1_1312 DRB1_1402 DRB1_1502 DRB1_1601 DRB1_1602 DPA10103-DPB10101 DPA10103-DPB11501 DPA10103-DPB13101 DPA10103-DPB15001 DPA10104-DPB10101 DPA10104-DPB11501 DPA10105-DPB10101 DPA10105-DPB15001 DPA10202-DPB10101 DPA10202-DPB110601 DPA10202-DPB11901 DPA10202-DPB13101 DPA10301-DPB10101 DPA10301-DPB10201 DPA10301-DPB10202 DPA10301-DPB10401 DPA10301-DPB10402 DPA10301-DPB110501 DPA10301-DPB110601 DPA10301-DPB11801 DPA10301-DPB12301 DPA10301-DPB13901 DPA10301-DPB14001 DPA10301-DPB14901 DPA10301-DPB16501 DPA10301-DPB18001 DPA10401-DPB10101 DPA10401-DPB10201 DPA10401-DPB10202 DPA10401-DPB10501 DQA10102-DQB10501 DQA10102-DQB10609 DQA10103-DQB10501
WQATWIPEWEFVNTPPLVKLW

SEQ ID NO: 6030 - protein, 22 aa, Human immunodeficiency virus 1
  source 1..22: note = HLAs: DRB1_0101 DRB1_0401 DRB1_0405 DRB1_0408 DRB1_0410 DRB1_0701 DRB1_0801 DRB1_0813 DRB1_0901 DRB1_1001 DRB1_1101 DRB1_1114 DRB1_1302 DRB1_1303 DRB1_1304 DRB1_1305 DRB1_1312 DRB1_1402 DRB1_1406 DRB1_1502 DRB1_1601 DRB1_1602 DPA10103-DPB10101 DPA10103-DPB10201 DPA10103-DPB11501 DPA10103-DPB13101 DPA10103-DPB14801 DPA10103-DPB15001 DPA10104-DPB10101 DPA10104-DPB11501 DPA10105-DPB10101 DPA10105-DPB15001 DPA10106-DPB10101 DPA10201-DPB10101 DPA10201-DPB11501 DPA10202-DPB10101 DPA10202-DPB10202 DPA10202-DPB10501 DPA10202-DPB110601 DPA10202-DPB11901 DPA10202-DPB13101 DPA10202-DPB13801 DPA10202-DPB16501 DPA10301-DPB10101 DPA10301-DPB10201 DPA10301-DPB10202 DPA10301-DPB10401 DPA10301-DPB10402 DPA10301-DPB110501 DPA10301-DPB110601 DPA10301-DPB11801 DPA10301-DPB12301 DPA10301-DPB13901 DPA10301-DPB14001 DPA10301-DPB14901 DPA10301-DPB15501 DPA10301-DPB16501 DPA10301-DPB17501 DPA10301-DPB18001 DPA10401-DPB10101 DPA10401-DPB10201 DPA10401-DPB10202 DPA10401-DPB10501 DQA10102-DQB10501; note = HLAs: DQA10102-DQB10609 DQA10103-DQB10501 DQA10103-DQB10609
WQATWIPEWEFVNTPPLVKLWY

SEQ ID NO: 6031 - protein, 23 aa, Human immunodeficiency virus 1
  source 1..23: note = HLAs: DRB1_0101 DRB1_0401 DRB1_0405 DRB1_0408 DRB1_0410 DRB1_0701 DRB1_0801 DRB1_0813 DRB1_0901 DRB1_1001 DRB1_1101 DRB1_1102 DRB1_1114 DRB1_1301 DRB1_1302 DRB1_1303 DRB1_1304 DRB1_1305 DRB1_1312 DRB1_1402 DRB1_1406 DRB1_1502 DRB1_1601 DRB1_1602 DPA10103-DPB10101 DPA10103-DPB10201 DPA10103-DPB11501 DPA10103-DPB11601 DPA10103-DPB13101 DPA10103-DPB13401 DPA10103-DPB14801 DPA10103-DPB15001 DPA10104-DPB10101 DPA10104-DPB11501 DPA10105-DPB10101 DPA10105-DPB15001 DPA10106-DPB10101 DPA10201-DPB10101 DPA10201-DPB11501 DPA10202-DPB10101 DPA10202-DPB10201 DPA10202-DPB10202 DPA10202-DPB10501 DPA10202-DPB110601 DPA10202-DPB11901 DPA10202-DPB13101 DPA10202-DPB13801 DPA10202-DPB15501 DPA10202-DPB16501 DPA10301-DPB10101 DPA10301-DPB10201 DPA10301-DPB10202 DPA10301-DPB10401 DPA10301-DPB10402 DPA10301-DPB110501 DPA10301-DPB110601 DPA10301-DPB11801 DPA10301-DPB12301 DPA10301-DPB13901 DPA10301-DPB14001 DPA10301-DPB14901 DPA10301-DPB15501 DPA10301-DPB16501 DPA10301-DPB17501 DPA10301-DPB18001; note = HLAs: DPA10401-DPB10101 DPA10401-DPB10201 DPA10401-DPB10202 DPA10401-DPB10501 DPA10401-DPB11401 DQA10102-DQB10501 DQA10102-DQB10609 DQA10103-DQB10501 DQA10103-DQB10609
WQATWIPEWEFVNTPPLVKLWYQ

SEQ ID NO: 6032 - protein, 24 aa, Human immunodeficiency virus 1
  source 1..24: note = HLAs: DRB1_0101 DRB1_0401 DRB1_0405 DRB1_0408 DRB1_0410 DRB1_0701 DRB1_0801 DRB1_0813 DRB1_0901 DRB1_1001 DRB1_1101 DRB1_1102 DRB1_1114 DRB1_1301 DRB1_1302 DRB1_1303 DRB1_1304 DRB1_1305 DRB1_1312 DRB1_1402 DRB1_1406 DRB1_1502 DRB1_1601 DRB1_1602 DPA10103-DPB10101 DPA10103-DPB10201 DPA10103-DPB11501 DPA10103-DPB11601 DPA10103-DPB13101 DPA10103-DPB13401 DPA10103-DPB14101 DPA10103-DPB14801 DPA10103-DPB15001 DPA10104-DPB10101 DPA10104-DPB11501 DPA10105-DPB10101 DPA10105-DPB15001 DPA10106-DPB10101 DPA10201-DPB10101 DPA10201-DPB11501 DPA10202-DPB10101 DPA10202-DPB10201 DPA10202-DPB10202 DPA10202-DPB10501 DPA10202-DPB110601 DPA10202-DPB11901 DPA10202-DPB13101 DPA10202-DPB13801 DPA10202-DPB15501 DPA10202-DPB16501 DPA10301-DPB10101 DPA10301-DPB10201 DPA10301-DPB10202 DPA10301-DPB10401 DPA10301-DPB10402 DPA10301-DPB110501 DPA10301-DPB110601 DPA10301-DPB11801 DPA10301-DPB12301 DPA10301-DPB13901 DPA10301-DPB14001 DPA10301-DPB14901 DPA10301-DPB15501 DPA10301-DPB16501 DPA10301-DPB17501; note = HLAs: DPA10301-DPB18001 DPA10401-DPB10101 DPA10401-DPB10201 DPA10401-DPB10202 DPA10401-DPB10501 DPA10401-DPB11401 DQA10102-DQB10501 DQA10102-DQB10609 DQA10103-DQB10501 DQA10103-DQB10609
WQATWIPEWEFVNTPPLVKLWYQL

SEQ ID NO: 6033 - protein, 25 aa, Human immunodeficiency virus 1
  source 1..25: note = HLAs: DRB1_0101 DRB1_0401 DRB1_0405 DRB1_0408 DRB1_0410 DRB1_0701 DRB1_0801 DRB1_0813 DRB1_0901 DRB1_1001 DRB1_1101 DRB1_1102 DRB1_1114 DRB1_1301 DRB1_1302 DRB1_1303 DRB1_1304 DRB1_1305 DRB1_1312 DRB1_1402 DRB1_1406 DRB1_1502 DRB1_1601 DRB1_1602 DPA10103-DPB10101 DPA10103-DPB10201 DPA10103-DPB10202 DPA10103-DPB11501 DPA10103-DPB11601 DPA10103-DPB11901 DPA10103-DPB13101 DPA10103-DPB13401 DPA10103-DPB14001 DPA10103-DPB14101 DPA10103-DPB14801 DPA10103-DPB15001 DPA10104-DPB10101 DPA10104-DPB11501 DPA10105-DPB10101 DPA10105-DPB15001 DPA10106-DPB10101 DPA10201-DPB10101 DPA10201-DPB11501 DPA10202-DPB10101 DPA10202-DPB10201 DPA10202-DPB10202 DPA10202-DPB10501 DPA10202-DPB110601 DPA10202-DPB11801 DPA10202-DPB11901 DPA10202-DPB13101 DPA10202-DPB13801 DPA10202-DPB15501 DPA10202-DPB16501 DPA10301-DPB10101 DPA10301-DPB10201 DPA10301-DPB10202 DPA10301-DPB10401 DPA10301-DPB10402 DPA10301-DPB110501 DPA10301-DPB110601 DPA10301-DPB11801 DPA10301-DPB12301 DPA10301-DPB13901 DPA10301-DPB14001; note = HLAs: DPA10301-DPB14901 DPA10301-DPB15501 DPA10301-DPB16501 DPA10301-DPB17501 DPA10301-DPB18001 DPA10401-DPB10101 DPA10401-DPB10201 DPA10401-DPB10202 DPA10401-DPB10501 DPA10401-DPB11401 DQA10102-DQB10501 DQA10102-DQB10609 DQA10103-DQB10501 DQA10103-DQB10609
WQATWIPEWEFVNTPPLVKLWYQLE

SEQ ID NO: 6034 - protein, 14 aa, Human immunodeficiency virus 1
  source 1..14: note = HLAs: DRB1_0101
WQLDCTHLEGKIIL

SEQ ID NO: 6035 - protein, 15 aa, Human immunodeficiency virus 1
  source 1..15: note = HLAs: DRB1_0101 DRB1_0102 DRB1_0701 DRB1_0901 DRB1_1001 DRB1_1304 DRB1_1602
WQLDCTHLEGKIILV

SEQ ID NO: 6036 - protein, 16 aa, Human immunodeficiency virus 1
  source 1..16: note = HLAs: DRB1_0101 DPA10103-DPB11501 DPA10104-DPB11501 DPA10301-DPB10101 DPA10301-DPB10201 DPA10301-DPB10202 DPA10301-DPB110601 DPA10301-DPB11801 DPA10301-DPB14001 DPA10401-DPB10101 DQA10102-DQB10501
WQLDCTHLEGKIILVA

SEQ ID NO: 6037 - protein, 17 aa, Human immunodeficiency virus 1
  source 1..17: note = HLAs: DRB1_0101 DRB1_0102 DRB1_1001 DPA10103-DPB11501 DPA10104-DPB11501 DPA10301-DPB10101 DPA10301-DPB10201 DPA10301-DPB10202 DPA10301-DPB110601 DPA10301-DPB11801 DPA10301-DPB14001 DPA10301-DPB16501 DPA10401-DPB10101 DPA10401-DPB10201 DPA10401-DPB10202 DQA10102-DQB10501
WQLDCTHLEGKIILVAV

SEQ ID NO: 6038 - protein, 18 aa, Human immunodeficiency virus 1
  source 1..18: note = HLAs: DPA10301-DPB10101 DPA10301-DPB10201 DPA10301-DPB10202 DQA10102-DQB10501
WQLDCTHLEGKIILVAVH

SEQ ID NO: 6039 - protein, 19 aa, Human immunodeficiency virus 1
  source 1..19: note = HLAs: DRB1_0101 DRB1_1001 DPA10103-DPB11501 DPA10104-DPB11501 DPA10301-DPB10101 DPA10301-DPB10201 DPA10301-DPB10202 DPA10301-DPB10401 DPA10301-DPB110601 DPA10301-DPB11801 DPA10301-DPB12301 DPA10301-DPB13901 DPA10301-DPB14001 DPA10301-DPB16501 DPA10401-DPB10101 DPA10401-DPB10201 DPA10401-DPB10202 DQA10102-DQB10501
WQLDCTHLEGKIILVAVHV

SEQ ID NO: 6040 - protein, 20 aa, Human immunodeficiency virus 1
  source 1..20: note = HLAs: DRB1_0101 DRB1_0102 DRB1_1001 DPA10103-DPB10101 DPA10103-DPB11501 DPA10103-DPB15001 DPA10104-DPB10101 DPA10104-DPB11501 DPA10105-DPB10101 DPA10105-DPB15001 DPA10202-DPB10101 DPA10202-DPB110601 DPA10202-DPB11901 DPA10301-DPB10101 DPA10301-DPB10201 DPA10301-DPB10202 DPA10301-DPB10401 DPA10301-DPB10402 DPA10301-DPB110501 DPA10301-DPB110601 DPA10301-DPB11801 DPA10301-DPB12301 DPA10301-DPB13901 DPA10301-DPB14001 DPA10301-DPB14901 DPA10301-DPB16501 DPA10301-DPB17501 DPA10301-DPB18001 DPA10401-DPB10101 DPA10401-DPB10201 DPA10401-DPB10202 DPA10401-DPB10501 DQA10102-DQB10501 DQA10102-DQB10601 DQA10102-DQB10609 DQA10103-DQB10501 DQA10103-DQB10601 DQA10103-DQB10609
WQLDCTHLEGKIILVAVHVA

SEQ ID NO: 6041 - protein, 21 aa, Human immunodeficiency virus 1
  source 1..21: note = HLAs: DRB1_0101 DRB1_1001 DPA10103-DPB11501 DPA10104-DPB11501 DPA10301-DPB10101 DPA10301-DPB10201 DPA10301-DPB10202 DPA10301-DPB110601 DPA10301-DPB11801 DPA10301-DPB14001 DPA10301-DPB16501 DPA10401-DPB10101 DQA10102-DQB10501 DQA10103-DQB10501
WQLDCTHLEGKIILVAVHVAS

SEQ ID NO: 6042 - protein, 22 aa, Human immunodeficiency virus 1
  source 1..22: note = HLAs: DRB1_0101 DRB1_0404 DRB1_0408 DRB1_1001 DRB1_1406 DPA10103-DPB11501 DPA10104-DPB11501 DPA10301-DPB10101 DPA10301-DPB10201 DPA10301-DPB10202 DPA10301-DPB110601 DPA10301-DPB11801 DPA10301-DPB14001 DPA10301-DPB16501 DPA10401-DPB10101 DQA10102-DQB10501 DQA10103-DQB10501 DQA10103-DQB10609
WQLDCTHLEGKIILVAVHVASG

SEQ ID NO: 6043 - protein, 23 aa, Human immunodeficiency virus 1
  source 1..23: note = HLAs: DRB1_0101 DRB1_0102 DRB1_0404 DRB1_0408 DRB1_0410 DRB1_0701 DRB1_0802 DRB1_0804 DRB1_0809 DRB1_0813 DRB1_1001 DRB1_1304 DRB1_1406 DPA10103-DPB11501 DPA10104-DPB11501 DPA10301-DPB10101 DPA10301-DPB10201 DPA10301-DPB10202 DPA10301-DPB110601 DPA10301-DPB11801 DPA10301-DPB14001 DPA10301-DPB16501 DPA10401-DPB10101 DPA10401-DPB10202 DQA10102-DQB10501 DQA10102-DQB10609 DQA10103-DQB10501 DQA10103-DQB10601 DQA10103-DQB10609
WQLDCTHLEGKIILVAVHVASGY

SEQ ID NO: 6044 - protein, 13 aa, Human immunodeficiency virus 1
  source 1..13: note = HLAs: DQA10102-DQB10501
WRAMASDFNLPPV

SEQ ID NO: 6045 - protein, 14 aa, Human immunodeficiency virus 1
  source 1..14: note = HLAs: DRB1_0401 DRB1_1001 DPA10301-DPB10101 DPA10301-DPB10201 DPA10401-DPB10101 DQA10102-DQB10501 DQA10102-DQB10503 DQA10102-DQB10609
WRAMASDFNLPPVV

SEQ ID NO: 6046 - protein, 15 aa, Human immunodeficiency virus 1
  source 1..15: note = HLAs: DRB1_0101 DRB1_0301 DRB1_0401 DRB1_0404 DRB1_0405 DRB1_0408 DRB1_0410 DRB1_1001 DPA10103-DPB11501 DPA10104-DPB11501 DPA10301-DPB10101 DPA10301-DPB10201 DPA10301-DPB10202 DPA10301-DPB11801 DPA10301-DPB14001 DPA10401-DPB10101 DQA10102-DQB10501 DQA10102-DQB10503 DQA10102-DQB10604 DQA10102-DQB10609 DQA10103-DQB10501 DQA10103-DQB10609
WRAMASDFNLPPVVA

SEQ ID NO: 6047 - protein, 16 aa, Human immunodeficiency virus 1
  source 1..16: note = HLAs: DRB1_0401 DRB1_0408 DRB1_1001 DPA10301-DPB10101 DPA10301-DPB10201 DPA10301-DPB10202 DPA10401-DPB10101 DQA10101-DQB10501 DQA10102-DQB10501 DQA10102-DQB10503 DQA10102-DQB10609 DQA10103-DQB10501 DQA10103-DQB10609 DQA10104-DQB10501 DQA10105-DQB10501
WRAMASDFNLPPVVAK

SEQ ID NO: 6048 - protein, 17 aa, Human immunodeficiency virus 1
  source 1..17: note = HLAs: DRB1_0401 DRB1_1001 DPA10301-DPB10101 DPA10301-DPB10201 DPA10401-DPB10101 DQA10102-DQB10501 DQA10102-DQB10503 DQA10102-DQB10609 DQA10103-DQB10501 DQA10103-DQB10609
WRAMASDFNLPPVVAKE

SEQ ID NO: 6049 - protein, 18 aa, Human immunodeficiency virus 1
  source 1..18: note = HLAs: DPA10301-DPB10101 DQA10102-DQB10501
WRAMASDFNLPPVVAKEI

SEQ ID NO: 6050 - protein, 19 aa, Human immunodeficiency virus 1
  source 1..19: note = HLAs: DRB1_1001 DPA10301-DPB10101 DPA10301-DPB10201 DPA10401-DPB10101 DQA10102-DQB10501 DQA10102-DQB10503 DQA10102-DQB10609 DQA10103-DQB10501 DQA10103-DQB10609
WRAMASDFNLPPVVAKEIV

SEQ ID NO: 6051 - protein, 20 aa, Human immunodeficiency virus 1
  source 1..20: note = HLAs: DRB1_0101 DRB1_0401 DRB1_1001 DPA10103-DPB10101 DPA10103-DPB15001 DPA10104-DPB10101 DPA10105-DPB10101 DPA10105-DPB15001 DPA10202-DPB10101 DPA10301-DPB10101 DPA10301-DPB10201 DPA10301-DPB10202 DPA10301-DPB110601 DPA10301-DPB11801 DPA10301-DPB16501 DPA10401-DPB10101 DPA10401-DPB10501 DPA10401-DPB11401 DQA10102-DQB10501 DQA10102-DQB10503 DQA10102-DQB10601 DQA10102-DQB10609 DQA10103-DQB10501 DQA10103-DQB10601 DQA10103-DQB10609
WRAMASDFNLPPVVAKEIVA

SEQ ID NO: 6052 - protein, 13 aa, Human immunodeficiency virus 1
  source 1..13: note = HLAs: DPA10103-DPB11501 DPA10104-DPB11501
WRKLVDFRELNKR

SEQ ID NO: 6053 - protein, 14 aa, Human immunodeficiency virus 1
  source 1..14: note = HLAs: DPA10103-DPB11501 DPA10103-DPB11601 DPA10103-DPB11901 DPA10103-DPB13101 DPA10104-DPB11501 DPA10202-DPB10101 DPA10202-DPB110601 DPA10202-DPB11901 DPA10202-DPB13101 DPA10301-DPB10101 DPA10301-DPB10201 DPA10301-DPB10202 DPA10301-DPB110601 DPA10301-DPB11801 DPA10301-DPB14001 DPA10301-DPB16501 DPA10401-DPB10101
WRKLVDFRELNKRT

SEQ ID NO: 6054 - protein, 15 aa, Human immunodeficiency virus 1
  source 1..15: note = HLAs: DRB1_0801 DRB1_0804 DRB1_0806 DRB1_1001 DRB1_1101 DRB1_1102 DRB1_1103 DRB1_1104 DRB1_1301 DRB1_1304 DRB1_1305 DRB1_1406 DPA10103-DPB10101 DPA10103-DPB10501 DPA10103-DPB11501 DPA10103-DPB11601 DPA10103-DPB11901 DPA10103-DPB13101 DPA10103-DPB13401 DPA10103-DPB14101 DPA10103-DPB15001 DPA10104-DPB10101 DPA10104-DPB11501 DPA10105-DPB10101 DPA10105-DPB15001 DPA10201-DPB110601 DPA10201-DPB11501 DPA10201-DPB11601 DPA10201-DPB11901 DPA10202-DPB10101 DPA10202-DPB10501 DPA10202-DPB110601 DPA10202-DPB11901 DPA10202-DPB13101 DPA10202-DPB13801 DPA10202-DPB16501 DPA10301-DPB10101 DPA10301-DPB10201 DPA10301-DPB10202 DPA10301-DPB10401 DPA10301-DPB110601 DPA10301-DPB11801 DPA10301-DPB12301 DPA10301-DPB13901 DPA10301-DPB14001 DPA10301-DPB16501 DPA10401-DPB10101 DPA10401-DPB10201 DPA10401-DPB10202 DPA10401-DPB10501
WRKLVDFRELNKRTQ

SEQ ID NO: 6055 - protein, 16 aa, Human immunodeficiency virus 1
  source 1..16: note = HLAs: DRB1_0806 DRB1_1101 DRB1_1103 DRB1_1104 DRB1_1304 DRB1_1305 DPA10103-DPB10101 DPA10103-DPB11501 DPA10103-DPB11601 DPA10103-DPB11901 DPA10103-DPB13101 DPA10103-DPB15001 DPA10104-DPB10101 DPA10104-DPB11501 DPA10105-DPB10101 DPA10105-DPB15001 DPA10202-DPB10101 DPA10202-DPB10501 DPA10202-DPB110601 DPA10202-DPB11901 DPA10202-DPB13101 DPA10202-DPB13801 DPA10301-DPB10101 DPA10301-DPB10201 DPA10301-DPB10202 DPA10301-DPB110601 DPA10301-DPB11801 DPA10301-DPB14001 DPA10301-DPB16501 DPA10401-DPB10101 DPA10401-DPB10201 DPA10401-DPB10501
WRKLVDFRELNKRTQD

SEQ ID NO: 6056 - protein, 17 aa, Human immunodeficiency virus 1
  source 1..17: note = HLAs: DRB1_0801 DRB1_0806 DRB1_1101 DRB1_1103 DRB1_1104 DRB1_1304 DRB1_1305 DPA10103-DPB11501 DPA10103-DPB11601 DPA10103-DPB11901 DPA10103-DPB13101 DPA10103-DPB13401 DPA10103-DPB15001 DPA10104-DPB11501 DPA10105-DPB15001 DPA10202-DPB10101 DPA10202-DPB10501 DPA10202-DPB110601 DPA10202-DPB11901 DPA10202-DPB13101 DPA10202-DPB13801 DPA10301-DPB10101 DPA10301-DPB10201 DPA10301-DPB10202 DPA10301-DPB110601 DPA10301-DPB11801 DPA10301-DPB14001 DPA10301-DPB16501 DPA10401-DPB10101 DPA10401-DPB10501
WRKLVDFRELNKRTQDF

SEQ ID NO: 6057 - protein, 18 aa, Human immunodeficiency virus 1
  source 1..18: note = HLAs: DRB1_1101 DRB1_1104 DRB1_1305
WRKLVDFRELNKRTQDFW

SEQ ID NO: 6058 - protein, 19 aa, Human immunodeficiency virus 1
  source 1..19: note = HLAs: DRB1_0801 DRB1_0806 DRB1_1101 DRB1_1103 DRB1_1104 DRB1_1304 DRB1_1305 DPA10103-DPB11501 DPA10103-DPB11601 DPA10103-DPB13101 DPA10104-DPB11501 DPA10202-DPB110601 DPA10202-DPB11901 DPA10202-DPB13101 DPA10301-DPB10101 DPA10301-DPB10201 DPA10301-DPB10202 DPA10301-DPB110601 DPA10301-DPB11801 DPA10301-DPB14001 DPA10401-DPB10101
WRKLVDFRELNKRTQDFWE

SEQ ID NO: 6059 - protein, 20 aa, Human immunodeficiency virus 1
  source 1..20: note = HLAs: DRB1_0801 DRB1_0802 DRB1_0804 DRB1_0806 DRB1_0809 DRB1_1001 DRB1_1101 DRB1_1103 DRB1_1104 DRB1_1304 DRB1_1305 DPA10103-DPB10101 DPA10103-DPB10501 DPA10103-DPB11501 DPA10103-DPB11601 DPA10103-DPB11901 DPA10103-DPB13101 DPA10103-DPB13401 DPA10103-DPB15001 DPA10104-DPB10101 DPA10104-DPB11501 DPA10105-DPB10101 DPA10105-DPB15001 DPA10201-DPB110601 DPA10201-DPB11601 DPA10201-DPB11901 DPA10202-DPB10101 DPA10202-DPB10501 DPA10202-DPB110601 DPA10202-DPB11901 DPA10202-DPB13101 DPA10202-DPB13801 DPA10202-DPB16501 DPA10301-DPB10101 DPA10301-DPB10201 DPA10301-DPB10202 DPA10301-DPB10401 DPA10301-DPB110601 DPA10301-DPB11801 DPA10301-DPB12301 DPA10301-DPB13901 DPA10301-DPB14001 DPA10301-DPB16501 DPA10401-DPB10101 DPA10401-DPB10201 DPA10401-DPB10202 DPA10401-DPB10501
WRKLVDFRELNKRTQDFWEV

SEQ ID NO: 6060 - protein, 21 aa, Human immunodeficiency virus 1
  source 1..21: note = HLAs: DRB1_0801 DRB1_0806 DRB1_1101 DRB1_1103 DRB1_1104 DRB1_1304 DRB1_1305 DPA10103-DPB10101 DPA10103-DPB11501 DPA10103-DPB11601 DPA10103-DPB11901 DPA10103-DPB13101 DPA10103-DPB13401 DPA10103-DPB15001 DPA10104-DPB10101 DPA10104-DPB11501 DPA10105-DPB10101 DPA10105-DPB15001 DPA10202-DPB10101 DPA10202-DPB110601 DPA10202-DPB11901 DPA10202-DPB13101 DPA10301-DPB10101 DPA10301-DPB10201 DPA10301-DPB10202 DPA10301-DPB110601 DPA10301-DPB11801 DPA10301-DPB14001 DPA10301-DPB16501 DPA10401-DPB10101 DPA10401-DPB10501
WRKLVDFRELNKRTQDFWEVQ

SEQ ID NO: 6061 - protein, 22 aa, Human immunodeficiency virus 1
  source 1..22: note = HLAs: DRB1_0801 DRB1_0806 DRB1_1101 DRB1_1103 DRB1_1104 DRB1_1304 DRB1_1305 DPA10103-DPB10101 DPA10103-DPB11501 DPA10103-DPB11601 DPA10103-DPB11901 DPA10103-DPB13101 DPA10103-DPB13401 DPA10103-DPB15001 DPA10104-DPB10101 DPA10104-DPB11501 DPA10105-DPB10101 DPA10105-DPB15001 DPA10202-DPB10101 DPA10202-DPB10501 DPA10202-DPB110601 DPA10202-DPB11901 DPA10202-DPB13101 DPA10202-DPB13801 DPA10301-DPB10101 DPA10301-DPB10201 DPA10301-DPB10202 DPA10301-DPB10401 DPA10301-DPB110601 DPA10301-DPB11801 DPA10301-DPB12301 DPA10301-DPB13901 DPA10301-DPB14001 DPA10301-DPB16501 DPA10401-DPB10101 DPA10401-DPB10201 DPA10401-DPB10202 DPA10401-DPB10501
WRKLVDFRELNKRTQDFWEVQL

SEQ ID NO: 6062 - protein, 23 aa, Human immunodeficiency virus 1
  source 1..23: note = HLAs: DRB1_0801 DRB1_0806 DRB1_1101 DRB1_1103 DRB1_1104 DRB1_1304 DRB1_1305 DPA10103-DPB10101 DPA10103-DPB10501 DPA10103-DPB11501 DPA10103-DPB11601 DPA10103-DPB11901 DPA10103-DPB13101 DPA10103-DPB13401 DPA10103-DPB15001 DPA10104-DPB10101 DPA10104-DPB11501 DPA10105-DPB10101 DPA10105-DPB15001 DPA10202-DPB10101 DPA10202-DPB10501 DPA10202-DPB110601 DPA10202-DPB11901 DPA10202-DPB13101 DPA10202-DPB13801 DPA10301-DPB10101 DPA10301-DPB10201 DPA10301-DPB10202 DPA10301-DPB10401 DPA10301-DPB110601 DPA10301-DPB11801 DPA10301-DPB12301 DPA10301-DPB13901 DPA10301-DPB14001 DPA10301-DPB16501 DPA10401-DPB10101 DPA10401-DPB10201 DPA10401-DPB10202 DPA10401-DPB10501 DQA10102-DQB10501
WRKLVDFRELNKRTQDFWEVQLG

SEQ ID NO: 6063 - protein, 24 aa, Human immunodeficiency virus 1
  source 1..24: note = HLAs: DRB1_0801 DRB1_0806 DRB1_1001 DRB1_1101 DRB1_1103 DRB1_1104 DRB1_1304 DRB1_1305 DPA10103-DPB10101 DPA10103-DPB10501 DPA10103-DPB11501 DPA10103-DPB11601 DPA10103-DPB11901 DPA10103-DPB13101 DPA10103-DPB13401 DPA10103-DPB15001 DPA10104-DPB10101 DPA10104-DPB11501 DPA10105-DPB10101 DPA10105-DPB15001 DPA10202-DPB10101 DPA10202-DPB10501 DPA10202-DPB110601 DPA10202-DPB11901 DPA10202-DPB13101 DPA10202-DPB13801 DPA10301-DPB10101 DPA10301-DPB10201 DPA10301-DPB10202 DPA10301-DPB10401 DPA10301-DPB110601 DPA10301-DPB11801 DPA10301-DPB12301 DPA10301-DPB13901 DPA10301-DPB14001 DPA10301-DPB16501 DPA10401-DPB10101 DPA10401-DPB10201 DPA10401-DPB10202 DPA10401-DPB10501 DQA10102-DQB10501
WRKLVDFRELNKRTQDFWEVQLGI

SEQ ID NO: 6064 - protein, 25 aa, Human immunodeficiency virus 1
  source 1..25: note = HLAs: DRB1_0801 DRB1_0806 DRB1_1001 DRB1_1101 DRB1_1103 DRB1_1104 DRB1_1304 DRB1_1305 DPA10103-DPB10101 DPA10103-DPB10202 DPA10103-DPB10501 DPA10103-DPB11501 DPA10103-DPB11601 DPA10103-DPB11901 DPA10103-DPB13101 DPA10103-DPB13401 DPA10103-DPB15001 DPA10104-DPB10101 DPA10104-DPB11501 DPA10105-DPB10101 DPA10105-DPB15001 DPA10201-DPB11501 DPA10201-DPB11601 DPA10202-DPB10101 DPA10202-DPB10501 DPA10202-DPB110601 DPA10202-DPB11901 DPA10202-DPB13101 DPA10202-DPB13801 DPA10202-DPB16501 DPA10301-DPB10101 DPA10301-DPB10201 DPA10301-DPB10202 DPA10301-DPB10401 DPA10301-DPB110601 DPA10301-DPB11801 DPA10301-DPB12301 DPA10301-DPB13901 DPA10301-DPB14001 DPA10301-DPB16501 DPA10401-DPB10101 DPA10401-DPB10201 DPA10401-DPB10202 DPA10401-DPB10501 DQA10102-DQB10501 DQA10102-DQB10503
WRKLVDFRELNKRTQDFWEVQLGIP

SEQ ID NO: 6065 - protein, 15 aa, Human immunodeficiency virus 1
  source 1..15: note = HLAs: DRB1_0101 DRB1_0102 DRB1_0804 DRB1_0806 DRB1_1001 DRB1_1101 DRB1_1102 DRB1_1103 DRB1_1104 DRB1_1114 DRB1_1202 DRB1_1301 DRB1_1302 DRB1_1304 DRB1_1305 DRB1_1406
WTVNDIQKLVGKLNW

SEQ ID NO: 6066 - protein, 16 aa, Human immunodeficiency virus 1
  source 1..16: note = HLAs: DRB1_0101 DRB1_0102 DRB1_0806 DRB1_1001 DRB1_1104 DQA10102-DQB10501
WTVNDIQKLVGKLNWA

SEQ ID NO: 6067 - protein, 17 aa, Human immunodeficiency virus 1
  source 1..17: note = HLAs: DRB1_0101 DRB1_0102 DRB1_0801 DRB1_0804 DRB1_0806 DRB1_1001 DRB1_1101 DRB1_1102 DRB1_1103 DRB1_1104 DRB1_1301 DRB1_1304 DRB1_1305 DRB1_1406 DQA10102-DQB10501
WTVNDIQKLVGKLNWAS

SEQ ID NO: 6068 - protein, 18 aa, Human immunodeficiency virus 1
  source 1..18: note = HLAs: DRB1_0101 DRB1_1001
WTVNDIQKLVGKLNWASQ

SEQ ID NO: 6069 - protein, 19 aa, Human immunodeficiency virus 1
  source 1..19: note = HLAs: DRB1_0101 DRB1_0102 DRB1_0804 DRB1_0806 DRB1_1001 DRB1_1102 DRB1_1103 DRB1_1104 DRB1_1114 DRB1_1301 DRB1_1302 DRB1_1304 DRB1_1406 DRB1_1501 DQA10102-DQB10501 DQA10103-DQB10501
WTVNDIQKLVGKLNWASQI

SEQ ID NO: 6070 - protein, 20 aa, Human immunodeficiency virus 1
  source 1..20: note = HLAs: DRB1_0101 DRB1_0102 DRB1_0404 DRB1_0410 DRB1_0801 DRB1_0802 DRB1_0804 DRB1_0806 DRB1_0809 DRB1_0813 DRB1_1001 DRB1_1101 DRB1_1102 DRB1_1103 DRB1_1104 DRB1_1114 DRB1_1301 DRB1_1302 DRB1_1304 DRB1_1305 DRB1_1406 DRB1_1501 DRB1_1502 DRB1_1503 DRB1_1601 DRB1_1602 DPA10202-DPB10101 DPA10202-DPB110601 DPA10202-DPB11901 DPA10301-DPB10101 DPA10301-DPB10201 DPA10301-DPB10202 DPA10301-DPB110601 DPA10301-DPB11801 DPA10301-DPB14001 DPA10401-DPB10101 DPA10401-DPB10201 DPA10401-DPB10501 DQA10102-DQB10501 DQA10103-DQB10501 DQA10103-DQB10609
WTVNDIQKLVGKLNWASQIY

SEQ ID NO: 6071 - protein, 21 aa, Human immunodeficiency virus 1
  source 1..21: note = HLAs: DRB1_0101 DRB1_0102 DRB1_0801 DRB1_0804 DRB1_0806 DRB1_1001 DRB1_1101 DRB1_1102 DRB1_1103 DRB1_1104 DRB1_1114 DRB1_1301 DRB1_1302 DRB1_1304 DRB1_1305 DRB1_1406 DRB1_1501 DQA10102-DQB10501 DQA10103-DQB10501
WTVNDIQKLVGKLNWASQIYP

SEQ ID NO: 6072 - protein, 22 aa, Human immunodeficiency virus 1
  source 1..22: note = HLAs: DRB1_0101 DRB1_0102 DRB1_0404 DRB1_0801 DRB1_0804 DRB1_0806 DRB1_0813 DRB1_1001 DRB1_1101 DRB1_1102 DRB1_1103 DRB1_1104 DRB1_1114 DRB1_1301 DRB1_1302 DRB1_1304 DRB1_1305 DRB1_1406 DRB1_1501 DPA10301-DPB10101 DPA10301-DPB11801 DPA10401-DPB10101 DQA10102-DQB10501 DQA10102-DQB10601 DQA10102-DQB10602 DQA10102-DQB10609 DQA10102-DQB10611 DQA10103-DQB10501 DQA10103-DQB10601 DQA10103-DQB10602 DQA10103-DQB10609 DQA10201-DQB10301
WTVNDIQKLVGKLNWASQIYPG

SEQ ID NO: 6073 - protein, 23 aa, Human immunodeficiency virus 1
  source 1..23: note = HLAs: DRB1_0101 DRB1_0102 DRB1_0404 DRB1_0410 DRB1_0801 DRB1_0802 DRB1_0804 DRB1_0806 DRB1_0809 DRB1_0813 DRB1_1001 DRB1_1101 DRB1_1102 DRB1_1103 DRB1_1104 DRB1_1114 DRB1_1301 DRB1_1302 DRB1_1304 DRB1_1305 DRB1_1406 DRB1_1501 DRB1_1602 DPA10103-DPB11501 DPA10104-DPB11501 DPA10202-DPB10101 DPA10301-DPB10101 DPA10301-DPB10201 DPA10301-DPB10202 DPA10301-DPB110601 DPA10301-DPB11801 DPA10301-DPB14001 DPA10401-DPB10101 DQA10101-DQB10601 DQA10102-DQB10501 DQA10102-DQB10503 DQA10102-DQB10601 DQA10102-DQB10602 DQA10102-DQB10609 DQA10102-DQB10610 DQA10102-DQB10611 DQA10103-DQB10501 DQA10103-DQB10601 DQA10103-DQB10602 DQA10103-DQB10609 DQA10201-DQB10301
WTVNDIQKLVGKLNWASQIYPGI

SEQ ID NO: 6074 - protein, 24 aa, Human immunodeficiency virus 1
  source 1..24: note = HLAs: DRB1_0101 DRB1_0102 DRB1_0404 DRB1_0410 DRB1_0801 DRB1_0802 DRB1_0804 DRB1_0806 DRB1_0809 DRB1_0813 DRB1_1001 DRB1_1101 DRB1_1102 DRB1_1103 DRB1_1104 DRB1_1114 DRB1_1301 DRB1_1302 DRB1_1304 DRB1_1305 DRB1_1406 DRB1_1501 DRB1_1601 DRB1_1602 DPA10103-DPB10101 DPA10103-DPB11501 DPA10104-DPB10101 DPA10104-DPB11501 DPA10105-DPB10101 DPA10202-DPB10101 DPA10301-DPB10101 DPA10301-DPB10201 DPA10301-DPB10202 DPA10301-DPB10401 DPA10301-DPB110601 DPA10301-DPB11801 DPA10301-DPB12301 DPA10301-DPB13901 DPA10301-DPB14001 DPA10301-DPB16501 DPA10401-DPB10101 DPA10401-DPB10201 DPA10401-DPB10202 DQA10101-DQB10601 DQA10102-DQB10501 DQA10102-DQB10503 DQA10102-DQB10601 DQA10102-DQB10602 DQA10102-DQB10609 DQA10102-DQB10610 DQA10102-DQB10611 DQA10103-DQB10501 DQA10103-DQB10503 DQA10103-DQB10601 DQA10103-DQB10602 DQA10103-DQB10603 DQA10103-DQB10609 DQA10201-DQB10301
WTVNDIQKLVGKLNWASQIYPGIK

SEQ ID NO: 6075 - protein, 25 aa, Human immunodeficiency virus 1
  source 1..25: note = HLAs: DRB1_0101 DRB1_0102 DRB1_0404 DRB1_0410 DRB1_0801 DRB1_0802 DRB1_0804 DRB1_0806 DRB1_0809 DRB1_0813 DRB1_0901 DRB1_1001 DRB1_1101 DRB1_1102 DRB1_1103 DRB1_1104 DRB1_1114 DRB1_1301 DRB1_1302 DRB1_1304 DRB1_1305 DRB1_1406 DRB1_1501 DRB1_1502 DRB1_1503 DRB1_1601 DRB1_1602 DPA10103-DPB10101 DPA10103-DPB10202 DPA10103-DPB11501 DPA10103-DPB15001 DPA10104-DPB10101 DPA10104-DPB11501 DPA10105-DPB10101 DPA10105-DPB15001 DPA10202-DPB10101 DPA10202-DPB10202 DPA10202-DPB110601 DPA10202-DPB11901 DPA10301-DPB10101 DPA10301-DPB10201 DPA10301-DPB10202 DPA10301-DPB10401 DPA10301-DPB110601 DPA10301-DPB11801 DPA10301-DPB12301 DPA10301-DPB13901 DPA10301-DPB14001 DPA10301-DPB16501 DPA10401-DPB10101 DPA10401-DPB10201 DPA10401-DPB10202 DPA10401-DPB10501 DQA10101-DQB10601 DQA10101-DQB10602 DQA10102-DQB10501 DQA10102-DQB10503 DQA10102-DQB10601 DQA10102-DQB10602 DQA10102-DQB10603 DQA10102-DQB10609 DQA10102-DQB10610 DQA10102-DQB10611 DQA10102-DQB10614 DQA10103-DQB10501 DQA10103-DQB10503 DQA10103-DQB10601; note = HLAs: DQA10103-DQB10602 DQA10103-DQB10603 DQA10103-DQB10608 DQA10103-DQB10609 DQA10103-DQB10614 DQA10104-DQB10602 DQA10105-DQB10602 DQA10201-DQB10301 DQA10201-DQB10303 DQA10301-DQB10301 DQA10302-DQB10301 DQA10303-DQB10301 DQA10501-DQB10301 DQA10501-DQB10319 DQA10503-DQB10301 DQA10505-DQB10301 DQA10505-DQB10309 DQA10505-DQB10319 DQA10508-DQB10301 DQA10509-DQB10301 DQA10601-DQB10301
WTVNDIQKLVGKLNWASQIYPGIKV

SEQ ID NO: 6076 - protein, 13 aa, Human immunodeficiency virus 1
  source 1..13: note = HLAs: DPA10103-DPB10101 DPA10103-DPB10201 DPA10103-DPB10202 DPA10103-DPB10401 DPA10103-DPB112601 DPA10103-DPB11501 DPA10103-DPB11601 DPA10103-DPB12301 DPA10103-DPB13101 DPA10103-DPB13401 DPA10103-DPB13901 DPA10103-DPB14001 DPA10103-DPB14801 DPA10104-DPB10101 DPA10104-DPB11501 DPA10105-DPB10101 DPA10105-DPB10401 DPA10106-DPB10101 DPA10201-DPB10101 DPA10201-DPB11501 DPA10202-DPB10101 DPA10202-DPB13101 DPA10301-DPB10101 DPA10301-DPB10201 DPA10301-DPB10202 DPA10301-DPB10401 DPA10301-DPB10402 DPA10301-DPB110501 DPA10301-DPB110601 DPA10301-DPB11801 DPA10301-DPB12301 DPA10301-DPB13901 DPA10301-DPB14001 DPA10301-DPB14901 DPA10301-DPB16501 DPA10301-DPB18001 DPA10401-DPB10101 DPA10401-DPB10201 DPA10401-DPB10202
WTYQIYQEPFKNL

SEQ ID NO: 6077 - protein, 14 aa, Human immunodeficiency virus 1
  source 1..14: note = HLAs: DRB1_1001 DPA10103-DPB10101 DPA10103-DPB10201 DPA10103-DPB10202 DPA10103-DPB10401 DPA10103-DPB10402 DPA10103-DPB110501 DPA10103-DPB112601 DPA10103-DPB11501 DPA10103-DPB11601 DPA10103-DPB11801 DPA10103-DPB11901 DPA10103-DPB12301 DPA10103-DPB13101 DPA10103-DPB13401 DPA10103-DPB13901 DPA10103-DPB14001 DPA10103-DPB14101 DPA10103-DPB14801 DPA10103-DPB14901 DPA10103-DPB15001 DPA10103-DPB15101 DPA10103-DPB15901 DPA10103-DPB18001 DPA10104-DPB10101 DPA10104-DPB11501 DPA10105-DPB10101 DPA10105-DPB10401 DPA10105-DPB11801 DPA10105-DPB15001 DPA10106-DPB10101 DPA10201-DPB10101 DPA10201-DPB10201 DPA10201-DPB10202 DPA10201-DPB10401 DPA10201-DPB110601 DPA10201-DPB11501 DPA10201-DPB11601 DPA10201-DPB11901 DPA10201-DPB13401 DPA10202-DPB10101 DPA10202-DPB10201 DPA10202-DPB10202 DPA10202-DPB10401 DPA10202-DPB10501 DPA10202-DPB110601 DPA10202-DPB11801 DPA10202-DPB11901 DPA10202-DPB13101 DPA10202-DPB13801 DPA10202-DPB16501 DPA10301-DPB10101 DPA10301-DPB10201 DPA10301-DPB10202 DPA10301-DPB10401; note = HLAs: DPA10301-DPB10402 DPA10301-DPB110501 DPA10301-DPB110601 DPA10301-DPB11801 DPA10301-DPB12301 DPA10301-DPB13901 DPA10301-DPB14001 DPA10301-DPB14901 DPA10301-DPB16501 DPA10301-DPB17501 DPA10301-DPB18001 DPA10401-DPB10101 DPA10401-DPB10201 DPA10401-DPB10202 DPA10401-DPB10402 DPA10401-DPB110501 DPA10401-DPB14901
WTYQIYQEPFKNLK

SEQ ID NO: 6078 - protein, 15 aa, Human immunodeficiency virus 1
  source 1..15: note = HLAs: DRB1_0101 DRB1_1001 DRB1_1304 DRB1_1501 DRB1_1503 DRB1_1601 DRB1_1602 DPA10103-DPB10101 DPA10103-DPB10201 DPA10103-DPB10202 DPA10103-DPB10401 DPA10103-DPB10402 DPA10103-DPB10501 DPA10103-DPB110501 DPA10103-DPB112601 DPA10103-DPB11501 DPA10103-DPB11601 DPA10103-DPB11801 DPA10103-DPB11901 DPA10103-DPB12301 DPA10103-DPB13101 DPA10103-DPB13401 DPA10103-DPB13901 DPA10103-DPB14001 DPA10103-DPB14101 DPA10103-DPB14801 DPA10103-DPB14901 DPA10103-DPB15001 DPA10103-DPB15101 DPA10103-DPB15901 DPA10103-DPB18001 DPA10104-DPB10101 DPA10104-DPB11501 DPA10105-DPB10101 DPA10105-DPB10401 DPA10105-DPB11801 DPA10105-DPB15001 DPA10106-DPB10101 DPA10201-DPB10101 DPA10201-DPB10201 DPA10201-DPB10202 DPA10201-DPB10401 DPA10201-DPB10501 DPA10201-DPB110601 DPA10201-DPB11501 DPA10201-DPB11601 DPA10201-DPB11801 DPA10201-DPB11901 DPA10201-DPB13401 DPA10202-DPB10101 DPA10202-DPB10201 DPA10202-DPB10202 DPA10202-DPB10401 DPA10202-DPB10402 DPA10202-DPB10501 DPA10202-DPB110001 DPA10202-DPB110501 DPA10202-DPB110601; note = HLAs: DPA10202-DPB11801 DPA10202-DPB11901 DPA10202-DPB13101 DPA10202-DPB13801 DPA10202-DPB16501 DPA10301-DPB10101 DPA10301-DPB10201 DPA10301-DPB10202 DPA10301-DPB10401 DPA10301-DPB10402 DPA10301-DPB110501 DPA10301-DPB110601 DPA10301-DPB11801 DPA10301-DPB12301 DPA10301-DPB13901 DPA10301-DPB14001 DPA10301-DPB14901 DPA10301-DPB15501 DPA10301-DPB16501 DPA10301-DPB17501 DPA10301-DPB18001 DPA10401-DPB10101 DPA10401-DPB10201 DPA10401-DPB10202 DPA10401-DPB10402 DPA10401-DPB10501 DPA10401-DPB110501 DPA10401-DPB14901
WTYQIYQEPFKNLKT

SEQ ID NO: 6079 - protein, 16 aa, Human immunodeficiency virus 1
  source 1..16: note = HLAs: DRB1_1001 DPA10103-DPB10101 DPA10103-DPB10201 DPA10103-DPB10202 DPA10103-DPB10401 DPA10103-DPB10402 DPA10103-DPB110501 DPA10103-DPB112601 DPA10103-DPB11501 DPA10103-DPB11601 DPA10103-DPB11801 DPA10103-DPB11901 DPA10103-DPB12301 DPA10103-DPB13101 DPA10103-DPB13401 DPA10103-DPB13901 DPA10103-DPB14001 DPA10103-DPB14101 DPA10103-DPB14801 DPA10103-DPB14901 DPA10103-DPB15001 DPA10103-DPB15101 DPA10103-DPB15901 DPA10103-DPB18001 DPA10104-DPB10101 DPA10104-DPB11501 DPA10105-DPB10101 DPA10105-DPB10401 DPA10105-DPB11801 DPA10105-DPB15001 DPA10106-DPB10101 DPA10201-DPB10101 DPA10201-DPB10201 DPA10201-DPB10202 DPA10201-DPB10401 DPA10201-DPB110601 DPA10201-DPB11501 DPA10201-DPB11601 DPA10201-DPB11801 DPA10201-DPB11901 DPA10201-DPB13401 DPA10202-DPB10101 DPA10202-DPB10201 DPA10202-DPB10202 DPA10202-DPB10401 DPA10202-DPB10501 DPA10202-DPB110601 DPA10202-DPB11801 DPA10202-DPB11901 DPA10202-DPB13101 DPA10202-DPB13801 DPA10202-DPB16501 DPA10301-DPB10101 DPA10301-DPB10201 DPA10301-DPB10202; note = HLAs: DPA10301-DPB10401 DPA10301-DPB10402 DPA10301-DPB110501 DPA10301-DPB110601 DPA10301-DPB11801 DPA10301-DPB12301 DPA10301-DPB13901 DPA10301-DPB14001 DPA10301-DPB14901 DPA10301-DPB16501 DPA10301-DPB17501 DPA10301-DPB18001 DPA10401-DPB10101 DPA10401-DPB10201 DPA10401-DPB10202 DPA10401-DPB10402 DPA10401-DPB10501 DPA10401-DPB110501 DPA10401-DPB14901
WTYQIYQEPFKNLKTG

SEQ ID NO: 6080 - protein, 17 aa, Human immunodeficiency virus 1
  source 1..17: note = HLAs: DRB1_1001 DPA10103-DPB10101 DPA10103-DPB10201 DPA10103-DPB10202 DPA10103-DPB10401 DPA10103-DPB10402 DPA10103-DPB110501 DPA10103-DPB112601 DPA10103-DPB11501 DPA10103-DPB11601 DPA10103-DPB11801 DPA10103-DPB11901 DPA10103-DPB12301 DPA10103-DPB13101 DPA10103-DPB13401 DPA10103-DPB13901 DPA10103-DPB14001 DPA10103-DPB14101 DPA10103-DPB14801 DPA10103-DPB14901 DPA10103-DPB15001 DPA10103-DPB15101 DPA10103-DPB15901 DPA10103-DPB18001 DPA10104-DPB10101 DPA10104-DPB11501 DPA10105-DPB10101 DPA10105-DPB10401 DPA10105-DPB11801 DPA10105-DPB15001 DPA10106-DPB10101 DPA10201-DPB10101 DPA10201-DPB10201 DPA10201-DPB10202 DPA10201-DPB10401 DPA10201-DPB110601 DPA10201-DPB11501 DPA10201-DPB11601 DPA10201-DPB11901 DPA10201-DPB13401 DPA10202-DPB10101 DPA10202-DPB10201 DPA10202-DPB10202 DPA10202-DPB10401 DPA10202-DPB10501 DPA10202-DPB110601 DPA10202-DPB11801 DPA10202-DPB11901 DPA10202-DPB13101 DPA10202-DPB13801 DPA10202-DPB16501 DPA10301-DPB10101 DPA10301-DPB10201 DPA10301-DPB10202 DPA10301-DPB10401; note = HLAs: DPA10301-DPB10402 DPA10301-DPB110501 DPA10301-DPB110601 DPA10301-DPB11801 DPA10301-DPB12301 DPA10301-DPB13901 DPA10301-DPB14001 DPA10301-DPB14901 DPA10301-DPB16501 DPA10301-DPB17501 DPA10301-DPB18001 DPA10401-DPB10101 DPA10401-DPB10201 DPA10401-DPB10202 DPA10401-DPB10402 DPA10401-DPB110501 DPA10401-DPB14901
WTYQIYQEPFKNLKTGK

SEQ ID NO: 6081 - protein, 18 aa, Human immunodeficiency virus 1
  source 1..18: note = HLAs: DPA10103-DPB10101 DPA10103-DPB10201 DPA10103-DPB10202 DPA10103-DPB10401 DPA10103-DPB112601 DPA10103-DPB11501 DPA10103-DPB11601 DPA10103-DPB11901 DPA10103-DPB12301 DPA10103-DPB13101 DPA10103-DPB13401 DPA10103-DPB13901 DPA10103-DPB14001 DPA10103-DPB14101 DPA10103-DPB14801 DPA10104-DPB10101 DPA10104-DPB11501 DPA10105-DPB10101 DPA10105-DPB10401 DPA10106-DPB10101 DPA10201-DPB10101 DPA10201-DPB11501 DPA10201-DPB11601 DPA10202-DPB10101 DPA10202-DPB10202 DPA10202-DPB110601 DPA10202-DPB11901 DPA10202-DPB13101 DPA10202-DPB16501 DPA10301-DPB10101 DPA10301-DPB10201 DPA10301-DPB10202 DPA10301-DPB10401 DPA10301-DPB10402 DPA10301-DPB110501 DPA10301-DPB110601 DPA10301-DPB11801 DPA10301-DPB12301 DPA10301-DPB13901 DPA10301-DPB14001 DPA10301-DPB14901 DPA10301-DPB16501 DPA10301-DPB18001 DPA10401-DPB10101 DPA10401-DPB10201 DPA10401-DPB10202
WTYQIYQEPFKNLKTGKY

SEQ ID NO: 6082 - protein, 19 aa, Human immunodeficiency virus 1
  source 1..19: note = HLAs: DRB1_0101 DRB1_1001 DRB1_1101 DRB1_1305 DRB1_1601 DPA10103-DPB10101 DPA10103-DPB10201 DPA10103-DPB10202 DPA10103-DPB10401 DPA10103-DPB112601 DPA10103-DPB11501 DPA10103-DPB11601 DPA10103-DPB11801 DPA10103-DPB11901 DPA10103-DPB12301 DPA10103-DPB13101 DPA10103-DPB13401 DPA10103-DPB13901 DPA10103-DPB14001 DPA10103-DPB14101 DPA10103-DPB14801 DPA10103-DPB15001 DPA10103-DPB15901 DPA10104-DPB10101 DPA10104-DPB11501 DPA10105-DPB10101 DPA10105-DPB10401 DPA10105-DPB11801 DPA10105-DPB15001 DPA10106-DPB10101 DPA10201-DPB10101 DPA10201-DPB10202 DPA10201-DPB10401 DPA10201-DPB110601 DPA10201-DPB11501 DPA10201-DPB11601 DPA10201-DPB11901 DPA10201-DPB13401 DPA10202-DPB10101 DPA10202-DPB10201 DPA10202-DPB10202 DPA10202-DPB10401 DPA10202-DPB10501 DPA10202-DPB110601 DPA10202-DPB11801 DPA10202-DPB11901 DPA10202-DPB13101 DPA10202-DPB13801 DPA10202-DPB16501 DPA10301-DPB10101 DPA10301-DPB10201 DPA10301-DPB10202 DPA10301-DPB10401 DPA10301-DPB10402 DPA10301-DPB110501 DPA10301-DPB110601 DPA10301-DPB11801; note = HLAs: DPA10301-DPB12301 DPA10301-DPB13901 DPA10301-DPB14001 DPA10301-DPB14901 DPA10301-DPB16501 DPA10301-DPB17501 DPA10301-DPB18001 DPA10401-DPB10101 DPA10401-DPB10201 DPA10401-DPB10202
WTYQIYQEPFKNLKTGKYA

SEQ ID NO: 6083 - protein, 15 aa, Human immunodeficiency virus 1
  source 1..15: note = HLAs: DRB1_0101 DRB1_0102 DRB1_1001 DPA10103-DPB11501 DPA10104-DPB11501 DPA10301-DPB10101 DPA10301-DPB10201 DPA10301-DPB10202
WVKVVEEKAFSPEVI

SEQ ID NO: 6084 - protein, 16 aa, Human immunodeficiency virus 1
  source 1..16: note = HLAs: DPA10301-DPB10101 DPA10301-DPB10201 DPA10301-DPB10202 DPA10401-DPB10101 DQA10102-DQB10501
WVKVVEEKAFSPEVIP

SEQ ID NO: 6085 - protein, 17 aa, Human immunodeficiency virus 1
  source 1..17: note = HLAs: DPA10301-DPB10101 DPA10301-DPB10201 DPA10401-DPB10101 DQA10102-DQB10501
WVKVVEEKAFSPEVIPM

SEQ ID NO: 6086 - protein, 18 aa, Human immunodeficiency virus 1
  source 1..18: note = HLAs: DPA10301-DPB10101 DPA10301-DPB10201 DPA10301-DPB10202 DPA10401-DPB10101 DQA10102-DQB10501
WVKVVEEKAFSPEVIPMF

SEQ ID NO: 6087 - protein, 24 aa, Human immunodeficiency virus 1
  source 1..24: note = HLAs: DRB1_0101
WVPAHKGIGGNEQVDKLVSSGIRK

SEQ ID NO: 6088 - protein, 25 aa, Human immunodeficiency virus 1
  source 1..25: note = HLAs: DRB1_0101 DRB1_0102 DRB1_0701 DRB1_0901 DRB1_1001 DRB1_1102 DRB1_1114 DRB1_1301 DRB1_1302 DRB1_1304 DRB1_1406 DPA10202-DPB10101 DPA10301-DPB10101 DPA10301-DPB10201 DPA10301-DPB10202 DPA10301-DPB10401 DPA10301-DPB110601 DPA10301-DPB11801 DPA10301-DPB12301 DPA10301-DPB13901 DPA10301-DPB14001 DPA10401-DPB10101 DPA10401-DPB10201 DPA10401-DPB10202 DQA10102-DQB10501 DQA10103-DQB10601 DQA10103-DQB10609
WVPAHKGIGGNEQVDKLVSSGIRKV

SEQ ID NO: 6089 - protein, 13 aa, Human immunodeficiency virus 1
  source 1..13: note = HLAs: DQA10102-DQB10501
YALGIIQAQPDKS

SEQ ID NO: 6090 - protein, 14 aa, Human immunodeficiency virus 1
  source 1..14: note = HLAs: DRB1_1001 DQA10102-DQB10501 DQA10102-DQB10601 DQA10102-DQB10609 DQA10103-DQB10601 DQA10201-DQB10301 DQA10501-DQB10301 DQA10501-DQB10319 DQA10503-DQB10301 DQA10505-DQB10301 DQA10505-DQB10309 DQA10505-DQB10319 DQA10508-DQB10301 DQA10509-DQB10301
YALGIIQAQPDKSE

SEQ ID NO: 6091 - protein, 15 aa, Human immunodeficiency virus 1
  source 1..15: note = HLAs: DRB1_0101 DRB1_0102 DRB1_0401 DRB1_0404 DRB1_0405 DRB1_0408 DRB1_0410 DRB1_1001 DRB1_1406 DQA10102-DQB10501 DQA10102-DQB10503 DQA10102-DQB10601 DQA10102-DQB10609 DQA10103-DQB10601 DQA10201-DQB10301 DQA10301-DQB10301 DQA10302-DQB10301 DQA10303-DQB10301 DQA10501-DQB10301 DQA10501-DQB10319 DQA10503-DQB10301 DQA10505-DQB10301 DQA10505-DQB10302 DQA10505-DQB10309 DQA10505-DQB10319 DQA10506-DQB10303 DQA10508-DQB10301 DQA10509-DQB10301
YALGIIQAQPDKSES

SEQ ID NO: 6092 - protein, 16 aa, Human immunodeficiency virus 1
  source 1..16: note = HLAs: DRB1_1001 DQA10102-DQB10501 DQA10102-DQB10503 DQA10102-DQB10601 DQA10102-DQB10609 DQA10103-DQB10601 DQA10201-DQB10301 DQA10301-DQB10301 DQA10302-DQB10301 DQA10303-DQB10301 DQA10401-DQB10301 DQA10401-DQB10319 DQA10501-DQB10301 DQA10501-DQB10319 DQA10503-DQB10301 DQA10505-DQB10301 DQA10505-DQB10309 DQA10505-DQB10319 DQA10508-DQB10301 DQA10509-DQB10301
YALGIIQAQPDKSESE

SEQ ID NO: 6093 - protein, 17 aa, Human immunodeficiency virus 1
  source 1..17: note = HLAs: DRB1_0410 DRB1_1001 DQA10102-DQB10501 DQA10102-DQB10601 DQA10102-DQB10609 DQA10103-DQB10601 DQA10201-DQB10301
YALGIIQAQPDKSESEL

SEQ ID NO: 6094 - protein, 18 aa, Human immunodeficiency virus 1
  source 1..18: note = HLAs: DQA10102-DQB10501
YALGIIQAQPDKSESELV

SEQ ID NO: 6095 - protein, 16 aa, Human immunodeficiency virus 1
  source 1..16: note = HLAs: DPA10301-DPB10101 DPA10401-DPB10101
YELHPDKWTVQPIQLP

SEQ ID NO: 6096 - protein, 14 aa, Human immunodeficiency virus 1
  source 1..14: note = HLAs: DQA10201-DQB10301 DQA10301-DQB10302 DQA10302-DQB10302 DQA10303-DQB10302 DQA10501-DQB10201 DQA10505-DQB10201 DQA10505-DQB10202
YIEAEVIPAETGQE

SEQ ID NO: 6097 - protein, 15 aa, Human immunodeficiency virus 1
  source 1..15: note = HLAs: DRB1_0101 DRB1_1001 DQA10201-DQB10301 DQA10501-DQB10201 DQA10505-DQB10201 DQA10505-DQB10202
YIEAEVIPAETGQET

SEQ ID NO: 6098 - protein, 16 aa, Human immunodeficiency virus 1
  source 1..16: note = HLAs: DQA10201-DQB10301 DQA10501-DQB10201 DQA10505-DQB10201 DQA10505-DQB10202
YIEAEVIPAETGQETA

SEQ ID NO: 6099 - protein, 17 aa, Human immunodeficiency virus 1
  source 1..17: note = HLAs: DQA10201-DQB10301
YIEAEVIPAETGQETAY

SEQ ID NO: 6100 - protein, 13 aa, Human immunodeficiency virus 1
  source 1..13: note = HLAs: DRB1_0101 DRB1_0102 DRB1_0404 DRB1_0405 DRB1_0408 DRB1_0410 DRB1_0701 DRB1_0813 DRB1_0901 DRB1_1001 DRB1_1102 DRB1_1114 DRB1_1201 DRB1_1301 DRB1_1302 DRB1_1402 DRB1_1406 DRB1_1501 DRB1_1502 DRB1_1601 DRB1_1602 DPA10103-DPB10101 DPA10103-DPB10201 DPA10103-DPB10202 DPA10103-DPB10301 DPA10103-DPB10401 DPA10103-DPB10501 DPA10103-DPB10601 DPA10103-DPB11101 DPA10103-DPB112401 DPA10103-DPB112601 DPA10103-DPB11501 DPA10103-DPB11601 DPA10103-DPB11901 DPA10103-DPB12001 DPA10103-DPB12301 DPA10103-DPB13101 DPA10103-DPB13901 DPA10103-DPB14801 DPA10103-DPB15001 DPA10104-DPB10101 DPA10104-DPB10301 DPA10104-DPB11501 DPA10105-DPB10101 DPA10105-DPB10301 DPA10105-DPB10401 DPA10105-DPB15001 DPA10106-DPB10101 DPA10201-DPB10101 DPA10201-DPB11501 DPA10202-DPB10101 DPA10202-DPB10201 DPA10202-DPB10202 DPA10202-DPB110601 DPA10202-DPB11101 DPA10202-DPB11901 DPA10202-DPB15501 DPA10301-DPB10101 DPA10301-DPB10201 DPA10301-DPB10202 DPA10301-DPB10401 DPA10301-DPB10402 DPA10301-DPB110501 DPA10301-DPB110601; note = HLAs: DPA10301-DPB11101 DPA10301-DPB11801 DPA10301-DPB12301 DPA10301-DPB13901 DPA10301-DPB14001 DPA10301-DPB14901 DPA10301-DPB15501 DPA10301-DPB16501 DPA10301-DPB17501 DPA10301-DPB18001 DPA10401-DPB10101 DPA10401-DPB10201 DPA10401-DPB10202 DPA10401-DPB10301 DPA10401-DPB10501 DPA10401-DPB11301 DPA10401-DPB113301 DPA10401-DPB11401 DQA10102-DQB10501 DQA10103-DQB10501
YKRWIILGLNKIV

SEQ ID NO: 6101 - protein, 14 aa, Human immunodeficiency virus 1
  source 1..14: note = HLAs: DRB1_0101 DRB1_0102 DRB1_0103 DRB1_0401 DRB1_0404 DRB1_0405 DRB1_0408 DRB1_0410 DRB1_0701 DRB1_0801 DRB1_0802 DRB1_0803 DRB1_0804 DRB1_0806 DRB1_0809 DRB1_0813 DRB1_0901 DRB1_1001 DRB1_1101 DRB1_1102 DRB1_1103 DRB1_1104 DRB1_1114 DRB1_1201 DRB1_1202 DRB1_1301 DRB1_1302 DRB1_1303 DRB1_1304 DRB1_1305 DRB1_1312 DRB1_1401 DRB1_1402 DRB1_1403 DRB1_1404 DRB1_1405 DRB1_1406 DRB1_1407 DRB1_1454 DRB1_1501 DRB1_1502 DRB1_1503 DRB1_1601 DRB1_1602 DPA10103-DPB10101 DPA10103-DPB10201 DPA10103-DPB10202 DPA10103-DPB10301 DPA10103-DPB10401 DPA10103-DPB10501 DPA10103-DPB10601 DPA10103-DPB11101 DPA10103-DPB112401 DPA10103-DPB112601 DPA10103-DPB11301 DPA10103-DPB113101 DPA10103-DPB113301 DPA10103-DPB11401 DPA10103-DPB11501 DPA10103-DPB11601 DPA10103-DPB11701 DPA10103-DPB11801 DPA10103-DPB11901 DPA10103-DPB12001 DPA10103-DPB12101 DPA10103-DPB12301 DPA10103-DPB12901 DPA10103-DPB13001 DPA10103-DPB13101 DPA10103-DPB13401 DPA10103-DPB13901 DPA10103-DPB14001 DPA10103-DPB14101 DPA10103-DPB14801; note = HLAs: DPA10103-DPB15001 DPA10103-DPB15501 DPA10103-DPB15901 DPA10104-DPB10101 DPA10104-DPB10301 DPA10104-DPB11301 DPA10104-DPB11501 DPA10105-DPB10101 DPA10105-DPB10301 DPA10105-DPB10401 DPA10105-DPB11801 DPA10105-DPB15001 DPA10106-DPB10101 DPA10106-DPB11101 DPA10201-DPB10101 DPA10201-DPB10201 DPA10201-DPB10202 DPA10201-DPB10501 DPA10201-DPB110601 DPA10201-DPB11101 DPA10201-DPB11301 DPA10201-DPB113301 DPA10201-DPB11501 DPA10201-DPB11601 DPA10201-DPB11801 DPA10201-DPB11901 DPA10201-DPB15501 DPA10202-DPB10101 DPA10202-DPB10201 DPA10202-DPB10202 DPA10202-DPB10301 DPA10202-DPB10401 DPA10202-DPB10402 DPA10202-DPB10501 DPA10202-DPB10901 DPA10202-DPB110001 DPA10202-DPB110501 DPA10202-DPB110601 DPA10202-DPB11101 DPA10202-DPB11301 DPA10202-DPB113101 DPA10202-DPB11701 DPA10202-DPB11801 DPA10202-DPB11901 DPA10202-DPB12101 DPA10202-DPB12901 DPA10202-DPB13001 DPA10202-DPB13101 DPA10202-DPB13801 DPA10202-DPB14501 DPA10202-DPB15501 DPA10202-DPB16501 DPA10202-DPB18501 DPA10301-DPB10101; note = HLAs: DPA10301-DPB10201 DPA10301-DPB10202 DPA10301-DPB10301 DPA10301-DPB10401 DPA10301-DPB10402 DPA10301-DPB10901 DPA10301-DPB110501 DPA10301-DPB110601 DPA10301-DPB11101 DPA10301-DPB11301 DPA10301-DPB11701 DPA10301-DPB11801 DPA10301-DPB12301 DPA10301-DPB13901 DPA10301-DPB14001 DPA10301-DPB14901 DPA10301-DPB15501 DPA10301-DPB16501 DPA10301-DPB17501 DPA10301-DPB18001 DPA10401-DPB10101 DPA10401-DPB10201 DPA10401-DPB10202 DPA10401-DPB10301 DPA10401-DPB10402 DPA10401-DPB10501 DPA10401-DPB110501 DPA10401-DPB11301 DPA10401-DPB113301 DPA10401-DPB11401 DPA10401-DPB14901 DQA10102-DQB10501 DQA10102-DQB10503 DQA10103-DQB10501
YKRWIILGLNKIVR

SEQ ID NO: 6102 - protein, 15 aa, Human immunodeficiency virus 1
  source 1..15: note = HLAs: DRB1_0101 DRB1_0102 DRB1_0103 DRB1_0301 DRB1_0401 DRB1_0402 DRB1_0403 DRB1_0404 DRB1_0405 DRB1_0406 DRB1_0407 DRB1_0408 DRB1_0410 DRB1_0411 DRB1_0701 DRB1_0801 DRB1_0802 DRB1_0803 DRB1_0804 DRB1_0806 DRB1_0809 DRB1_0813 DRB1_0901 DRB1_1001 DRB1_1101 DRB1_1102 DRB1_1103 DRB1_1104 DRB1_1114 DRB1_1201 DRB1_1202 DRB1_1301 DRB1_1302 DRB1_1303 DRB1_1304 DRB1_1305 DRB1_1312 DRB1_1401 DRB1_1402 DRB1_1403 DRB1_1404 DRB1_1405 DRB1_1406 DRB1_1407 DRB1_1418 DRB1_1454 DRB1_1501 DRB1_1502 DRB1_1503 DRB1_1601 DRB1_1602 DPA10103-DPB10101 DPA10103-DPB10201 DPA10103-DPB10202 DPA10103-DPB10301 DPA10103-DPB10401 DPA10103-DPB10402 DPA10103-DPB10501 DPA10103-DPB10601 DPA10103-DPB10901 DPA10103-DPB11001 DPA10103-DPB110501 DPA10103-DPB11101 DPA10103-DPB112401 DPA10103-DPB112601 DPA10103-DPB11301 DPA10103-DPB113101 DPA10103-DPB113301 DPA10103-DPB11401 DPA10103-DPB11501 DPA10103-DPB11601 DPA10103-DPB11701 DPA10103-DPB11801 DPA10103-DPB11901 DPA10103-DPB12001 DPA10103-DPB12101 DPA10103-DPB12301; note = HLAs: DPA10103-DPB12901 DPA10103-DPB13001 DPA10103-DPB13101 DPA10103-DPB13401 DPA10103-DPB13901 DPA10103-DPB14001 DPA10103-DPB14101 DPA10103-DPB14801 DPA10103-DPB14901 DPA10103-DPB15001 DPA10103-DPB15101 DPA10103-DPB15501 DPA10103-DPB15901 DPA10103-DPB18001 DPA10104-DPB10101 DPA10104-DPB10301 DPA10104-DPB11001 DPA10104-DPB11301 DPA10104-DPB11501 DPA10105-DPB10101 DPA10105-DPB10301 DPA10105-DPB10401 DPA10105-DPB11801 DPA10105-DPB15001 DPA10106-DPB10101 DPA10106-DPB11101 DPA10201-DPB10101 DPA10201-DPB10201 DPA10201-DPB10202 DPA10201-DPB10301 DPA10201-DPB10401 DPA10201-DPB10501 DPA10201-DPB10601 DPA10201-DPB110601 DPA10201-DPB11101 DPA10201-DPB11301 DPA10201-DPB113101 DPA10201-DPB113301 DPA10201-DPB11501 DPA10201-DPB11601 DPA10201-DPB11701 DPA10201-DPB11801 DPA10201-DPB11901 DPA10201-DPB13001 DPA10201-DPB13401 DPA10201-DPB14501 DPA10201-DPB15501 DPA10201-DPB19101 DPA10202-DPB10101 DPA10202-DPB10201 DPA10202-DPB10202 DPA10202-DPB10301 DPA10202-DPB10401 DPA10202-DPB10402 DPA10202-DPB10501; note = HLAs: DPA10202-DPB10901 DPA10202-DPB110001 DPA10202-DPB110501 DPA10202-DPB110601 DPA10202-DPB11101 DPA10202-DPB11301 DPA10202-DPB113101 DPA10202-DPB11401 DPA10202-DPB11701 DPA10202-DPB11801 DPA10202-DPB11901 DPA10202-DPB12101 DPA10202-DPB12901 DPA10202-DPB13001 DPA10202-DPB13101 DPA10202-DPB13801 DPA10202-DPB14501 DPA10202-DPB15501 DPA10202-DPB16501 DPA10202-DPB18501 DPA10301-DPB10101 DPA10301-DPB10201 DPA10301-DPB10202 DPA10301-DPB10301 DPA10301-DPB10401 DPA10301-DPB10402 DPA10301-DPB10901 DPA10301-DPB110501 DPA10301-DPB110601 DPA10301-DPB11101 DPA10301-DPB11301 DPA10301-DPB11701 DPA10301-DPB11801 DPA10301-DPB12301 DPA10301-DPB13901 DPA10301-DPB14001 DPA10301-DPB14901 DPA10301-DPB15501 DPA10301-DPB16501 DPA10301-DPB17501 DPA10301-DPB18001 DPA10401-DPB10101 DPA10401-DPB10201 DPA10401-DPB10202 DPA10401-DPB10301 DPA10401-DPB10402 DPA10401-DPB10501 DPA10401-DPB110501 DPA10401-DPB11301 DPA10401-DPB113301 DPA10401-DPB11401 DPA10401-DPB14901 DQA10102-DQB10501 DQA10102-DQB10503; note = HLAs: DQA10102-DQB10601 DQA10102-DQB10609 DQA10103-DQB10501 DQA10103-DQB10503 DQA10103-DQB10601 DQA10103-DQB10602 DQA10103-DQB10608 DQA10103-DQB10609 DQA10501-DQB10501 DQA10505-DQB10402 DQA10505-DQB10501
YKRWIILGLNKIVRM

SEQ ID NO: 6103 - protein, 16 aa, Human immunodeficiency virus 1
  source 1..16: note = HLAs: DRB1_0101 DRB1_0102 DRB1_0103 DRB1_0301 DRB1_0401 DRB1_0402 DRB1_0404 DRB1_0405 DRB1_0407 DRB1_0408 DRB1_0410 DRB1_0701 DRB1_0801 DRB1_0802 DRB1_0803 DRB1_0804 DRB1_0806 DRB1_0809 DRB1_0813 DRB1_0901 DRB1_1001 DRB1_1101 DRB1_1102 DRB1_1103 DRB1_1104 DRB1_1114 DRB1_1201 DRB1_1202 DRB1_1301 DRB1_1302 DRB1_1303 DRB1_1304 DRB1_1305 DRB1_1312 DRB1_1401 DRB1_1402 DRB1_1403 DRB1_1404 DRB1_1405 DRB1_1406 DRB1_1407 DRB1_1418 DRB1_1454 DRB1_1501 DRB1_1502 DRB1_1503 DRB1_1601 DRB1_1602 DPA10103-DPB10101 DPA10103-DPB10201 DPA10103-DPB10202 DPA10103-DPB10301 DPA10103-DPB10401 DPA10103-DPB10402 DPA10103-DPB10501 DPA10103-DPB10601 DPA10103-DPB10901 DPA10103-DPB11001 DPA10103-DPB110501 DPA10103-DPB11101 DPA10103-DPB112401 DPA10103-DPB112601 DPA10103-DPB11301 DPA10103-DPB113101 DPA10103-DPB113301 DPA10103-DPB11401 DPA10103-DPB11501 DPA10103-DPB11601 DPA10103-DPB11701 DPA10103-DPB11801 DPA10103-DPB11901 DPA10103-DPB12001 DPA10103-DPB12101 DPA10103-DPB12301 DPA10103-DPB12901 DPA10103-DPB13001; note = HLAs: DPA10103-DPB13101 DPA10103-DPB13401 DPA10103-DPB13901 DPA10103-DPB14001 DPA10103-DPB14101 DPA10103-DPB14801 DPA10103-DPB14901 DPA10103-DPB15001 DPA10103-DPB15101 DPA10103-DPB15501 DPA10103-DPB15901 DPA10103-DPB18001 DPA10104-DPB10101 DPA10104-DPB10301 DPA10104-DPB11001 DPA10104-DPB11301 DPA10104-DPB11501 DPA10105-DPB10101 DPA10105-DPB10301 DPA10105-DPB10401 DPA10105-DPB11801 DPA10105-DPB15001 DPA10106-DPB10101 DPA10106-DPB11101 DPA10201-DPB10101 DPA10201-DPB10201 DPA10201-DPB10202 DPA10201-DPB10501 DPA10201-DPB10601 DPA10201-DPB10901 DPA10201-DPB110601 DPA10201-DPB11101 DPA10201-DPB11301 DPA10201-DPB113101 DPA10201-DPB113301 DPA10201-DPB11501 DPA10201-DPB11601 DPA10201-DPB11701 DPA10201-DPB11801 DPA10201-DPB11901 DPA10201-DPB13001 DPA10201-DPB13401 DPA10201-DPB15501 DPA10201-DPB19101 DPA10202-DPB10101 DPA10202-DPB10201 DPA10202-DPB10202 DPA10202-DPB10301 DPA10202-DPB10401 DPA10202-DPB10402 DPA10202-DPB10501 DPA10202-DPB10901 DPA10202-DPB110001 DPA10202-DPB110501; note = HLAs: DPA10202-DPB110601 DPA10202-DPB11101 DPA10202-DPB11301 DPA10202-DPB113101 DPA10202-DPB11401 DPA10202-DPB11701 DPA10202-DPB11801 DPA10202-DPB11901 DPA10202-DPB12101 DPA10202-DPB12901 DPA10202-DPB13001 DPA10202-DPB13101 DPA10202-DPB13801 DPA10202-DPB14501 DPA10202-DPB15501 DPA10202-DPB16501 DPA10202-DPB18501 DPA10301-DPB10101 DPA10301-DPB10201 DPA10301-DPB10202 DPA10301-DPB10301 DPA10301-DPB10401 DPA10301-DPB10402 DPA10301-DPB10901 DPA10301-DPB110501 DPA10301-DPB110601 DPA10301-DPB11101 DPA10301-DPB11301 DPA10301-DPB11701 DPA10301-DPB11801 DPA10301-DPB12301 DPA10301-DPB13901 DPA10301-DPB14001 DPA10301-DPB14901 DPA10301-DPB15501 DPA10301-DPB16501 DPA10301-DPB17501 DPA10301-DPB18001 DPA10401-DPB10101 DPA10401-DPB10201 DPA10401-DPB10202 DPA10401-DPB10301 DPA10401-DPB10402 DPA10401-DPB10501 DPA10401-DPB110501 DPA10401-DPB11301 DPA10401-DPB113301 DPA10401-DPB11401 DPA10401-DPB14901 DQA10102-DQB10501 DQA10102-DQB10503 DQA10102-DQB10601 DQA10102-DQB10609 DQA10103-DQB10501; note = HLAs: DQA10103-DQB10503 DQA10103-DQB10601 DQA10103-DQB10602 DQA10103-DQB10603 DQA10103-DQB10604 DQA10103-DQB10608 DQA10103-DQB10609 DQA10201-DQB10301 DQA10501-DQB10501 DQA10505-DQB10402 DQA10505-DQB10501
YKRWIILGLNKIVRMY

SEQ ID NO: 6104 - protein, 17 aa, Human immunodeficiency virus 1
  source 1..17: note = HLAs: DRB1_0101 DRB1_0102 DRB1_0103 DRB1_0301 DRB1_0401 DRB1_0402 DRB1_0404 DRB1_0405 DRB1_0408 DRB1_0410 DRB1_0701 DRB1_0801 DRB1_0802 DRB1_0803 DRB1_0804 DRB1_0806 DRB1_0809 DRB1_0813 DRB1_0901 DRB1_1001 DRB1_1101 DRB1_1102 DRB1_1103 DRB1_1104 DRB1_1114 DRB1_1201 DRB1_1202 DRB1_1301 DRB1_1302 DRB1_1303 DRB1_1304 DRB1_1305 DRB1_1312 DRB1_1401 DRB1_1402 DRB1_1403 DRB1_1404 DRB1_1405 DRB1_1406 DRB1_1407 DRB1_1418 DRB1_1454 DRB1_1501 DRB1_1502 DRB1_1503 DRB1_1601 DRB1_1602 DPA10103-DPB10101 DPA10103-DPB10201 DPA10103-DPB10202 DPA10103-DPB10301 DPA10103-DPB10401 DPA10103-DPB10402 DPA10103-DPB10501 DPA10103-DPB10601 DPA10103-DPB110501 DPA10103-DPB11101 DPA10103-DPB112401 DPA10103-DPB112601 DPA10103-DPB11301 DPA10103-DPB113101 DPA10103-DPB113301 DPA10103-DPB11401 DPA10103-DPB11501 DPA10103-DPB11601 DPA10103-DPB11701 DPA10103-DPB11801 DPA10103-DPB11901 DPA10103-DPB12001 DPA10103-DPB12101 DPA10103-DPB12301 DPA10103-DPB12901 DPA10103-DPB13001 DPA10103-DPB13101 DPA10103-DPB13401; note = HLAs: DPA10103-DPB13901 DPA10103-DPB14001 DPA10103-DPB14101 DPA10103-DPB14801 DPA10103-DPB14901 DPA10103-DPB15001 DPA10103-DPB15101 DPA10103-DPB15501 DPA10103-DPB15901 DPA10103-DPB18001 DPA10104-DPB10101 DPA10104-DPB10301 DPA10104-DPB11301 DPA10104-DPB11501 DPA10105-DPB10101 DPA10105-DPB10301 DPA10105-DPB10401 DPA10105-DPB11801 DPA10105-DPB15001 DPA10106-DPB10101 DPA10106-DPB11101 DPA10201-DPB10101 DPA10201-DPB10201 DPA10201-DPB10202 DPA10201-DPB10401 DPA10201-DPB10501 DPA10201-DPB10601 DPA10201-DPB110601 DPA10201-DPB11101 DPA10201-DPB113101 DPA10201-DPB11501 DPA10201-DPB11601 DPA10201-DPB11701 DPA10201-DPB11801 DPA10201-DPB11901 DPA10201-DPB13001 DPA10201-DPB13401 DPA10201-DPB15501 DPA10201-DPB19101 DPA10202-DPB10101 DPA10202-DPB10201 DPA10202-DPB10202 DPA10202-DPB10301 DPA10202-DPB10401 DPA10202-DPB10402 DPA10202-DPB10501 DPA10202-DPB10901 DPA10202-DPB110001 DPA10202-DPB110501 DPA10202-DPB110601 DPA10202-DPB11101 DPA10202-DPB11301 DPA10202-DPB113101 DPA10202-DPB11401; note = HLAs: DPA10202-DPB11701 DPA10202-DPB11801 DPA10202-DPB11901 DPA10202-DPB12101 DPA10202-DPB12901 DPA10202-DPB13001 DPA10202-DPB13101 DPA10202-DPB13801 DPA10202-DPB14501 DPA10202-DPB15501 DPA10202-DPB16501 DPA10202-DPB18501 DPA10301-DPB10101 DPA10301-DPB10201 DPA10301-DPB10202 DPA10301-DPB10301 DPA10301-DPB10401 DPA10301-DPB10402 DPA10301-DPB10901 DPA10301-DPB110501 DPA10301-DPB110601 DPA10301-DPB11101 DPA10301-DPB11301 DPA10301-DPB11701 DPA10301-DPB11801 DPA10301-DPB12301 DPA10301-DPB13901 DPA10301-DPB14001 DPA10301-DPB14901 DPA10301-DPB15501 DPA10301-DPB16501 DPA10301-DPB17501 DPA10301-DPB18001 DPA10401-DPB10101 DPA10401-DPB10201 DPA10401-DPB10202 DPA10401-DPB10301 DPA10401-DPB10402 DPA10401-DPB10501 DPA10401-DPB110501 DPA10401-DPB11301 DPA10401-DPB113301 DPA10401-DPB11401 DPA10401-DPB14901 DQA10102-DQB10501 DQA10102-DQB10503 DQA10102-DQB10601 DQA10102-DQB10609 DQA10103-DQB10501 DQA10103-DQB10503 DQA10103-DQB10601 DQA10103-DQB10602 DQA10103-DQB10608 DQA10103-DQB10609 DQA10501-DQB10501; note = HLAs: DQA10505-DQB10501
YKRWIILGLNKIVRMYS

SEQ ID NO: 6105 - protein, 18 aa, Human immunodeficiency virus 1
  source 1..18: note = HLAs: DRB1_0101 DRB1_0102 DRB1_0404 DRB1_0405 DRB1_0408 DRB1_0410 DRB1_0701 DRB1_0801 DRB1_0802 DRB1_0803 DRB1_0804 DRB1_0806 DRB1_0809 DRB1_0813 DRB1_0901 DRB1_1001 DRB1_1101 DRB1_1102 DRB1_1103 DRB1_1104 DRB1_1114 DRB1_1201 DRB1_1202 DRB1_1301 DRB1_1302 DRB1_1304 DRB1_1305 DRB1_1312 DRB1_1401 DRB1_1402 DRB1_1403 DRB1_1404 DRB1_1405 DRB1_1406 DRB1_1407 DRB1_1454 DRB1_1501 DRB1_1502 DRB1_1503 DRB1_1601 DRB1_1602 DPA10103-DPB10101 DPA10103-DPB10201 DPA10103-DPB10202 DPA10103-DPB10401 DPA10103-DPB10501 DPA10103-DPB11101 DPA10103-DPB112601 DPA10103-DPB11501 DPA10103-DPB11601 DPA10103-DPB11801 DPA10103-DPB11901 DPA10103-DPB12001 DPA10103-DPB12301 DPA10103-DPB13101 DPA10103-DPB13401 DPA10103-DPB13901 DPA10103-DPB14001 DPA10103-DPB14101 DPA10103-DPB14801 DPA10103-DPB15001 DPA10104-DPB10101 DPA10104-DPB11501 DPA10105-DPB10101 DPA10105-DPB10401 DPA10105-DPB11801 DPA10105-DPB15001 DPA10106-DPB10101 DPA10201-DPB10101 DPA10201-DPB10202 DPA10201-DPB10501 DPA10201-DPB110601 DPA10201-DPB11501; note = HLAs: DPA10201-DPB11601 DPA10201-DPB11901 DPA10202-DPB10101 DPA10202-DPB10201 DPA10202-DPB10202 DPA10202-DPB10401 DPA10202-DPB10501 DPA10202-DPB110001 DPA10202-DPB110601 DPA10202-DPB11101 DPA10202-DPB11801 DPA10202-DPB11901 DPA10202-DPB13101 DPA10202-DPB13801 DPA10202-DPB15501 DPA10202-DPB16501 DPA10301-DPB10101 DPA10301-DPB10201 DPA10301-DPB10202 DPA10301-DPB10401 DPA10301-DPB10402 DPA10301-DPB110501 DPA10301-DPB110601 DPA10301-DPB11101 DPA10301-DPB11301 DPA10301-DPB11701 DPA10301-DPB11801 DPA10301-DPB12301 DPA10301-DPB13901 DPA10301-DPB14001 DPA10301-DPB14901 DPA10301-DPB15501 DPA10301-DPB16501 DPA10301-DPB17501 DPA10301-DPB18001 DPA10401-DPB10101 DPA10401-DPB10201 DPA10401-DPB10202 DPA10401-DPB10301 DPA10401-DPB10402 DPA10401-DPB10501 DPA10401-DPB110501 DPA10401-DPB11301 DPA10401-DPB113301 DPA10401-DPB11401 DPA10401-DPB14901 DQA10102-DQB10501 DQA10102-DQB10503 DQA10102-DQB10609 DQA10103-DQB10501 DQA10103-DQB10601 DQA10103-DQB10609
YKRWIILGLNKIVRMYSP

SEQ ID NO: 6106 - protein, 19 aa, Human immunodeficiency virus 1
  source 1..19: note = HLAs: DRB1_0101 DRB1_0102 DRB1_0103 DRB1_0301 DRB1_0401 DRB1_0402 DRB1_0404 DRB1_0405 DRB1_0408 DRB1_0410 DRB1_0701 DRB1_0801 DRB1_0802 DRB1_0803 DRB1_0804 DRB1_0806 DRB1_0809 DRB1_0813 DRB1_0901 DRB1_1001 DRB1_1101 DRB1_1102 DRB1_1103 DRB1_1104 DRB1_1114 DRB1_1201 DRB1_1202 DRB1_1301 DRB1_1302 DRB1_1303 DRB1_1304 DRB1_1305 DRB1_1312 DRB1_1401 DRB1_1402 DRB1_1403 DRB1_1404 DRB1_1405 DRB1_1406 DRB1_1407 DRB1_1418 DRB1_1454 DRB1_1501 DRB1_1502 DRB1_1503 DRB1_1601 DRB1_1602 DPA10103-DPB10101 DPA10103-DPB10201 DPA10103-DPB10202 DPA10103-DPB10301 DPA10103-DPB10401 DPA10103-DPB10501 DPA10103-DPB10601 DPA10103-DPB11101 DPA10103-DPB112401 DPA10103-DPB112601 DPA10103-DPB11301 DPA10103-DPB113101 DPA10103-DPB113301 DPA10103-DPB11501 DPA10103-DPB11601 DPA10103-DPB11701 DPA10103-DPB11801 DPA10103-DPB11901 DPA10103-DPB12001 DPA10103-DPB12101 DPA10103-DPB12301 DPA10103-DPB13001 DPA10103-DPB13101 DPA10103-DPB13401 DPA10103-DPB13901 DPA10103-DPB14001 DPA10103-DPB14101 DPA10103-DPB14801; note = HLAs: DPA10103-DPB15001 DPA10103-DPB15501 DPA10104-DPB10101 DPA10104-DPB10301 DPA10104-DPB11301 DPA10104-DPB11501 DPA10105-DPB10101 DPA10105-DPB10301 DPA10105-DPB10401 DPA10105-DPB11801 DPA10105-DPB15001 DPA10106-DPB10101 DPA10201-DPB10101 DPA10201-DPB10201 DPA10201-DPB10202 DPA10201-DPB10501 DPA10201-DPB110601 DPA10201-DPB11501 DPA10201-DPB11601 DPA10201-DPB11801 DPA10201-DPB11901 DPA10201-DPB15501 DPA10202-DPB10101 DPA10202-DPB10201 DPA10202-DPB10202 DPA10202-DPB10401 DPA10202-DPB10402 DPA10202-DPB10501 DPA10202-DPB10901 DPA10202-DPB110001 DPA10202-DPB110501 DPA10202-DPB110601 DPA10202-DPB11101 DPA10202-DPB11301 DPA10202-DPB113101 DPA10202-DPB11701 DPA10202-DPB11801 DPA10202-DPB11901 DPA10202-DPB12101 DPA10202-DPB13001 DPA10202-DPB13101 DPA10202-DPB13801 DPA10202-DPB15501 DPA10202-DPB16501 DPA10202-DPB18501 DPA10301-DPB10101 DPA10301-DPB10201 DPA10301-DPB10202 DPA10301-DPB10301 DPA10301-DPB10401 DPA10301-DPB10402 DPA10301-DPB10901 DPA10301-DPB110501 DPA10301-DPB110601; note = HLAs: DPA10301-DPB11101 DPA10301-DPB11301 DPA10301-DPB11701 DPA10301-DPB11801 DPA10301-DPB12301 DPA10301-DPB13901 DPA10301-DPB14001 DPA10301-DPB14901 DPA10301-DPB15501 DPA10301-DPB16501 DPA10301-DPB17501 DPA10301-DPB18001 DPA10401-DPB10101 DPA10401-DPB10201 DPA10401-DPB10202 DPA10401-DPB10301 DPA10401-DPB10402 DPA10401-DPB10501 DPA10401-DPB110501 DPA10401-DPB11301 DPA10401-DPB113301 DPA10401-DPB11401 DPA10401-DPB14901 DQA10102-DQB10501 DQA10102-DQB10503 DQA10102-DQB10601 DQA10102-DQB10609 DQA10103-DQB10501 DQA10103-DQB10503 DQA10103-DQB10601 DQA10103-DQB10602 DQA10103-DQB10603 DQA10103-DQB10608 DQA10103-DQB10609
YKRWIILGLNKIVRMYSPV

SEQ ID NO: 6107 - protein, 20 aa, Human immunodeficiency virus 1
  source 1..20: note = HLAs: DRB1_0101 DRB1_0102 DRB1_0103 DRB1_0301 DRB1_0401 DRB1_0402 DRB1_0403 DRB1_0404 DRB1_0405 DRB1_0406 DRB1_0407 DRB1_0408 DRB1_0410 DRB1_0701 DRB1_0801 DRB1_0802 DRB1_0803 DRB1_0804 DRB1_0806 DRB1_0809 DRB1_0813 DRB1_0901 DRB1_1001 DRB1_1101 DRB1_1102 DRB1_1103 DRB1_1104 DRB1_1114 DRB1_1201 DRB1_1202 DRB1_1301 DRB1_1302 DRB1_1303 DRB1_1304 DRB1_1305 DRB1_1312 DRB1_1401 DRB1_1402 DRB1_1403 DRB1_1404 DRB1_1405 DRB1_1406 DRB1_1407 DRB1_1418 DRB1_1454 DRB1_1501 DRB1_1502 DRB1_1503 DRB1_1601 DRB1_1602 DPA10103-DPB10101 DPA10103-DPB10201 DPA10103-DPB10202 DPA10103-DPB10301 DPA10103-DPB10401 DPA10103-DPB10402 DPA10103-DPB10501 DPA10103-DPB10601 DPA10103-DPB110501 DPA10103-DPB11101 DPA10103-DPB112401 DPA10103-DPB112601 DPA10103-DPB11301 DPA10103-DPB113101 DPA10103-DPB113301 DPA10103-DPB11401 DPA10103-DPB11501 DPA10103-DPB11601 DPA10103-DPB11701 DPA10103-DPB11801 DPA10103-DPB11901 DPA10103-DPB12001 DPA10103-DPB12101 DPA10103-DPB12301 DPA10103-DPB12901 DPA10103-DPB13001 DPA10103-DPB13101; note = HLAs: DPA10103-DPB13401 DPA10103-DPB13901 DPA10103-DPB14001 DPA10103-DPB14101 DPA10103-DPB14801 DPA10103-DPB14901 DPA10103-DPB15001 DPA10103-DPB15101 DPA10103-DPB15501 DPA10103-DPB15901 DPA10103-DPB18001 DPA10104-DPB10101 DPA10104-DPB10301 DPA10104-DPB11301 DPA10104-DPB11501 DPA10105-DPB10101 DPA10105-DPB10301 DPA10105-DPB10401 DPA10105-DPB11801 DPA10105-DPB15001 DPA10106-DPB10101 DPA10106-DPB11101 DPA10201-DPB10101 DPA10201-DPB10201 DPA10201-DPB10202 DPA10201-DPB10501 DPA10201-DPB110601 DPA10201-DPB11101 DPA10201-DPB11501 DPA10201-DPB11601 DPA10201-DPB11801 DPA10201-DPB11901 DPA10201-DPB13001 DPA10201-DPB15501 DPA10201-DPB19101 DPA10202-DPB10101 DPA10202-DPB10201 DPA10202-DPB10202 DPA10202-DPB10401 DPA10202-DPB10402 DPA10202-DPB10501 DPA10202-DPB10901 DPA10202-DPB110001 DPA10202-DPB110501 DPA10202-DPB110601 DPA10202-DPB11101 DPA10202-DPB11301 DPA10202-DPB113101 DPA10202-DPB11401 DPA10202-DPB11701 DPA10202-DPB11801 DPA10202-DPB11901 DPA10202-DPB12101 DPA10202-DPB12901; note = HLAs: DPA10202-DPB13001 DPA10202-DPB13101 DPA10202-DPB13801 DPA10202-DPB15501 DPA10202-DPB16501 DPA10202-DPB18501 DPA10301-DPB10101 DPA10301-DPB10201 DPA10301-DPB10202 DPA10301-DPB10301 DPA10301-DPB10401 DPA10301-DPB10402 DPA10301-DPB10901 DPA10301-DPB110501 DPA10301-DPB110601 DPA10301-DPB11101 DPA10301-DPB11301 DPA10301-DPB11701 DPA10301-DPB11801 DPA10301-DPB12301 DPA10301-DPB13901 DPA10301-DPB14001 DPA10301-DPB14901 DPA10301-DPB15501 DPA10301-DPB16501 DPA10301-DPB17501 DPA10301-DPB18001 DPA10401-DPB10101 DPA10401-DPB10201 DPA10401-DPB10202 DPA10401-DPB10301 DPA10401-DPB10402 DPA10401-DPB10501 DPA10401-DPB110501 DPA10401-DPB11301 DPA10401-DPB113301 DPA10401-DPB11401 DPA10401-DPB14901 DQA10102-DQB10501 DQA10102-DQB10503 DQA10102-DQB10601 DQA10102-DQB10602 DQA10102-DQB10609 DQA10102-DQB10611 DQA10103-DQB10501 DQA10103-DQB10503 DQA10103-DQB10601 DQA10103-DQB10602 DQA10103-DQB10603 DQA10103-DQB10604 DQA10103-DQB10608 DQA10103-DQB10609
YKRWIILGLNKIVRMYSPVS

SEQ ID NO: 6108 - protein, 21 aa, Human immunodeficiency virus 1
  source 1..21: note = HLAs: DRB1_0101 DRB1_0102 DRB1_0301 DRB1_0401 DRB1_0402 DRB1_0404 DRB1_0405 DRB1_0407 DRB1_0408 DRB1_0410 DRB1_0701 DRB1_0801 DRB1_0802 DRB1_0803 DRB1_0804 DRB1_0806 DRB1_0809 DRB1_0813 DRB1_0901 DRB1_1001 DRB1_1101 DRB1_1102 DRB1_1103 DRB1_1104 DRB1_1114 DRB1_1201 DRB1_1202 DRB1_1301 DRB1_1302 DRB1_1303 DRB1_1304 DRB1_1305 DRB1_1312 DRB1_1401 DRB1_1402 DRB1_1403 DRB1_1404 DRB1_1405 DRB1_1406 DRB1_1407 DRB1_1418 DRB1_1454 DRB1_1501 DRB1_1502 DRB1_1503 DRB1_1601 DRB1_1602 DPA10103-DPB10101 DPA10103-DPB10201 DPA10103-DPB10202 DPA10103-DPB10501 DPA10103-DPB11101 DPA10103-DPB11501 DPA10103-DPB11601 DPA10103-DPB11801 DPA10103-DPB11901 DPA10103-DPB12001 DPA10103-DPB13101 DPA10103-DPB13401 DPA10103-DPB14001 DPA10103-DPB14101 DPA10103-DPB14801 DPA10103-DPB15001 DPA10103-DPB15501 DPA10104-DPB10101 DPA10104-DPB11501 DPA10105-DPB10101 DPA10105-DPB11801 DPA10105-DPB15001 DPA10201-DPB10501 DPA10201-DPB11501 DPA10202-DPB10101 DPA10202-DPB10201 DPA10202-DPB10202 DPA10202-DPB10501 DPA10202-DPB110601; note = HLAs: DPA10202-DPB11101 DPA10202-DPB11801 DPA10202-DPB11901 DPA10202-DPB12101 DPA10202-DPB13001 DPA10202-DPB13101 DPA10202-DPB13801 DPA10202-DPB15501 DPA10202-DPB16501 DPA10301-DPB10101 DPA10301-DPB10201 DPA10301-DPB10202 DPA10301-DPB10401 DPA10301-DPB10402 DPA10301-DPB10901 DPA10301-DPB110501 DPA10301-DPB110601 DPA10301-DPB11101 DPA10301-DPB11301 DPA10301-DPB11701 DPA10301-DPB11801 DPA10301-DPB12301 DPA10301-DPB13901 DPA10301-DPB14001 DPA10301-DPB14901 DPA10301-DPB15501 DPA10301-DPB16501 DPA10301-DPB17501 DPA10301-DPB18001 DPA10401-DPB10101 DPA10401-DPB10201 DPA10401-DPB10202 DPA10401-DPB10301 DPA10401-DPB10402 DPA10401-DPB10501 DPA10401-DPB110501 DPA10401-DPB11301 DPA10401-DPB113301 DPA10401-DPB11401 DPA10401-DPB14901 DQA10102-DQB10501 DQA10102-DQB10503 DQA10102-DQB10609 DQA10103-DQB10501 DQA10103-DQB10503 DQA10103-DQB10601 DQA10103-DQB10602 DQA10103-DQB10608 DQA10103-DQB10609 DQA10505-DQB10402
YKRWIILGLNKIVRMYSPVSI

SEQ ID NO: 6109 - protein, 22 aa, Human immunodeficiency virus 1
  source 1..22: note = HLAs: DRB1_0101 DRB1_0102 DRB1_0103 DRB1_0301 DRB1_0401 DRB1_0402 DRB1_0403 DRB1_0404 DRB1_0405 DRB1_0406 DRB1_0407 DRB1_0408 DRB1_0410 DRB1_0701 DRB1_0801 DRB1_0802 DRB1_0803 DRB1_0804 DRB1_0806 DRB1_0809 DRB1_0813 DRB1_0901 DRB1_1001 DRB1_1101 DRB1_1102 DRB1_1103 DRB1_1104 DRB1_1114 DRB1_1201 DRB1_1202 DRB1_1301 DRB1_1302 DRB1_1303 DRB1_1304 DRB1_1305 DRB1_1312 DRB1_1401 DRB1_1402 DRB1_1403 DRB1_1404 DRB1_1405 DRB1_1406 DRB1_1407 DRB1_1418 DRB1_1454 DRB1_1501 DRB1_1502 DRB1_1503 DRB1_1601 DRB1_1602 DPA10103-DPB10101 DPA10103-DPB10201 DPA10103-DPB10202 DPA10103-DPB10301 DPA10103-DPB10501 DPA10103-DPB10601 DPA10103-DPB10901 DPA10103-DPB11001 DPA10103-DPB11101 DPA10103-DPB112401 DPA10103-DPB11301 DPA10103-DPB113101 DPA10103-DPB113301 DPA10103-DPB11401 DPA10103-DPB11501 DPA10103-DPB11601 DPA10103-DPB11701 DPA10103-DPB11801 DPA10103-DPB11901 DPA10103-DPB12001 DPA10103-DPB12101 DPA10103-DPB12901 DPA10103-DPB13001 DPA10103-DPB13101 DPA10103-DPB13401 DPA10103-DPB14001 DPA10103-DPB14101; note = HLAs: DPA10103-DPB14801 DPA10103-DPB15001 DPA10103-DPB15501 DPA10104-DPB10101 DPA10104-DPB10301 DPA10104-DPB11001 DPA10104-DPB11301 DPA10104-DPB11501 DPA10105-DPB10101 DPA10105-DPB10301 DPA10105-DPB11801 DPA10105-DPB15001 DPA10106-DPB10101 DPA10201-DPB10101 DPA10201-DPB10501 DPA10201-DPB110601 DPA10201-DPB11501 DPA10201-DPB11601 DPA10201-DPB11801 DPA10201-DPB11901 DPA10201-DPB15501 DPA10202-DPB10101 DPA10202-DPB10201 DPA10202-DPB10202 DPA10202-DPB10401 DPA10202-DPB10501 DPA10202-DPB10901 DPA10202-DPB110601 DPA10202-DPB11101 DPA10202-DPB11301 DPA10202-DPB113101 DPA10202-DPB11401 DPA10202-DPB11701 DPA10202-DPB11801 DPA10202-DPB11901 DPA10202-DPB12101 DPA10202-DPB12901 DPA10202-DPB13001 DPA10202-DPB13101 DPA10202-DPB13801 DPA10202-DPB15501 DPA10202-DPB16501 DPA10202-DPB18501 DPA10301-DPB10101 DPA10301-DPB10201 DPA10301-DPB10202 DPA10301-DPB10301 DPA10301-DPB10401 DPA10301-DPB10402 DPA10301-DPB10901 DPA10301-DPB110501 DPA10301-DPB110601 DPA10301-DPB11101 DPA10301-DPB11301; note = HLAs: DPA10301-DPB11701 DPA10301-DPB11801 DPA10301-DPB12301 DPA10301-DPB13901 DPA10301-DPB14001 DPA10301-DPB14901 DPA10301-DPB15501 DPA10301-DPB16501 DPA10301-DPB17501 DPA10301-DPB18001 DPA10401-DPB10101 DPA10401-DPB10201 DPA10401-DPB10202 DPA10401-DPB10301 DPA10401-DPB10402 DPA10401-DPB10501 DPA10401-DPB110501 DPA10401-DPB11301 DPA10401-DPB113301 DPA10401-DPB11401 DPA10401-DPB14901 DQA10102-DQB10501 DQA10102-DQB10503 DQA10102-DQB10601 DQA10102-DQB10609 DQA10103-DQB10501 DQA10103-DQB10503 DQA10103-DQB10601 DQA10103-DQB10602 DQA10103-DQB10608 DQA10103-DQB10609 DQA10501-DQB10501 DQA10505-DQB10402 DQA10505-DQB10501
YKRWIILGLNKIVRMYSPVSIL

SEQ ID NO: 6110 - protein, 23 aa, Human immunodeficiency virus 1
  source 1..23: note = HLAs: DRB1_0101 DRB1_0102 DRB1_0103 DRB1_0301 DRB1_0401 DRB1_0402 DRB1_0403 DRB1_0404 DRB1_0405 DRB1_0406 DRB1_0407 DRB1_0408 DRB1_0410 DRB1_0701 DRB1_0801 DRB1_0802 DRB1_0803 DRB1_0804 DRB1_0806 DRB1_0809 DRB1_0813 DRB1_0901 DRB1_1001 DRB1_1101 DRB1_1102 DRB1_1103 DRB1_1104 DRB1_1114 DRB1_1201 DRB1_1202 DRB1_1301 DRB1_1302 DRB1_1303 DRB1_1304 DRB1_1305 DRB1_1312 DRB1_1401 DRB1_1402 DRB1_1403 DRB1_1404 DRB1_1405 DRB1_1406 DRB1_1407 DRB1_1418 DRB1_1454 DRB1_1501 DRB1_1502 DRB1_1503 DRB1_1601 DRB1_1602 DPA10103-DPB10101 DPA10103-DPB10201 DPA10103-DPB10202 DPA10103-DPB10301 DPA10103-DPB10501 DPA10103-DPB10601 DPA10103-DPB10901 DPA10103-DPB11001 DPA10103-DPB11101 DPA10103-DPB112401 DPA10103-DPB11301 DPA10103-DPB113101 DPA10103-DPB113301 DPA10103-DPB11401 DPA10103-DPB11501 DPA10103-DPB11601 DPA10103-DPB11701 DPA10103-DPB11801 DPA10103-DPB11901 DPA10103-DPB12001 DPA10103-DPB12101 DPA10103-DPB12901 DPA10103-DPB13001 DPA10103-DPB13101 DPA10103-DPB13401 DPA10103-DPB14001 DPA10103-DPB14101; note = HLAs: DPA10103-DPB14801 DPA10103-DPB15001 DPA10103-DPB15501 DPA10103-DPB15901 DPA10104-DPB10101 DPA10104-DPB10301 DPA10104-DPB11001 DPA10104-DPB11301 DPA10104-DPB11501 DPA10105-DPB10101 DPA10105-DPB10301 DPA10105-DPB11801 DPA10105-DPB15001 DPA10106-DPB10101 DPA10106-DPB11101 DPA10201-DPB10101 DPA10201-DPB10501 DPA10201-DPB10601 DPA10201-DPB10901 DPA10201-DPB110601 DPA10201-DPB11101 DPA10201-DPB11301 DPA10201-DPB113301 DPA10201-DPB11401 DPA10201-DPB11501 DPA10201-DPB11601 DPA10201-DPB11801 DPA10201-DPB11901 DPA10201-DPB13001 DPA10201-DPB15501 DPA10201-DPB19101 DPA10202-DPB10101 DPA10202-DPB10201 DPA10202-DPB10202 DPA10202-DPB10301 DPA10202-DPB10401 DPA10202-DPB10501 DPA10202-DPB10901 DPA10202-DPB110601 DPA10202-DPB11101 DPA10202-DPB11301 DPA10202-DPB113101 DPA10202-DPB11401 DPA10202-DPB11701 DPA10202-DPB11801 DPA10202-DPB11901 DPA10202-DPB12101 DPA10202-DPB12901 DPA10202-DPB13001 DPA10202-DPB13101 DPA10202-DPB13801 DPA10202-DPB14501 DPA10202-DPB15501 DPA10202-DPB16501 DPA10202-DPB18501; note = HLAs: DPA10301-DPB10101 DPA10301-DPB10201 DPA10301-DPB10202 DPA10301-DPB10301 DPA10301-DPB10401 DPA10301-DPB10402 DPA10301-DPB10901 DPA10301-DPB110501 DPA10301-DPB110601 DPA10301-DPB11101 DPA10301-DPB11301 DPA10301-DPB11701 DPA10301-DPB11801 DPA10301-DPB12301 DPA10301-DPB13901 DPA10301-DPB14001 DPA10301-DPB14901 DPA10301-DPB15501 DPA10301-DPB16501 DPA10301-DPB17501 DPA10301-DPB18001 DPA10401-DPB10101 DPA10401-DPB10201 DPA10401-DPB10202 DPA10401-DPB10301 DPA10401-DPB10402 DPA10401-DPB10501 DPA10401-DPB110501 DPA10401-DPB11301 DPA10401-DPB113301 DPA10401-DPB11401 DPA10401-DPB14901 DQA10102-DQB10501 DQA10102-DQB10503 DQA10102-DQB10601 DQA10102-DQB10609 DQA10103-DQB10501 DQA10103-DQB10503 DQA10103-DQB10601 DQA10103-DQB10602 DQA10103-DQB10604 DQA10103-DQB10608 DQA10103-DQB10609 DQA10501-DQB10501 DQA10505-DQB10402 DQA10505-DQB10501
YKRWIILGLNKIVRMYSPVSILD

SEQ ID NO: 6111 - protein, 24 aa, Human immunodeficiency virus 1
  source 1..24: note = HLAs: DRB1_0101 DRB1_0102 DRB1_0103 DRB1_0301 DRB1_0401 DRB1_0402 DRB1_0403 DRB1_0404 DRB1_0405 DRB1_0406 DRB1_0407 DRB1_0408 DRB1_0410 DRB1_0411 DRB1_0701 DRB1_0801 DRB1_0802 DRB1_0803 DRB1_0804 DRB1_0806 DRB1_0809 DRB1_0813 DRB1_0901 DRB1_1001 DRB1_1101 DRB1_1102 DRB1_1103 DRB1_1104 DRB1_1114 DRB1_1201 DRB1_1202 DRB1_1301 DRB1_1302 DRB1_1303 DRB1_1304 DRB1_1305 DRB1_1312 DRB1_1401 DRB1_1402 DRB1_1403 DRB1_1404 DRB1_1405 DRB1_1406 DRB1_1407 DRB1_1418 DRB1_1454 DRB1_1501 DRB1_1502 DRB1_1503 DRB1_1601 DRB1_1602 DPA10103-DPB10101 DPA10103-DPB10201 DPA10103-DPB10202 DPA10103-DPB10301 DPA10103-DPB10401 DPA10103-DPB10501 DPA10103-DPB10601 DPA10103-DPB10901 DPA10103-DPB11001 DPA10103-DPB11101 DPA10103-DPB112401 DPA10103-DPB112601 DPA10103-DPB11301 DPA10103-DPB113101 DPA10103-DPB113301 DPA10103-DPB11401 DPA10103-DPB11501 DPA10103-DPB11601 DPA10103-DPB11701 DPA10103-DPB11801 DPA10103-DPB11901 DPA10103-DPB12001 DPA10103-DPB12101 DPA10103-DPB12301 DPA10103-DPB12901 DPA10103-DPB13001; note = HLAs: DPA10103-DPB13101 DPA10103-DPB13401 DPA10103-DPB13901 DPA10103-DPB14001 DPA10103-DPB14101 DPA10103-DPB14801 DPA10103-DPB15001 DPA10103-DPB15501 DPA10103-DPB15901 DPA10104-DPB10101 DPA10104-DPB10301 DPA10104-DPB11001 DPA10104-DPB11301 DPA10104-DPB11501 DPA10105-DPB10101 DPA10105-DPB10301 DPA10105-DPB10401 DPA10105-DPB11801 DPA10105-DPB15001 DPA10106-DPB10101 DPA10106-DPB11101 DPA10201-DPB10101 DPA10201-DPB10201 DPA10201-DPB10202 DPA10201-DPB10301 DPA10201-DPB10501 DPA10201-DPB10601 DPA10201-DPB10901 DPA10201-DPB110601 DPA10201-DPB11101 DPA10201-DPB11301 DPA10201-DPB113101 DPA10201-DPB113301 DPA10201-DPB11401 DPA10201-DPB11501 DPA10201-DPB11601 DPA10201-DPB11701 DPA10201-DPB11801 DPA10201-DPB11901 DPA10201-DPB12601 DPA10201-DPB13001 DPA10201-DPB13401 DPA10201-DPB14501 DPA10201-DPB15501 DPA10201-DPB19101 DPA10202-DPB10101 DPA10202-DPB10201 DPA10202-DPB10202 DPA10202-DPB10301 DPA10202-DPB10401 DPA10202-DPB10501 DPA10202-DPB10901 DPA10202-DPB110001 DPA10202-DPB110601; note = HLAs: DPA10202-DPB11101 DPA10202-DPB11301 DPA10202-DPB113101 DPA10202-DPB11401 DPA10202-DPB11701 DPA10202-DPB11801 DPA10202-DPB11901 DPA10202-DPB12101 DPA10202-DPB12901 DPA10202-DPB13001 DPA10202-DPB13101 DPA10202-DPB13801 DPA10202-DPB14501 DPA10202-DPB15501 DPA10202-DPB16501 DPA10202-DPB18501 DPA10301-DPB10101 DPA10301-DPB10201 DPA10301-DPB10202 DPA10301-DPB10301 DPA10301-DPB10401 DPA10301-DPB10402 DPA10301-DPB10901 DPA10301-DPB110501 DPA10301-DPB110601 DPA10301-DPB11101 DPA10301-DPB11301 DPA10301-DPB11701 DPA10301-DPB11801 DPA10301-DPB12301 DPA10301-DPB13901 DPA10301-DPB14001 DPA10301-DPB14901 DPA10301-DPB15501 DPA10301-DPB16501 DPA10301-DPB17501 DPA10301-DPB18001 DPA10401-DPB10101 DPA10401-DPB10201 DPA10401-DPB10202 DPA10401-DPB10301 DPA10401-DPB10402 DPA10401-DPB10501 DPA10401-DPB110501 DPA10401-DPB11301 DPA10401-DPB113301 DPA10401-DPB11401 DPA10401-DPB14901 DQA10102-DQB10501 DQA10102-DQB10503 DQA10102-DQB10601 DQA10102-DQB10604 DQA10102-DQB10609 DQA10103-DQB10501; note = HLAs: DQA10103-DQB10503 DQA10103-DQB10601 DQA10103-DQB10602 DQA10103-DQB10604 DQA10103-DQB10608 DQA10103-DQB10609 DQA10501-DQB10501 DQA10505-DQB10402 DQA10505-DQB10501
YKRWIILGLNKIVRMYSPVSILDI

SEQ ID NO: 6112 - protein, 13 aa, Human immunodeficiency virus 1
  source 1..13: note = HLAs: DRB1_1101 DRB1_1305
YLSWVPAHKGIGG

SEQ ID NO: 6113 - protein, 14 aa, Human immunodeficiency virus 1
  source 1..14: note = HLAs: DRB1_0101 DRB1_1001 DRB1_1101 DRB1_1104 DRB1_1305
YLSWVPAHKGIGGN

SEQ ID NO: 6114 - protein, 15 aa, Human immunodeficiency virus 1
  source 1..15: note = HLAs: DRB1_0101 DRB1_0102 DRB1_0801 DRB1_0802 DRB1_0804 DRB1_0806 DRB1_0809 DRB1_0901 DRB1_1001 DRB1_1101 DRB1_1102 DRB1_1103 DRB1_1104 DRB1_1301 DRB1_1304 DRB1_1305 DRB1_1406 DRB1_1601 DQA10103-DQB10601 DQA10505-DQB10402
YLSWVPAHKGIGGNE

SEQ ID NO: 6115 - protein, 16 aa, Human immunodeficiency virus 1
  source 1..16: note = HLAs: DRB1_0101 DRB1_0802 DRB1_0804 DRB1_0809 DRB1_1001 DRB1_1101 DRB1_1103 DRB1_1104 DRB1_1305
YLSWVPAHKGIGGNEQ

SEQ ID NO: 6116 - protein, 17 aa, Human immunodeficiency virus 1
  source 1..17: note = HLAs: DRB1_0101 DRB1_0802 DRB1_0804 DRB1_0806 DRB1_0809 DRB1_1001 DRB1_1101 DRB1_1103 DRB1_1104 DRB1_1305
YLSWVPAHKGIGGNEQV

SEQ ID NO: 6117 - protein, 19 aa, Human immunodeficiency virus 1
  source 1..19: note = HLAs: DRB1_0101 DRB1_1001 DRB1_1101 DRB1_1305
YLSWVPAHKGIGGNEQVDK

SEQ ID NO: 6118 - protein, 20 aa, Human immunodeficiency virus 1
  source 1..20: note = HLAs: DRB1_0101 DRB1_0801 DRB1_0802 DRB1_0806 DRB1_0809 DRB1_1001 DRB1_1101 DRB1_1103 DRB1_1104 DRB1_1305
YLSWVPAHKGIGGNEQVDKL

SEQ ID NO: 6119 - protein, 21 aa, Human immunodeficiency virus 1
  source 1..21: note = HLAs: DRB1_1101 DRB1_1305
YLSWVPAHKGIGGNEQVDKLV

SEQ ID NO: 6120 - protein, 22 aa, Human immunodeficiency virus 1
  source 1..22: note = HLAs: DRB1_1101 DRB1_1104 DRB1_1305
YLSWVPAHKGIGGNEQVDKLVS

SEQ ID NO: 6121 - protein, 23 aa, Human immunodeficiency virus 1
  source 1..23: note = HLAs: DRB1_1101 DRB1_1104 DRB1_1305
YLSWVPAHKGIGGNEQVDKLVSS

SEQ ID NO: 6122 - protein, 24 aa, Human immunodeficiency virus 1
  source 1..24: note = HLAs: DRB1_1101 DRB1_1104 DRB1_1305
YLSWVPAHKGIGGNEQVDKLVSSG

SEQ ID NO: 6123 - protein, 25 aa, Human immunodeficiency virus 1
  source 1..25: note = HLAs: DRB1_0101 DRB1_1001 DRB1_1101 DRB1_1104 DRB1_1305
YLSWVPAHKGIGGNEQVDKLVSSGI

SEQ ID NO: 6124 - protein, 14 aa, Human immunodeficiency virus 1
  source 1..14: note = HLAs: DQA10102-DQB10501 DQA10102-DQB10609
YMDDLYVGSDLEIG

SEQ ID NO: 6125 - protein, 15 aa, Human immunodeficiency virus 1
  source 1..15: note = HLAs: DQA10102-DQB10501 DQA10102-DQB10609 DQA10501-DQB10201 DQA10505-DQB10201 DQA10505-DQB10202
YMDDLYVGSDLEIGQ

SEQ ID NO: 6126 - protein, 16 aa, Human immunodeficiency virus 1
  source 1..16: note = HLAs: DQA10102-DQB10501 DQA10102-DQB10604 DQA10102-DQB10609 DQA10501-DQB10201 DQA10505-DQB10201 DQA10505-DQB10202
YMDDLYVGSDLEIGQH

SEQ ID NO: 6127 - protein, 17 aa, Human immunodeficiency virus 1
  source 1..17: note = HLAs: DPA10301-DPB10101 DQA10102-DQB10501 DQA10102-DQB10609
YMDDLYVGSDLEIGQHR

SEQ ID NO: 6128 - protein, 14 aa, Human immunodeficiency virus 1
  source 1..14: note = HLAs: DQA10201-DQB10301
YNPQSQGVVESMNK

SEQ ID NO: 6129 - protein, 15 aa, Human immunodeficiency virus 1
  source 1..15: note = HLAs: DQA10201-DQB10301
YNPQSQGVVESMNKE

SEQ ID NO: 6130 - protein, 16 aa, Human immunodeficiency virus 1
  source 1..16: note = HLAs: DQA10201-DQB10301
YNPQSQGVVESMNKEL

SEQ ID NO: 6131 - protein, 17 aa, Human immunodeficiency virus 1
  source 1..17: note = HLAs: DQA10201-DQB10301
YNPQSQGVVESMNKELK

SEQ ID NO: 6132 - protein, 20 aa, Human immunodeficiency virus 1
  source 1..20: note = HLAs: DRB1_0806 DRB1_1102 DRB1_1103 DRB1_1104 DRB1_1114 DRB1_1301 DRB1_1302 DRB1_1304 DRB1_1406 DQA10201-DQB10301
YNPQSQGVVESMNKELKKII

SEQ ID NO: 6133 - protein, 21 aa, Human immunodeficiency virus 1
  source 1..21: note = HLAs: DRB1_1102 DRB1_1103 DRB1_1104 DRB1_1301 DRB1_1304 DRB1_1406
YNPQSQGVVESMNKELKKIIG

SEQ ID NO: 6134 - protein, 22 aa, Human immunodeficiency virus 1
  source 1..22: note = HLAs: DRB1_0806 DRB1_1102 DRB1_1103 DRB1_1104 DRB1_1301 DRB1_1304 DRB1_1406
YNPQSQGVVESMNKELKKIIGQ

SEQ ID NO: 6135 - protein, 23 aa, Human immunodeficiency virus 1
  source 1..23: note = HLAs: DRB1_0806 DRB1_1101 DRB1_1102 DRB1_1103 DRB1_1104 DRB1_1301 DRB1_1304 DRB1_1305 DRB1_1406
YNPQSQGVVESMNKELKKIIGQV

SEQ ID NO: 6136 - protein, 24 aa, Human immunodeficiency virus 1
  source 1..24: note = HLAs: DRB1_0804 DRB1_0806 DRB1_1101 DRB1_1102 DRB1_1103 DRB1_1104 DRB1_1301 DRB1_1304 DRB1_1305 DRB1_1406
YNPQSQGVVESMNKELKKIIGQVR

SEQ ID NO: 6137 - protein, 14 aa, Human immunodeficiency virus 1
  source 1..14: note = HLAs: DRB1_1101 DRB1_1103 DRB1_1104 DRB1_1305
YNTPVFAIKKKDST

SEQ ID NO: 6138 - protein, 15 aa, Human immunodeficiency virus 1
  source 1..15: note = HLAs: DRB1_0801 DRB1_0804 DRB1_0806 DRB1_1101 DRB1_1102 DRB1_1103 DRB1_1104 DRB1_1301 DRB1_1304 DRB1_1305 DRB1_1406
YNTPVFAIKKKDSTK

SEQ ID NO: 6139 - protein, 16 aa, Human immunodeficiency virus 1
  source 1..16: note = HLAs: DRB1_0804 DRB1_0806 DRB1_1101 DRB1_1102 DRB1_1103 DRB1_1104 DRB1_1301 DRB1_1304 DRB1_1305 DRB1_1406
YNTPVFAIKKKDSTKW

SEQ ID NO: 6140 - protein, 17 aa, Human immunodeficiency virus 1
  source 1..17: note = HLAs: DRB1_0804 DRB1_0806 DRB1_1101 DRB1_1102 DRB1_1103 DRB1_1104 DRB1_1301 DRB1_1304 DRB1_1305 DRB1_1406
YNTPVFAIKKKDSTKWR

SEQ ID NO: 6141 - protein, 18 aa, Human immunodeficiency virus 1
  source 1..18: note = HLAs: DRB1_1101 DRB1_1103 DRB1_1104 DRB1_1305
YNTPVFAIKKKDSTKWRK

SEQ ID NO: 6142 - protein, 19 aa, Human immunodeficiency virus 1
  source 1..19: note = HLAs: DRB1_0804 DRB1_0806 DRB1_1101 DRB1_1102 DRB1_1103 DRB1_1104 DRB1_1301 DRB1_1304 DRB1_1305 DRB1_1406
YNTPVFAIKKKDSTKWRKL

SEQ ID NO: 6143 - protein, 20 aa, Human immunodeficiency virus 1
  source 1..20: note = HLAs: DRB1_0801 DRB1_0802 DRB1_0804 DRB1_0806 DRB1_0809 DRB1_1101 DRB1_1102 DRB1_1103 DRB1_1104 DRB1_1301 DRB1_1304 DRB1_1305 DRB1_1406 DPA10202-DPB110601 DPA10202-DPB11901 DPA10202-DPB13101
YNTPVFAIKKKDSTKWRKLV

SEQ ID NO: 6144 - protein, 21 aa, Human immunodeficiency virus 1
  source 1..21: note = HLAs: DRB1_0801 DRB1_0804 DRB1_0806 DRB1_1101 DRB1_1102 DRB1_1103 DRB1_1104 DRB1_1301 DRB1_1304 DRB1_1305 DRB1_1406
YNTPVFAIKKKDSTKWRKLVD

SEQ ID NO: 6145 - protein, 22 aa, Human immunodeficiency virus 1
  source 1..22: note = HLAs: DRB1_0801 DRB1_0804 DRB1_0806 DRB1_1101 DRB1_1102 DRB1_1103 DRB1_1104 DRB1_1301 DRB1_1304 DRB1_1305 DRB1_1406
YNTPVFAIKKKDSTKWRKLVDF

SEQ ID NO: 6146 - protein, 23 aa, Human immunodeficiency virus 1
  source 1..23: note = HLAs: DRB1_0801 DRB1_0804 DRB1_0806 DRB1_1101 DRB1_1102 DRB1_1103 DRB1_1104 DRB1_1301 DRB1_1304 DRB1_1305 DRB1_1406
YNTPVFAIKKKDSTKWRKLVDFR

SEQ ID NO: 6147 - protein, 24 aa, Human immunodeficiency virus 1
  source 1..24: note = HLAs: DRB1_0801 DRB1_0804 DRB1_0806 DRB1_1101 DRB1_1102 DRB1_1103 DRB1_1104 DRB1_1301 DRB1_1304 DRB1_1305 DRB1_1406 DPA10202-DPB13101 DPA10301-DPB110601
YNTPVFAIKKKDSTKWRKLVDFRE

SEQ ID NO: 6148 - protein, 25 aa, Human immunodeficiency virus 1
  source 1..25: note = HLAs: DRB1_0405 DRB1_0410 DRB1_0801 DRB1_0804 DRB1_0806 DRB1_1101 DRB1_1102 DRB1_1103 DRB1_1104 DRB1_1301 DRB1_1304 DRB1_1305 DRB1_1406 DPA10103-DPB10101 DPA10103-DPB10201 DPA10103-DPB10202 DPA10103-DPB11501 DPA10103-DPB11601 DPA10103-DPB11901 DPA10103-DPB13101 DPA10103-DPB13401 DPA10103-DPB14101 DPA10103-DPB14801 DPA10103-DPB15001 DPA10104-DPB10101 DPA10104-DPB11501 DPA10105-DPB10101 DPA10105-DPB15001 DPA10201-DPB110601 DPA10201-DPB11601 DPA10201-DPB11901 DPA10202-DPB10101 DPA10202-DPB10501 DPA10202-DPB110601 DPA10202-DPB11901 DPA10202-DPB13101 DPA10202-DPB13801 DPA10202-DPB16501 DPA10301-DPB10101 DPA10301-DPB10201 DPA10301-DPB10202 DPA10301-DPB10401 DPA10301-DPB110601 DPA10301-DPB11801 DPA10301-DPB12301 DPA10301-DPB13901 DPA10301-DPB14001 DPA10301-DPB16501 DPA10401-DPB10101 DPA10401-DPB10201 DPA10401-DPB10202 DPA10401-DPB10501
YNTPVFAIKKKDSTKWRKLVDFREL

SEQ ID NO: 6149 - protein, 15 aa, Human immunodeficiency virus 1
  source 1..15: note = HLAs: DQA10505-DQB10402
YNVLPQGWKGSPAIF

SEQ ID NO: 6150 - protein, 16 aa, Human immunodeficiency virus 1
  source 1..16: note = HLAs: DQA10201-DQB10301 DQA10501-DQB10301 DQA10501-DQB10319 DQA10503-DQB10301 DQA10505-DQB10301 DQA10505-DQB10309 DQA10505-DQB10319 DQA10505-DQB10402 DQA10508-DQB10301 DQA10509-DQB10301
YNVLPQGWKGSPAIFQ

SEQ ID NO: 6151 - protein, 17 aa, Human immunodeficiency virus 1
  source 1..17: note = HLAs: DRB1_0901 DRB1_1001 DQA10103-DQB10601 DQA10201-DQB10301 DQA10505-DQB10402
YNVLPQGWKGSPAIFQS

SEQ ID NO: 6152 - protein, 19 aa, Human immunodeficiency virus 1
  source 1..19: note = HLAs: DRB1_0901 DRB1_1001 DQA10102-DQB10601 DQA10103-DQB10601 DQA10201-DQB10301 DQA10501-DQB10301 DQA10501-DQB10319 DQA10503-DQB10301 DQA10505-DQB10301 DQA10505-DQB10309 DQA10505-DQB10319 DQA10505-DQB10402 DQA10508-DQB10301 DQA10509-DQB10301
YNVLPQGWKGSPAIFQSSM

SEQ ID NO: 6153 - protein, 14 aa, Human immunodeficiency virus 1
  source 1..14: note = HLAs: DRB1_0101 DRB1_1001 DRB1_1101 DRB1_1305
YQEPFKNLKTGKYA

SEQ ID NO: 6154 - protein, 13 aa, Human immunodeficiency virus 1
  source 1..13: note = HLAs: DPA10103-DPB10101 DPA10103-DPB10201 DPA10103-DPB10202 DPA10103-DPB10401 DPA10103-DPB112601 DPA10103-DPB11501 DPA10103-DPB11601 DPA10103-DPB12301 DPA10103-DPB13101 DPA10103-DPB13401 DPA10103-DPB13901 DPA10103-DPB14001 DPA10103-DPB14101 DPA10103-DPB14801 DPA10104-DPB10101 DPA10104-DPB11501 DPA10105-DPB10101 DPA10105-DPB10401 DPA10106-DPB10101 DPA10201-DPB10101 DPA10201-DPB11501 DPA10201-DPB11601 DPA10202-DPB10101 DPA10202-DPB110601 DPA10202-DPB11901 DPA10202-DPB13101 DPA10301-DPB10101 DPA10301-DPB10201 DPA10301-DPB10202 DPA10301-DPB10401 DPA10301-DPB10402 DPA10301-DPB110501 DPA10301-DPB11801 DPA10301-DPB12301 DPA10301-DPB13901 DPA10301-DPB14001 DPA10301-DPB14901 DPA10301-DPB18001 DPA10401-DPB10101 DPA10401-DPB10201 DPA10401-DPB10202
YQIYQEPFKNLKT

SEQ ID NO: 6155 - protein, 14 aa, Human immunodeficiency virus 1
  source 1..14: note = HLAs: DPA10103-DPB10101 DPA10103-DPB10201 DPA10103-DPB10202 DPA10103-DPB10401 DPA10103-DPB112601 DPA10103-DPB11501 DPA10103-DPB11601 DPA10103-DPB11801 DPA10103-DPB11901 DPA10103-DPB12301 DPA10103-DPB13101 DPA10103-DPB13401 DPA10103-DPB13901 DPA10103-DPB14001 DPA10103-DPB14101 DPA10103-DPB14801 DPA10103-DPB15001 DPA10103-DPB15901 DPA10104-DPB10101 DPA10104-DPB11501 DPA10105-DPB10101 DPA10105-DPB10401 DPA10105-DPB11801 DPA10105-DPB15001 DPA10106-DPB10101 DPA10201-DPB10101 DPA10201-DPB110601 DPA10201-DPB11501 DPA10201-DPB11601 DPA10201-DPB11901 DPA10201-DPB13401 DPA10202-DPB10101 DPA10202-DPB10201 DPA10202-DPB10202 DPA10202-DPB10401 DPA10202-DPB110601 DPA10202-DPB11901 DPA10202-DPB13101 DPA10202-DPB16501 DPA10301-DPB10101 DPA10301-DPB10201 DPA10301-DPB10202 DPA10301-DPB10401 DPA10301-DPB10402 DPA10301-DPB110501 DPA10301-DPB110601 DPA10301-DPB11801 DPA10301-DPB12301 DPA10301-DPB13901 DPA10301-DPB14001 DPA10301-DPB14901 DPA10301-DPB16501 DPA10301-DPB17501 DPA10301-DPB18001; note = HLAs: DPA10401-DPB10101 DPA10401-DPB10201 DPA10401-DPB10202
YQIYQEPFKNLKTG

SEQ ID NO: 6156 - protein, 15 aa, Human immunodeficiency virus 1
  source 1..15: note = HLAs: DRB1_0101 DRB1_1001 DPA10103-DPB10101 DPA10103-DPB10201 DPA10103-DPB10202 DPA10103-DPB10401 DPA10103-DPB10402 DPA10103-DPB110501 DPA10103-DPB112601 DPA10103-DPB11501 DPA10103-DPB11601 DPA10103-DPB11801 DPA10103-DPB11901 DPA10103-DPB12301 DPA10103-DPB13101 DPA10103-DPB13401 DPA10103-DPB13901 DPA10103-DPB14001 DPA10103-DPB14101 DPA10103-DPB14801 DPA10103-DPB14901 DPA10103-DPB15001 DPA10103-DPB15101 DPA10103-DPB15901 DPA10103-DPB18001 DPA10104-DPB10101 DPA10104-DPB11501 DPA10105-DPB10101 DPA10105-DPB10401 DPA10105-DPB11801 DPA10105-DPB15001 DPA10106-DPB10101 DPA10201-DPB10101 DPA10201-DPB10201 DPA10201-DPB10202 DPA10201-DPB10401 DPA10201-DPB110601 DPA10201-DPB11501 DPA10201-DPB11601 DPA10201-DPB11901 DPA10201-DPB13401 DPA10202-DPB10101 DPA10202-DPB10201 DPA10202-DPB10202 DPA10202-DPB10401 DPA10202-DPB10501 DPA10202-DPB110601 DPA10202-DPB11801 DPA10202-DPB11901 DPA10202-DPB13101 DPA10202-DPB13801 DPA10202-DPB16501 DPA10301-DPB10101 DPA10301-DPB10201 DPA10301-DPB10202; note = HLAs: DPA10301-DPB10401 DPA10301-DPB10402 DPA10301-DPB110501 DPA10301-DPB110601 DPA10301-DPB11801 DPA10301-DPB12301 DPA10301-DPB13901 DPA10301-DPB14001 DPA10301-DPB14901 DPA10301-DPB16501 DPA10301-DPB17501 DPA10301-DPB18001 DPA10401-DPB10101 DPA10401-DPB10201 DPA10401-DPB10202 DPA10401-DPB10402 DPA10401-DPB110501 DPA10401-DPB14901
YQIYQEPFKNLKTGK

SEQ ID NO: 6157 - protein, 16 aa, Human immunodeficiency virus 1
  source 1..16: note = HLAs: DRB1_1001 DPA10103-DPB10101 DPA10103-DPB10201 DPA10103-DPB10202 DPA10103-DPB10401 DPA10103-DPB112601 DPA10103-DPB11501 DPA10103-DPB11601 DPA10103-DPB11801 DPA10103-DPB11901 DPA10103-DPB12301 DPA10103-DPB13101 DPA10103-DPB13401 DPA10103-DPB13901 DPA10103-DPB14001 DPA10103-DPB14101 DPA10103-DPB14801 DPA10103-DPB15001 DPA10103-DPB15901 DPA10104-DPB10101 DPA10104-DPB11501 DPA10105-DPB10101 DPA10105-DPB10401 DPA10105-DPB11801 DPA10105-DPB15001 DPA10106-DPB10101 DPA10201-DPB10101 DPA10201-DPB10202 DPA10201-DPB110601 DPA10201-DPB11501 DPA10201-DPB11601 DPA10201-DPB11901 DPA10201-DPB13401 DPA10202-DPB10101 DPA10202-DPB10201 DPA10202-DPB10202 DPA10202-DPB10401 DPA10202-DPB110601 DPA10202-DPB11801 DPA10202-DPB11901 DPA10202-DPB13101 DPA10202-DPB16501 DPA10301-DPB10101 DPA10301-DPB10201 DPA10301-DPB10202 DPA10301-DPB10401 DPA10301-DPB10402 DPA10301-DPB110501 DPA10301-DPB110601 DPA10301-DPB11801 DPA10301-DPB12301 DPA10301-DPB13901 DPA10301-DPB14001 DPA10301-DPB14901 DPA10301-DPB16501; note = HLAs: DPA10301-DPB17501 DPA10301-DPB18001 DPA10401-DPB10101 DPA10401-DPB10201 DPA10401-DPB10202
YQIYQEPFKNLKTGKY

SEQ ID NO: 6158 - protein, 17 aa, Human immunodeficiency virus 1
  source 1..17: note = HLAs: DRB1_0101 DRB1_1001 DRB1_1101 DRB1_1103 DRB1_1104 DRB1_1305 DRB1_1601 DPA10103-DPB10101 DPA10103-DPB10201 DPA10103-DPB10202 DPA10103-DPB10401 DPA10103-DPB112601 DPA10103-DPB11501 DPA10103-DPB11601 DPA10103-DPB11801 DPA10103-DPB11901 DPA10103-DPB12301 DPA10103-DPB13101 DPA10103-DPB13401 DPA10103-DPB13901 DPA10103-DPB14001 DPA10103-DPB14101 DPA10103-DPB14801 DPA10103-DPB15001 DPA10103-DPB15901 DPA10104-DPB10101 DPA10104-DPB11501 DPA10105-DPB10101 DPA10105-DPB10401 DPA10105-DPB11801 DPA10105-DPB15001 DPA10106-DPB10101 DPA10201-DPB10101 DPA10201-DPB110601 DPA10201-DPB11501 DPA10201-DPB11601 DPA10201-DPB11901 DPA10201-DPB13401 DPA10202-DPB10101 DPA10202-DPB10201 DPA10202-DPB10202 DPA10202-DPB10401 DPA10202-DPB110601 DPA10202-DPB11801 DPA10202-DPB11901 DPA10202-DPB13101 DPA10202-DPB16501 DPA10301-DPB10101 DPA10301-DPB10201 DPA10301-DPB10202 DPA10301-DPB10401 DPA10301-DPB10402 DPA10301-DPB110501 DPA10301-DPB110601 DPA10301-DPB11801 DPA10301-DPB12301 DPA10301-DPB13901 DPA10301-DPB14001; note = HLAs: DPA10301-DPB14901 DPA10301-DPB16501 DPA10301-DPB18001 DPA10401-DPB10101 DPA10401-DPB10201 DPA10401-DPB10202
YQIYQEPFKNLKTGKYA

SEQ ID NO: 6159 - protein, 15 aa, Human immunodeficiency virus 1
  source 1..15: note = HLAs: DPA10301-DPB10101 DPA10401-DPB10101 DQA10102-DQB10501 DQA10102-DQB10609
YQYMDDLYVGSDLEI

SEQ ID NO: 6160 - protein, 16 aa, Human immunodeficiency virus 1
  source 1..16: note = HLAs: DPA10301-DPB10101 DPA10301-DPB10202 DPA10401-DPB10101 DQA10102-DQB10501 DQA10102-DQB10604 DQA10102-DQB10609 DQA10501-DQB10201 DQA10505-DQB10201 DQA10505-DQB10202
YQYMDDLYVGSDLEIG

SEQ ID NO: 6161 - protein, 17 aa, Human immunodeficiency virus 1
  source 1..17: note = HLAs: DPA10301-DPB10101 DPA10401-DPB10101 DQA10102-DQB10501 DQA10102-DQB10609
YQYMDDLYVGSDLEIGQ

SEQ ID NO: 6162 - protein, 18 aa, Human immunodeficiency virus 1
  source 1..18: note = HLAs: DQA10102-DQB10501 DQA10102-DQB10609
YQYMDDLYVGSDLEIGQH

SEQ ID NO: 6163 - protein, 19 aa, Human immunodeficiency virus 1
  source 1..19: note = HLAs: DPA10301-DPB10101 DPA10301-DPB10201 DPA10301-DPB10202 DPA10401-DPB10101 DQA10102-DQB10501 DQA10102-DQB10609
YQYMDDLYVGSDLEIGQHR

SEQ ID NO: 6164 - protein, 20 aa, Human immunodeficiency virus 1
  source 1..20: note = HLAs: DPA10202-DPB10101 DPA10301-DPB10101 DPA10301-DPB10201 DPA10301-DPB10202 DPA10301-DPB10401 DPA10301-DPB11801 DPA10301-DPB12301 DPA10301-DPB13901 DPA10401-DPB10101 DQA10102-DQB10501 DQA10102-DQB10604 DQA10102-DQB10609
YQYMDDLYVGSDLEIGQHRA

SEQ ID NO: 6165 - protein, 15 aa, Human immunodeficiency virus 1
  source 1..15: note = HLAs: DRB1_0101
YQYNVLPQGWKGSPA

SEQ ID NO: 6166 - protein, 19 aa, Human immunodeficiency virus 1
  source 1..19: note = HLAs: DRB1_1001 DQA10201-DQB10301 DQA10505-DQB10402
YQYNVLPQGWKGSPAIFQS

SEQ ID NO: 6167 - protein, 20 aa, Human immunodeficiency virus 1
  source 1..20: note = HLAs: DRB1_0101 DRB1_0901 DRB1_1001 DQA10102-DQB10501 DQA10102-DQB10601 DQA10103-DQB10601 DQA10201-DQB10301 DQA10501-DQB10301 DQA10501-DQB10319 DQA10503-DQB10301 DQA10505-DQB10301 DQA10505-DQB10309 DQA10505-DQB10319 DQA10505-DQB10402 DQA10508-DQB10301 DQA10509-DQB10301
YQYNVLPQGWKGSPAIFQSS

SEQ ID NO: 6168 - protein, 21 aa, Human immunodeficiency virus 1
  source 1..21: note = HLAs: DRB1_0101 DRB1_0901 DRB1_1001 DQA10103-DQB10601 DQA10201-DQB10301 DQA10505-DQB10402
YQYNVLPQGWKGSPAIFQSSM

SEQ ID NO: 6169 - protein, 14 aa, Human immunodeficiency virus 1
  source 1..14: note = HLAs: DQA10102-DQB10501
YTAFTIPSINNETP

SEQ ID NO: 6170 - protein, 15 aa, Human immunodeficiency virus 1
  source 1..15: note = HLAs: DRB1_1001 DQA10102-DQB10501 DQA10201-DQB10301 DQA10201-DQB10303 DQA10505-DQB10402
YTAFTIPSINNETPG

SEQ ID NO: 6171 - protein, 16 aa, Human immunodeficiency virus 1
  source 1..16: note = HLAs: DQA10102-DQB10501
YTAFTIPSINNETPGI

SEQ ID NO: 6172 - protein, 17 aa, Human immunodeficiency virus 1
  source 1..17: note = HLAs: DQA10102-DQB10501
YTAFTIPSINNETPGIR

SEQ ID NO: 6173 - protein, 19 aa, Human immunodeficiency virus 1
  source 1..19: note = HLAs: DQA10102-DQB10501
YTAFTIPSINNETPGIRYQ

SEQ ID NO: 6174 - protein, 20 aa, Human immunodeficiency virus 1
  source 1..20: note = HLAs: DRB1_1001 DQA10102-DQB10501
YTAFTIPSINNETPGIRYQY

SEQ ID NO: 6175 - protein, 21 aa, Human immunodeficiency virus 1
  source 1..21: note = HLAs: DQA10102-DQB10501
YTAFTIPSINNETPGIRYQYN

SEQ ID NO: 6176 - protein, 22 aa, Human immunodeficiency virus 1
  source 1..22: note = HLAs: DQA10102-DQB10501
YTAFTIPSINNETPGIRYQYNV

SEQ ID NO: 6177 - protein, 23 aa, Human immunodeficiency virus 1
  source 1..23: note = HLAs: DQA10102-DQB10501
YTAFTIPSINNETPGIRYQYNVL

SEQ ID NO: 6178 - protein, 24 aa, Human immunodeficiency virus 1
  source 1..24: note = HLAs: DRB1_1001 DQA10102-DQB10501 DQA10103-DQB10501
YTAFTIPSINNETPGIRYQYNVLP

SEQ ID NO: 6179 - protein, 25 aa, Human immunodeficiency virus 1
  source 1..25: note = HLAs: DRB1_0101 DRB1_0401 DRB1_0404 DRB1_0405 DRB1_0408 DRB1_0410 DRB1_1001 DPA10301-DPB10101 DPA10401-DPB10101 DQA10102-DQB10501 DQA10103-DQB10501
YTAFTIPSINNETPGIRYQYNVLPQ

SEQ ID NO: 6180 - protein, 13 aa, Human immunodeficiency virus 1
  source 1..13: note = HLAs: DQA10501-DQB10201 DQA10505-DQB10201 DQA10505-DQB10202
YWQATWIPEWEFV

SEQ ID NO: 6181 - protein, 14 aa, Human immunodeficiency virus 1
  source 1..14: note = HLAs: DPA10103-DPB11501 DPA10104-DPB11501 DPA10301-DPB10101 DPA10301-DPB10201 DPA10301-DPB10202 DPA10301-DPB10401 DPA10301-DPB12301 DPA10301-DPB13901 DPA10301-DPB14001 DPA10401-DPB10101 DQA10102-DQB10501 DQA10501-DQB10201 DQA10505-DQB10201 DQA10505-DQB10202
YWQATWIPEWEFVN

SEQ ID NO: 6182 - protein, 15 aa, Human immunodeficiency virus 1
  source 1..15: note = HLAs: DPA10103-DPB10101 DPA10103-DPB11501 DPA10104-DPB10101 DPA10104-DPB11501 DPA10105-DPB10101 DPA10202-DPB10101 DPA10301-DPB10101 DPA10301-DPB10201 DPA10301-DPB10202 DPA10301-DPB10401 DPA10301-DPB110601 DPA10301-DPB11801 DPA10301-DPB12301 DPA10301-DPB13901 DPA10301-DPB14001 DPA10301-DPB16501 DPA10401-DPB10101 DPA10401-DPB10201 DPA10401-DPB10202 DQA10102-DQB10501 DQA10102-DQB10503 DQA10102-DQB10609 DQA10501-DQB10201 DQA10505-DQB10201 DQA10505-DQB10202
YWQATWIPEWEFVNT

SEQ ID NO: 6183 - protein, 16 aa, Human immunodeficiency virus 1
  source 1..16: note = HLAs: DPA10103-DPB10101 DPA10103-DPB11501 DPA10104-DPB10101 DPA10104-DPB11501 DPA10105-DPB10101 DPA10301-DPB10101 DPA10301-DPB10201 DPA10301-DPB10202 DPA10301-DPB10401 DPA10301-DPB110601 DPA10301-DPB12301 DPA10301-DPB13901 DPA10301-DPB14001 DPA10301-DPB16501 DPA10401-DPB10101 DQA10101-DQB10501 DQA10102-DQB10501 DQA10102-DQB10502 DQA10102-DQB10609 DQA10104-DQB10501 DQA10105-DQB10501 DQA10501-DQB10201 DQA10505-DQB10201 DQA10505-DQB10202
YWQATWIPEWEFVNTP

SEQ ID NO: 6184 - protein, 17 aa, Human immunodeficiency virus 1
  source 1..17: note = HLAs: DPA10103-DPB11501 DPA10104-DPB11501 DPA10301-DPB10101 DPA10301-DPB10201 DPA10301-DPB10202 DPA10301-DPB10401 DPA10301-DPB110601 DPA10301-DPB12301 DPA10301-DPB13901 DPA10301-DPB14001 DPA10401-DPB10101 DQA10102-DQB10501
YWQATWIPEWEFVNTPP

SEQ ID NO: 6185 - protein, 18 aa, Human immunodeficiency virus 1
  source 1..18: note = HLAs: DPA10301-DPB10101 DQA10102-DQB10501
YWQATWIPEWEFVNTPPL

SEQ ID NO: 6186 - protein, 19 aa, Human immunodeficiency virus 1
  source 1..19: note = HLAs: DRB1_0405 DRB1_0408 DRB1_0701 DRB1_0901 DRB1_1001 DRB1_1602 DPA10103-DPB10101 DPA10103-DPB11501 DPA10104-DPB10101 DPA10104-DPB11501 DPA10105-DPB10101 DPA10301-DPB10101 DPA10301-DPB10201 DPA10301-DPB10202 DPA10301-DPB10401 DPA10301-DPB110601 DPA10301-DPB12301 DPA10301-DPB13901 DPA10301-DPB14001 DPA10301-DPB16501 DPA10401-DPB10101 DQA10101-DQB10501 DQA10102-DQB10501 DQA10102-DQB10604 DQA10102-DQB10609 DQA10103-DQB10501 DQA10104-DQB10501 DQA10105-DQB10501 DQA10501-DQB10201 DQA10505-DQB10201 DQA10505-DQB10202
YWQATWIPEWEFVNTPPLV

SEQ ID NO: 6187 - protein, 20 aa, Human immunodeficiency virus 1
  source 1..20: note = HLAs: DRB1_0101 DRB1_0401 DRB1_0405 DRB1_0408 DRB1_0701 DRB1_0813 DRB1_0901 DRB1_1001 DRB1_1114 DRB1_1302 DRB1_1502 DRB1_1601 DRB1_1602 DPA10103-DPB10101 DPA10103-DPB10201 DPA10103-DPB11501 DPA10103-DPB11601 DPA10103-DPB11901 DPA10103-DPB13101 DPA10103-DPB14801 DPA10103-DPB15001 DPA10104-DPB10101 DPA10104-DPB11501 DPA10105-DPB10101 DPA10105-DPB15001 DPA10106-DPB10101 DPA10201-DPB10101 DPA10201-DPB11501 DPA10202-DPB10101 DPA10202-DPB10202 DPA10202-DPB110601 DPA10202-DPB11901 DPA10202-DPB13101 DPA10202-DPB15501 DPA10301-DPB10101 DPA10301-DPB10201 DPA10301-DPB10202 DPA10301-DPB10401 DPA10301-DPB10402 DPA10301-DPB110501 DPA10301-DPB110601 DPA10301-DPB11101 DPA10301-DPB11801 DPA10301-DPB12301 DPA10301-DPB13901 DPA10301-DPB14001 DPA10301-DPB14901 DPA10301-DPB15501 DPA10301-DPB16501 DPA10301-DPB17501 DPA10301-DPB18001 DPA10401-DPB10101 DPA10401-DPB10201 DPA10401-DPB10202 DPA10401-DPB10501 DQA10101-DQB10501 DQA10102-DQB10501 DQA10102-DQB10503 DQA10102-DQB10604 DQA10102-DQB10609; note = HLAs: DQA10103-DQB10501 DQA10103-DQB10609 DQA10104-DQB10501 DQA10105-DQB10501
YWQATWIPEWEFVNTPPLVK

SEQ ID NO: 6188 - protein, 21 aa, Human immunodeficiency virus 1
  source 1..21: note = HLAs: DRB1_0101 DRB1_0401 DRB1_0405 DRB1_0408 DRB1_0701 DRB1_0901 DRB1_1001 DRB1_1114 DRB1_1302 DRB1_1303 DRB1_1312 DRB1_1502 DRB1_1601 DRB1_1602 DPA10103-DPB10101 DPA10103-DPB11501 DPA10103-DPB13101 DPA10103-DPB15001 DPA10104-DPB10101 DPA10104-DPB11501 DPA10105-DPB10101 DPA10105-DPB15001 DPA10202-DPB10101 DPA10202-DPB13101 DPA10301-DPB10101 DPA10301-DPB10201 DPA10301-DPB10202 DPA10301-DPB10401 DPA10301-DPB10402 DPA10301-DPB110501 DPA10301-DPB110601 DPA10301-DPB11801 DPA10301-DPB12301 DPA10301-DPB13901 DPA10301-DPB14001 DPA10301-DPB14901 DPA10301-DPB15501 DPA10301-DPB16501 DPA10301-DPB18001 DPA10401-DPB10101 DPA10401-DPB10201 DPA10401-DPB10202 DPA10401-DPB10501 DQA10102-DQB10501 DQA10102-DQB10609 DQA10103-DQB10501 DQA10103-DQB10609
YWQATWIPEWEFVNTPPLVKL

SEQ ID NO: 6189 - protein, 22 aa, Human immunodeficiency virus 1
  source 1..22: note = HLAs: DRB1_0101 DRB1_0401 DRB1_0405 DRB1_0408 DRB1_0410 DRB1_0701 DRB1_0813 DRB1_0901 DRB1_1001 DRB1_1114 DRB1_1302 DRB1_1303 DRB1_1304 DRB1_1312 DRB1_1402 DRB1_1502 DRB1_1601 DRB1_1602 DPA10103-DPB10101 DPA10103-DPB10201 DPA10103-DPB11501 DPA10103-DPB13101 DPA10103-DPB14801 DPA10103-DPB15001 DPA10104-DPB10101 DPA10104-DPB11501 DPA10105-DPB10101 DPA10105-DPB15001 DPA10106-DPB10101 DPA10201-DPB10101 DPA10201-DPB11501 DPA10202-DPB10101 DPA10202-DPB10501 DPA10202-DPB110601 DPA10202-DPB11901 DPA10202-DPB13101 DPA10202-DPB13801 DPA10301-DPB10101 DPA10301-DPB10201 DPA10301-DPB10202 DPA10301-DPB10401 DPA10301-DPB10402 DPA10301-DPB110501 DPA10301-DPB110601 DPA10301-DPB11801 DPA10301-DPB12301 DPA10301-DPB13901 DPA10301-DPB14001 DPA10301-DPB14901 DPA10301-DPB15501 DPA10301-DPB16501 DPA10301-DPB17501 DPA10301-DPB18001 DPA10401-DPB10101 DPA10401-DPB10201 DPA10401-DPB10202 DPA10401-DPB10501 DQA10102-DQB10501 DQA10102-DQB10609 DQA10103-DQB10501 DQA10103-DQB10609
YWQATWIPEWEFVNTPPLVKLW

SEQ ID NO: 6190 - protein, 23 aa, Human immunodeficiency virus 1
  source 1..23: note = HLAs: DRB1_0101 DRB1_0401 DRB1_0405 DRB1_0408 DRB1_0410 DRB1_0701 DRB1_0801 DRB1_0813 DRB1_0901 DRB1_1001 DRB1_1101 DRB1_1102 DRB1_1114 DRB1_1301 DRB1_1302 DRB1_1303 DRB1_1304 DRB1_1305 DRB1_1312 DRB1_1402 DRB1_1406 DRB1_1502 DRB1_1601 DRB1_1602 DPA10103-DPB10101 DPA10103-DPB10201 DPA10103-DPB10202 DPA10103-DPB11501 DPA10103-DPB11601 DPA10103-DPB11901 DPA10103-DPB13101 DPA10103-DPB13401 DPA10103-DPB14101 DPA10103-DPB14801 DPA10103-DPB15001 DPA10104-DPB10101 DPA10104-DPB11501 DPA10105-DPB10101 DPA10105-DPB15001 DPA10106-DPB10101 DPA10201-DPB10101 DPA10201-DPB11501 DPA10202-DPB10101 DPA10202-DPB10201 DPA10202-DPB10202 DPA10202-DPB10501 DPA10202-DPB110601 DPA10202-DPB11901 DPA10202-DPB13101 DPA10202-DPB13801 DPA10202-DPB15501 DPA10202-DPB16501 DPA10301-DPB10101 DPA10301-DPB10201 DPA10301-DPB10202 DPA10301-DPB10401 DPA10301-DPB10402 DPA10301-DPB110501 DPA10301-DPB110601 DPA10301-DPB11801 DPA10301-DPB12301 DPA10301-DPB13901 DPA10301-DPB14001 DPA10301-DPB14901 DPA10301-DPB15501; note = HLAs: DPA10301-DPB16501 DPA10301-DPB17501 DPA10301-DPB18001 DPA10401-DPB10101 DPA10401-DPB10201 DPA10401-DPB10202 DPA10401-DPB10501 DPA10401-DPB11401 DQA10102-DQB10501 DQA10102-DQB10503 DQA10102-DQB10609 DQA10103-DQB10501 DQA10103-DQB10609
YWQATWIPEWEFVNTPPLVKLWY

SEQ ID NO: 6191 - protein, 24 aa, Human immunodeficiency virus 1
  source 1..24: note = HLAs: DRB1_0101 DRB1_0401 DRB1_0405 DRB1_0408 DRB1_0410 DRB1_0701 DRB1_0801 DRB1_0813 DRB1_0901 DRB1_1001 DRB1_1101 DRB1_1102 DRB1_1114 DRB1_1301 DRB1_1302 DRB1_1303 DRB1_1304 DRB1_1305 DRB1_1312 DRB1_1402 DRB1_1406 DRB1_1502 DRB1_1601 DRB1_1602 DPA10103-DPB10101 DPA10103-DPB10201 DPA10103-DPB10202 DPA10103-DPB11501 DPA10103-DPB11601 DPA10103-DPB11901 DPA10103-DPB13101 DPA10103-DPB13401 DPA10103-DPB14101 DPA10103-DPB14801 DPA10103-DPB15001 DPA10104-DPB10101 DPA10104-DPB11501 DPA10105-DPB10101 DPA10105-DPB15001 DPA10106-DPB10101 DPA10201-DPB10101 DPA10201-DPB11501 DPA10202-DPB10101 DPA10202-DPB10201 DPA10202-DPB10202 DPA10202-DPB10501 DPA10202-DPB110601 DPA10202-DPB11801 DPA10202-DPB11901 DPA10202-DPB13101 DPA10202-DPB13801 DPA10202-DPB15501 DPA10202-DPB16501 DPA10301-DPB10101 DPA10301-DPB10201 DPA10301-DPB10202 DPA10301-DPB10401 DPA10301-DPB10402 DPA10301-DPB110501 DPA10301-DPB110601 DPA10301-DPB11101 DPA10301-DPB11801 DPA10301-DPB12301 DPA10301-DPB13901 DPA10301-DPB14001; note = HLAs: DPA10301-DPB14901 DPA10301-DPB15501 DPA10301-DPB16501 DPA10301-DPB17501 DPA10301-DPB18001 DPA10401-DPB10101 DPA10401-DPB10201 DPA10401-DPB10202 DPA10401-DPB10501 DPA10401-DPB11401 DQA10102-DQB10501 DQA10102-DQB10503 DQA10102-DQB10609 DQA10103-DQB10501 DQA10103-DQB10609
YWQATWIPEWEFVNTPPLVKLWYQ

SEQ ID NO: 6192 - protein, 25 aa, Human immunodeficiency virus 1
  source 1..25: note = HLAs: DRB1_0101 DRB1_0401 DRB1_0405 DRB1_0408 DRB1_0410 DRB1_0701 DRB1_0801 DRB1_0813 DRB1_0901 DRB1_1001 DRB1_1101 DRB1_1102 DRB1_1114 DRB1_1301 DRB1_1302 DRB1_1303 DRB1_1304 DRB1_1305 DRB1_1312 DRB1_1402 DRB1_1406 DRB1_1502 DRB1_1601 DRB1_1602 DPA10103-DPB10101 DPA10103-DPB10201 DPA10103-DPB10202 DPA10103-DPB11501 DPA10103-DPB11601 DPA10103-DPB11901 DPA10103-DPB13101 DPA10103-DPB13401 DPA10103-DPB14101 DPA10103-DPB14801 DPA10103-DPB15001 DPA10104-DPB10101 DPA10104-DPB11501 DPA10105-DPB10101 DPA10105-DPB15001 DPA10106-DPB10101 DPA10201-DPB10101 DPA10201-DPB11501 DPA10202-DPB10101 DPA10202-DPB10201 DPA10202-DPB10202 DPA10202-DPB10501 DPA10202-DPB110601 DPA10202-DPB11801 DPA10202-DPB11901 DPA10202-DPB13101 DPA10202-DPB13801 DPA10202-DPB15501 DPA10202-DPB16501 DPA10301-DPB10101 DPA10301-DPB10201 DPA10301-DPB10202 DPA10301-DPB10401 DPA10301-DPB10402 DPA10301-DPB110501 DPA10301-DPB110601 DPA10301-DPB11101 DPA10301-DPB11801 DPA10301-DPB12301 DPA10301-DPB13901 DPA10301-DPB14001; note = HLAs: DPA10301-DPB14901 DPA10301-DPB15501 DPA10301-DPB16501 DPA10301-DPB17501 DPA10301-DPB18001 DPA10401-DPB10101 DPA10401-DPB10201 DPA10401-DPB10202 DPA10401-DPB10402 DPA10401-DPB10501 DPA10401-DPB110501 DPA10401-DPB11401 DPA10401-DPB14901 DQA10102-DQB10501 DQA10102-DQB10503 DQA10102-DQB10604 DQA10102-DQB10609 DQA10103-DQB10501 DQA10103-DQB10609
YWQATWIPEWEFVNTPPLVKLWYQL

SEQ ID NO: 6193 - protein, 14 aa, synthetic construct
  source 1..14: note = Seed: PPFLWMGYELHPDK; note = HLAs: DRB1_1001 DPA10103-DPB10101 DPA10103-DPB10201 DPA10103-DPB10202 DPA10103-DPB10401 DPA10103-DPB112601 DPA10103-DPB11501 DPA10103-DPB11601 DPA10103-DPB11901 DPA10103-DPB12301 DPA10103-DPB13101 DPA10103-DPB13401 DPA10103-DPB13901 DPA10103-DPB14001 DPA10103-DPB14101 DPA10103-DPB14801 DPA10103-DPB15001 DPA10103-DPB15901 DPA10104-DPB10101 DPA10104-DPB11501 DPA10105-DPB10101 DPA10105-DPB10401 DPA10105-DPB15001 DPA10106-DPB10101 DPA10201-DPB10101 DPA10201-DPB110601 DPA10201-DPB11501 DPA10201-DPB11601 DPA10201-DPB11901 DPA10202-DPB10101 DPA10202-DPB10201 DPA10202-DPB10202 DPA10202-DPB10401 DPA10202-DPB110601 DPA10202-DPB11901 DPA10202-DPB13101 DPA10202-DPB16501 DPA10301-DPB10101 DPA10301-DPB10201 DPA10301-DPB10202 DPA10301-DPB10401 DPA10301-DPB10402 DPA10301-DPB110501 DPA10301-DPB110601 DPA10301-DPB11801 DPA10301-DPB12301 DPA10301-DPB13901 DPA10301-DPB14001 DPA10301-DPB14901 DPA10301-DPB15501 DPA10301-DPB16501 DPA10301-DPB17501 DPA10301-DPB18001 DPA10401-DPB10101 DPA10401-DPB10201; note = HLAs: DPA10401-DPB10202 DPA10401-DPB10402 DPA10401-DPB10501 DPA10401-DPB110501 DPA10401-DPB14901
PPFLWSGFELLPDK

SEQ ID NO: 6194 - protein, 14 aa, synthetic construct
  source 1..14: note = Seed: PPFLWMGYELHPDK; note = HLAs: DRB1_1001 DPA10103-DPB10101 DPA10103-DPB10201 DPA10103-DPB10202 DPA10103-DPB10401 DPA10103-DPB112601 DPA10103-DPB11501 DPA10103-DPB11601 DPA10103-DPB11901 DPA10103-DPB12301 DPA10103-DPB13101 DPA10103-DPB13401 DPA10103-DPB13901 DPA10103-DPB14001 DPA10103-DPB14101 DPA10103-DPB14801 DPA10103-DPB15001 DPA10103-DPB15901 DPA10104-DPB10101 DPA10104-DPB11501 DPA10105-DPB10101 DPA10105-DPB10401 DPA10105-DPB15001 DPA10106-DPB10101 DPA10201-DPB10101 DPA10201-DPB110601 DPA10201-DPB11501 DPA10201-DPB11601 DPA10201-DPB11901 DPA10202-DPB10101 DPA10202-DPB10201 DPA10202-DPB10202 DPA10202-DPB10401 DPA10202-DPB110601 DPA10202-DPB11901 DPA10202-DPB13101 DPA10202-DPB16501 DPA10301-DPB10101 DPA10301-DPB10201 DPA10301-DPB10202 DPA10301-DPB10401 DPA10301-DPB10402 DPA10301-DPB110501 DPA10301-DPB110601 DPA10301-DPB11801 DPA10301-DPB12301 DPA10301-DPB13901 DPA10301-DPB14001 DPA10301-DPB14901 DPA10301-DPB15501 DPA10301-DPB16501 DPA10301-DPB17501 DPA10301-DPB18001 DPA10401-DPB10101 DPA10401-DPB10201; note = HLAs: DPA10401-DPB10202 DPA10401-DPB10402 DPA10401-DPB10501 DPA10401-DPB110501 DPA10401-DPB14901
PPFLWSGFELVPDK

SEQ ID NO: 6195 - protein, 14 aa, synthetic construct
  source 1..14: note = Seed: PPFLWMGYELHPDK; note = HLAs: DRB1_1001 DPA10103-DPB10101 DPA10103-DPB10201 DPA10103-DPB10202 DPA10103-DPB10401 DPA10103-DPB112601 DPA10103-DPB11501 DPA10103-DPB11601 DPA10103-DPB11901 DPA10103-DPB12301 DPA10103-DPB13101 DPA10103-DPB13401 DPA10103-DPB13901 DPA10103-DPB14001 DPA10103-DPB14101 DPA10103-DPB14801 DPA10103-DPB15001 DPA10103-DPB15901 DPA10104-DPB10101 DPA10104-DPB11501 DPA10105-DPB10101 DPA10105-DPB10401 DPA10105-DPB15001 DPA10106-DPB10101 DPA10201-DPB10101 DPA10201-DPB110601 DPA10201-DPB11501 DPA10201-DPB11601 DPA10201-DPB11901 DPA10202-DPB10101 DPA10202-DPB10201 DPA10202-DPB10202 DPA10202-DPB10401 DPA10202-DPB110601 DPA10202-DPB11901 DPA10202-DPB13101 DPA10202-DPB16501 DPA10301-DPB10101 DPA10301-DPB10201 DPA10301-DPB10202 DPA10301-DPB10401 DPA10301-DPB10402 DPA10301-DPB110501 DPA10301-DPB110601 DPA10301-DPB11801 DPA10301-DPB12301 DPA10301-DPB13901 DPA10301-DPB14001 DPA10301-DPB14901 DPA10301-DPB15501 DPA10301-DPB16501 DPA10301-DPB17501 DPA10301-DPB18001 DPA10401-DPB10101 DPA10401-DPB10201; note = HLAs: DPA10401-DPB10202 DPA10401-DPB10402 DPA10401-DPB10501 DPA10401-DPB110501 DPA10401-DPB14901
PPFLWAGFELIPDK

SEQ ID NO: 6196 - protein, 14 aa, synthetic construct
  source 1..14: note = Seed: PPFLWMGYELHPDK; note = HLAs: DRB1_1001 DPA10103-DPB10101 DPA10103-DPB10201 DPA10103-DPB10202 DPA10103-DPB10401 DPA10103-DPB112601 DPA10103-DPB11501 DPA10103-DPB11601 DPA10103-DPB11901 DPA10103-DPB12301 DPA10103-DPB13101 DPA10103-DPB13401 DPA10103-DPB13901 DPA10103-DPB14001 DPA10103-DPB14101 DPA10103-DPB14801 DPA10103-DPB15001 DPA10103-DPB15901 DPA10104-DPB10101 DPA10104-DPB11501 DPA10105-DPB10101 DPA10105-DPB10401 DPA10105-DPB15001 DPA10106-DPB10101 DPA10201-DPB10101 DPA10201-DPB110601 DPA10201-DPB11501 DPA10201-DPB11601 DPA10201-DPB11901 DPA10202-DPB10101 DPA10202-DPB10201 DPA10202-DPB10202 DPA10202-DPB10401 DPA10202-DPB110601 DPA10202-DPB11901 DPA10202-DPB13101 DPA10202-DPB16501 DPA10301-DPB10101 DPA10301-DPB10201 DPA10301-DPB10202 DPA10301-DPB10401 DPA10301-DPB10402 DPA10301-DPB110501 DPA10301-DPB110601 DPA10301-DPB11801 DPA10301-DPB12301 DPA10301-DPB13901 DPA10301-DPB14001 DPA10301-DPB14901 DPA10301-DPB15501 DPA10301-DPB16501 DPA10301-DPB17501 DPA10301-DPB18001 DPA10401-DPB10101 DPA10401-DPB10201; note = HLAs: DPA10401-DPB10202 DPA10401-DPB10402 DPA10401-DPB10501 DPA10401-DPB110501 DPA10401-DPB14901
PPFLWTGFELMPDK

SEQ ID NO: 6197 - protein, 14 aa, synthetic construct
  source 1..14: note = Seed: PPFLWMGYELHPDK; note = HLAs: DPA10103-DPB10101 DPA10103-DPB10201 DPA10103-DPB10202 DPA10103-DPB10401 DPA10103-DPB112601 DPA10103-DPB11501 DPA10103-DPB11601 DPA10103-DPB11901 DPA10103-DPB12301 DPA10103-DPB13101 DPA10103-DPB13401 DPA10103-DPB13901 DPA10103-DPB14001 DPA10103-DPB14101 DPA10103-DPB14801 DPA10103-DPB15001 DPA10103-DPB15901 DPA10104-DPB10101 DPA10104-DPB11501 DPA10105-DPB10101 DPA10105-DPB10401 DPA10105-DPB15001 DPA10106-DPB10101 DPA10201-DPB10101 DPA10201-DPB110601 DPA10201-DPB11501 DPA10201-DPB11601 DPA10201-DPB11901 DPA10202-DPB10101 DPA10202-DPB10201 DPA10202-DPB10202 DPA10202-DPB10401 DPA10202-DPB110601 DPA10202-DPB11901 DPA10202-DPB13101 DPA10202-DPB16501 DPA10301-DPB10101 DPA10301-DPB10201 DPA10301-DPB10202 DPA10301-DPB10401 DPA10301-DPB10402 DPA10301-DPB110501 DPA10301-DPB110601 DPA10301-DPB11801 DPA10301-DPB12301 DPA10301-DPB13901 DPA10301-DPB14001 DPA10301-DPB14901 DPA10301-DPB15501 DPA10301-DPB16501 DPA10301-DPB17501 DPA10301-DPB18001 DPA10401-DPB10101 DPA10401-DPB10201; note = HLAs: DPA10401-DPB10202 DPA10401-DPB10402 DPA10401-DPB10501 DPA10401-DPB110501 DPA10401-DPB14901
PPFLWHGFELLPDK

SEQ ID NO: 6198 - protein, 14 aa, synthetic construct
  source 1..14: note = Seed: PPFLWMGYELHPDK; note = HLAs: DRB1_1001 DPA10103-DPB10101 DPA10103-DPB10201 DPA10103-DPB10202 DPA10103-DPB10401 DPA10103-DPB112601 DPA10103-DPB11501 DPA10103-DPB11601 DPA10103-DPB11901 DPA10103-DPB12301 DPA10103-DPB13101 DPA10103-DPB13401 DPA10103-DPB13901 DPA10103-DPB14001 DPA10103-DPB14101 DPA10103-DPB14801 DPA10103-DPB15001 DPA10103-DPB15901 DPA10104-DPB10101 DPA10104-DPB11501 DPA10105-DPB10101 DPA10105-DPB10401 DPA10105-DPB15001 DPA10106-DPB10101 DPA10201-DPB10101 DPA10201-DPB110601 DPA10201-DPB11501 DPA10201-DPB11601 DPA10201-DPB11901 DPA10202-DPB10101 DPA10202-DPB10201 DPA10202-DPB10202 DPA10202-DPB10401 DPA10202-DPB110601 DPA10202-DPB11901 DPA10202-DPB13101 DPA10202-DPB16501 DPA10301-DPB10101 DPA10301-DPB10201 DPA10301-DPB10202 DPA10301-DPB10401 DPA10301-DPB10402 DPA10301-DPB110501 DPA10301-DPB110601 DPA10301-DPB11801 DPA10301-DPB12301 DPA10301-DPB13901 DPA10301-DPB14001 DPA10301-DPB14901 DPA10301-DPB15501 DPA10301-DPB16501 DPA10301-DPB17501 DPA10301-DPB18001 DPA10401-DPB10101 DPA10401-DPB10201; note = HLAs: DPA10401-DPB10202 DPA10401-DPB10402 DPA10401-DPB10501 DPA10401-DPB110501 DPA10401-DPB14901
PPFLWSGFELMPDK

(The sequence listing continues in the following parts.)

What is claimed is:

1. A composition comprising nucleic acid sequences encoding at least two amino acid sequences selected from the group consisting of SEQ ID NO: 1, SEQ ID NO: 3, SEQ ID NOs: 7 to 11, SEQ ID NOs: 13 to 15, SEQ ID NOs: 18 to 20, SEQ ID NOs: 22 to 24, SEQ ID NOs: 26 to 28, SEQ ID NOs: 31 to 33, SEQ ID NOs: 35 to 50, and SEQ ID NOs: 52 to 54.

2. The composition of claim 1, wherein the nucleic acid sequences are encoded in a construct, and wherein the construct allows for in vivo expression of the sequences.

3. The composition of claim 2, wherein the construct allows for in vivo expression of one or more peptides encoded by the nucleic acid sequences that is displayed by an HLA class I molecule.

4. The composition of claim 2, wherein the construct allows for in vivo expression of at least two peptides encoded by the nucleic acid sequences that are each displayed by a peptide specific set of HLA class I alleles, and wherein all of the peptide specific sets of HLA class I alleles are not identical.

5. The composition of claim 1, wherein each of the at least two amino sequences comprises a heteroclitic modification of a fragment of an HIV protein.

6. The composition of claim 1, wherein the immunogenic composition is administered to a subject, and wherein the immunogenic composition is administered in an effective amount to the subject to promote an immune response against HIV or to treat HIV in the subject.

7. The composition of claim 1, wherein the nucleic acid sequences encode at least three amino acid sequences selected from the group consisting of SEQ ID NO: 1, SEQ ID NO: 3, SEQ ID NOs: 7 to 11, SEQ ID NOs: 13 to 15, SEQ ID NOs: 18 to 20, SEQ ID NOs: 22 to 24, SEQ ID NOs: 26 to 28, SEQ ID NOs: 31 to 33, SEQ ID NOs: 35 to 50, and SEQ ID NOs: 52 to 54.

8. A composition comprising nucleic acid sequences encoding at least two amino acid sequences selected from the group consisting of SEQ ID NOs: 57 to 77 and SEQ ID NOs: 79 to 87.

9. The composition of claim 8, wherein the nucleic acid sequences are encoded in a construct, and wherein the construct allows for in vivo expression of the sequences.

10. The composition of claim 9, wherein the construct allows for in vivo expression of one or more peptides encoded by the nucleic acid sequences that is displayed by an HLA class II molecule.

11. The composition of claim 9, wherein the construct allows for in vivo expression of at least two peptides encoded by the nucleic acid sequences that are each displayed by a peptide specific set of HLA class II alleles, and wherein all of the peptide specific sets of HLA class II alleles are not identical.

12. The composition of claim 8, wherein each of the at least two amino sequences comprises a heteroclitic modification of a fragment of an HIV protein.

13. The composition of claim 8, wherein the immunogenic composition is administered to a subject, and wherein the immunogenic composition is administered in an effective amount to the subject to promote an immune response against HIV or to treat HIV in the subject.

14. The composition of claim 8, wherein the nucleic acid sequences encode at least three amino acid sequences selected from the group consisting of SEQ ID NOs: 57 to 77 and SEQ ID NOs: 79 to 87.
